United States Patent Application Publication US 2007/0214517 A1 - sequence listing, part 14

SEQ ID NO: 18108 - DNA, 1263 bp, Zea mays subsp. mays
  misc_feature (1)..(1263): Ceres Seq. ID no. 15180126
  misc_feature: MA Experiment ID: 108504 Result: Down-regulated in Transcription
  misc_feature: MA Experiment 108504 PARAMETER Experiment Name: Zm_Drought_P Parameter: Age (day) Value: 8
  misc_feature: MA Experiment 108504 PARAMETER Experiment Name: Zm_Drought_P Parameter: Organism Value: Zea mays
  misc_feature: MA Experiment 108504 PARAMETER Experiment Name: Zm_Drought_P Parameter: Plant Line Value: 35A19
  misc_feature: MA Experiment 108504 PARAMETER Experiment Name: Zm_Drought_P Parameter: Timepoint (hr) Value: 12
  misc_feature: MA Experiment 108504 PARAMETER Experiment Name: Zm_Drought_P Parameter: Tissue Value: Aerial
  misc_feature: MA Experiment 108504 PARAMETER Experiment Name: Zm_Drought_P Parameter: Treatment Value: Drought vs. No Drought
  misc_feature: MA Experiment ID: 108522 Result: Down-regulated in Transcription
  misc_feature: MA Experiment 108522 PARAMETER Experiment Name: Zm_42deg_Heat_P Parameter: Age (day) Value: 8
  misc_feature: MA Experiment 108522 PARAMETER Experiment Name: Zm_42deg_Heat_P Parameter: Organism Value: Zea mays
  misc_feature: MA Experiment 108522 PARAMETER Experiment Name: Zm_42deg_Heat_P Parameter: Plant Line Value: 35A19
  misc_feature: MA Experiment 108522 PARAMETER Experiment Name: Zm_42deg_Heat_P Parameter: Temperature (deg C) Value: 42 vs. 22
  misc_feature: MA Experiment 108522 PARAMETER Experiment Name: Zm_42deg_Heat_P Parameter: Timepoint (hr) Value: 1
  misc_feature: MA Experiment 108522 PARAMETER Experiment Name: Zm_42deg_Heat_P Parameter: Tissue Value: Aerial
  misc_feature: MA Experiment ID: 108527 Result: Down-regulated in Transcription
  misc_feature: MA Experiment 108527 PARAMETER Experiment Name: Zm_5mM_NO_P Parameter: Age (day) Value: 8
  misc_feature: MA Experiment 108527 PARAMETER Experiment Name: Zm_5mM_NO_P Parameter: Organism Value: Zea mays
  misc_feature: MA Experiment 108527 PARAMETER Experiment Name: Zm_5mM_NO_P Parameter: Plant Line Value: 35A19
  misc_feature: MA Experiment 108527 PARAMETER Experiment Name: Zm_5mM_NO_P Parameter: Timepoint (hr) Value: 6
  misc_feature: MA Experiment 108527 PARAMETER Experiment Name: Zm_5mM_NO_P Parameter: Tissue Value: Aerial
  misc_feature: MA Experiment 108527 PARAMETER Experiment Name: Zm_5mM_NO_P Parameter: Treatment Value: 5mM NO vs. No Treatment
  misc_feature: MA Experiment ID: 108535 Result: Up-regulated in Transcription
  misc_feature: MA Experiment 108535 PARAMETER Experiment Name: Zm_Meristem_P Parameter: Age (day) Value: 8
  misc_feature: MA Experiment 108535 PARAMETER Experiment Name: Zm_Meristem_P Parameter: Organism Value: Zea mays
  misc_feature: MA Experiment 108535 PARAMETER Experiment Name: Zm_Meristem_P Parameter: Plant Line Value: 35A19
  misc_feature: MA Experiment 108535 PARAMETER Experiment Name: Zm_Meristem_P Parameter: Tissue Value: Root Meristem vs. Above Root Meristem
  misc_feature: MA Experiment ID: 108536 Result: Down-regulated in Transcription
  misc_feature: MA Experiment 108536 PARAMETER Experiment Name: Zm_Meristem_P Parameter: Age (day) Value: 8
  misc_feature: MA Experiment 108536 PARAMETER Experiment Name: Zm_Meristem_P Parameter: Organism Value: Zea mays
  misc_feature: MA Experiment 108536 PARAMETER Experiment Name: Zm_Meristem_P Parameter: Plant Line Value: 35A19
  misc_feature: MA Experiment 108536 PARAMETER Experiment Name: Zm_Meristem_P Parameter: Tissue Value: Shoot Meristem vs. Above Shoot Meristem
  misc_feature: MA Experiment ID: 108544 Result: Down-regulated in Transcription
  misc_feature: MA Experiment ID: 108547 Result: Up-regulated in Transcription
  misc_feature: MA Experiment 108547 PARAMETER Experiment Name: Zm_Imbibed_Seeds_P Parameter: Age (day) Value: 4 vs. 2
  misc_feature: MA Experiment 108547 PARAMETER Experiment Name: Zm_Imbibed_Seeds_P Parameter: Organism Value: Zea mays
  misc_feature: MA Experiment 108547 PARAMETER Experiment Name: Zm_Imbibed_Seeds_P Parameter: Plant Line Value: 35A19
  misc_feature: MA Experiment 108547 PARAMETER Experiment Name: Zm_Imbibed_Seeds_P Parameter: Tissue Value: Aerial vs. Embryo
  misc_feature: MA Experiment ID: 108556 Result: Down-regulated in Transcription
  misc_feature: MA Experiment 108556 PARAMETER Experiment Name: Zm_Drought_P Parameter: Age (day) Value: 9
  misc_feature: MA Experiment 108556 PARAMETER Experiment Name: Zm_Drought_P Parameter: Organism Value: Zea mays
  misc_feature: MA Experiment 108556 PARAMETER Experiment Name: Zm_Drought_P Parameter: Plant Line Value: 35A19
  misc_feature: MA Experiment 108556 PARAMETER Experiment Name: Zm_Drought_P Parameter: Timepoint (hr) Value: 24
  misc_feature: MA Experiment 108556 PARAMETER Experiment Name: Zm_Drought_P Parameter: Tissue Value: Aerial
  misc_feature: MA Experiment 108556 PARAMETER Experiment Name: Zm_Drought_P Parameter: Treatment Value: Drought vs. No Drought
  misc_feature: MA Experiment ID: 108689 Result: Down-regulated in Transcription
  misc_feature: MA Experiment 108689 PARAMETER Experiment Name: Zm_Drought_Roots_P Parameter: Age (day) Value: 9
  misc_feature: MA Experiment 108689 PARAMETER Experiment Name: Zm_Drought_Roots_P Parameter: Organism Value: Zea mays
  misc_feature: MA Experiment 108689 PARAMETER Experiment Name: Zm_Drought_Roots_P Parameter: Plant Line Value: 35A19
  misc_feature: MA Experiment 108689 PARAMETER Experiment Name: Zm_Drought_Roots_P Parameter: Timepoint (hr) Value: 24
  misc_feature: MA Experiment 108689 PARAMETER Experiment Name: Zm_Drought_Roots_P Parameter: Tissue Value: Roots
  misc_feature: MA Experiment 108689 PARAMETER Experiment Name: Zm_Drought_Roots_P Parameter: Treatment Value: Drought vs. No Drought
  misc_feature: MA Experiment ID: 20000477 Result: Down-regulated in Transcription
  misc_feature: MA Experiment 20000477 PARAMETER Experiment Name: Zm_5mM_SA_P Parameter: Age (day) Value: 10
  misc_feature: MA Experiment 20000477 PARAMETER Experiment Name: Zm_5mM_SA_P Parameter: Organism Value: Zea mays
  misc_feature: MA Experiment 20000477 PARAMETER Experiment Name: Zm_5mM_SA_P Parameter: Plant Line Value: 35A19
  misc_feature: MA Experiment 20000477 PARAMETER Experiment Name: Zm_5mM_SA_P Parameter: Timepoint (hr) Value: 48
  misc_feature: MA Experiment 20000477 PARAMETER Experiment Name: Zm_5mM_SA_P Parameter: Tissue Value: Aerial
  misc_feature: MA Experiment 20000477 PARAMETER Experiment Name: Zm_5mM_SA_P Parameter: Treatment Value: 5mM SA vs. No Treatment
  misc_feature: MA Experiment ID: 20000478 Result: Down-regulated in Transcription
  misc_feature: MA Experiment 20000478 PARAMETER Experiment Name: Zm_5mM_SA_P Parameter: Age (day) Value: 11
  misc_feature: MA Experiment 20000478 PARAMETER Experiment Name: Zm_5mM_SA_P Parameter: Organism Value: Zea mays
  misc_feature: MA Experiment 20000478 PARAMETER Experiment Name: Zm_5mM_SA_P Parameter: Plant Line Value: 35A19
  misc_feature: MA Experiment 20000478 PARAMETER Experiment Name: Zm_5mM_SA_P Parameter: Timepoint (hr) Value: 72
  misc_feature: MA Experiment 20000478 PARAMETER Experiment Name: Zm_5mM_SA_P Parameter: Tissue Value: Aerial
  misc_feature: MA Experiment 20000478 PARAMETER Experiment Name: Zm_5mM_SA_P Parameter: Treatment Value: 5mM SA vs. No Treatment
  misc_feature: MA Experiment ID: 20000479 Result: Down-regulated in Transcription
  misc_feature: MA Experiment 20000479 PARAMETER Experiment Name: Zm_Drought_P Parameter: Age (day) Value: 10
  misc_feature: MA Experiment 20000479 PARAMETER Experiment Name: Zm_Drought_P Parameter: Organism Value: Zea mays
  misc_feature: MA Experiment 20000479 PARAMETER Experiment Name: Zm_Drought_P Parameter: Plant Line Value: 35A19
  misc_feature: MA Experiment 20000479 PARAMETER Experiment Name: Zm_Drought_P Parameter: Timepoint (hr) Value: 48
  misc_feature: MA Experiment 20000479 PARAMETER Experiment Name: Zm_Drought_P Parameter: Tissue Value: Aerial
  misc_feature: MA Experiment 20000479 PARAMETER Experiment Name: Zm_Drought_P Parameter: Treatment Value: Drought vs. No Drought
  misc_feature: MA Experiment ID: 20000480 Result: Down-regulated in Transcription
  misc_feature: MA Experiment 20000480 PARAMETER Experiment Name: Zm_Drought_P Parameter: Age (day) Value: 11
  misc_feature: MA Experiment 20000480 PARAMETER Experiment Name: Zm_Drought_P Parameter: Organism Value: Zea mays
  misc_feature: MA Experiment 20000480 PARAMETER Experiment Name: Zm_Drought_P Parameter: Plant Line Value: 35A19
  misc_feature: MA Experiment 20000480 PARAMETER Experiment Name: Zm_Drought_P Parameter: Timepoint (hr) Value: 72
  misc_feature: MA Experiment 20000480 PARAMETER Experiment Name: Zm_Drought_P Parameter: Tissue Value: Aerial
  misc_feature: MA Experiment 20000480 PARAMETER Experiment Name: Zm_Drought_P Parameter: Treatment Value: Drought vs. No Drought
  misc_feature: MA Experiment ID: 20000535 Result: Down-regulated in Transcription
  misc_feature: MA Experiment 20000535 PARAMETER Experiment Name: Zm_Hybrid_Seed_Dev_P Parameter: DAP Value: 30 vs. 12
  misc_feature: MA Experiment 20000535 PARAMETER Experiment Name: Zm_Hybrid_Seed_Dev_P Parameter: Organism Value: Zea mays
  misc_feature: MA Experiment 20000535 PARAMETER Experiment Name: Zm_Hybrid_Seed_Dev_P Parameter: Plant Line Value: 35A19
  misc_feature: MA Experiment 20000535 PARAMETER Experiment Name: Zm_Hybrid_Seed_Dev_P Parameter: Tissue Value: Embryo vs. Unfert Floret
  misc_feature: MA Experiment ID: 20000626 Result: Down-regulated in Transcription
  misc_feature: MA Experiment 20000626 PARAMETER Experiment Name: Zm_Herbicide-Treatments_P Parameter: Timepoint (hr) Value: 12
  misc_feature: MA Experiment 20000626 PARAMETER Experiment Name: Zm_Herbicide-Treatments_P Parameter: Tissue Value: Aerial
  misc_feature: MA Experiment 20000626 PARAMETER Experiment Name: Zm_Herbicide-Treatments_P Parameter: Treatment Value: Roundup vs. No Treatment
  misc_feature: MA Experiment ID: 20001608 Result: Up-regulated in Transcription
  misc_feature: MA Experiment 20001608 PARAMETER Experiment Name: Zm_50ppm_KNO3_L-to-H_P Parameter: Age (day) Value: 21
  misc_feature: MA Experiment 20001608 PARAMETER Experiment Name: Zm_50ppm_KNO3_L-to-H_P Parameter: Organism Value: Zea mays
  misc_feature: MA Experiment 20001608 PARAMETER Experiment Name: Zm_50ppm_KNO3_L-to-H_P Parameter: Plant Line Value: 35A19
  misc_feature: MA Experiment 20001608 PARAMETER Experiment Name: Zm_50ppm_KNO3_L-to-H_P Parameter: Timepoint (hr) Value: 48
  misc_feature: MA Experiment 20001608 PARAMETER Experiment Name: Zm_50ppm_KNO3_L-to-H_P Parameter: Tissue Value: Shoots
  misc_feature: MA Experiment 20001608 PARAMETER Experiment Name: Zm_50ppm_KNO3_L-to-H_P Parameter: Treatment Value: 50ppm KNO3 vs. 50ppm KCl
  misc_feature: MA Experiment ID: 20001614 Result: Up-regulated in Transcription
  misc_feature: MA Experiment 20001614 PARAMETER Experiment Name: Zm_50ppm_KNO3_L-to-H_P Parameter: Age (day) Value: 21
  misc_feature: MA Experiment 20001614 PARAMETER Experiment Name: Zm_50ppm_KNO3_L-to-H_P Parameter: Organism Value: Zea mays
  misc_feature: MA Experiment 20001614 PARAMETER Experiment Name: Zm_50ppm_KNO3_L-to-H_P Parameter: Plant Line Value: 35A19
  misc_feature: MA Experiment 20001614 PARAMETER Experiment Name: Zm_50ppm_KNO3_L-to-H_P Parameter: Timepoint (hr) Value: 48
  misc_feature: MA Experiment 20001614 PARAMETER Experiment Name: Zm_50ppm_KNO3_L-to-H_P Parameter: Tissue Value: Roots
  misc_feature: MA Experiment 20001614 PARAMETER Experiment Name: Zm_50ppm_KNO3_L-to-H_P Parameter: Treatment Value: 50ppm KNO3 vs. 50ppm KCl
cagctgctcctggccgtcgacaccagcaactacgcctcgtggatcccttgcgccggctgcgcgggctgccccacgtcgtccgcggcgcccttcgacccggccgcgtccgcctcgtaccgcacggtgccctgcgggtcgccgctgtgcgcgcaggcacccaacgcggcgtccccgcccggcggcaaggcctgcggcttcagcctcacctacgccgactcctcgctgcaggccgcgctgtcgcaggactccctcgccgtcgcaggcaacgccgtgaaggcctacaccttcgggtgcctgcagagggccactggcacggctgcgccgccgcaggggctgctgggtctcggccgcggcccgctgtcgttcctttcgcagaccaaggacatgtacgaggccaccttctcgtactgtctccccagcttcaagtcgctcaacttctctggaacgctccggctcgggcgcaacggccagccgcagcgcatcaagacgacgccgctgctggccaacccgcaccggtcgtcgctctactacgtgaacatgaccggcgtccgcgtgggcaggaaggtggtgcccatcccggcgttcgacccggcgacgggcgcgggcaccgtgctggactctggcaccatgttcacccggctggtggcgccggcgtacgtggccgtgcgggacgaggtccggcgccgcgtcggcgcgcccgtatcctcgctgggagggttcgacacgtgcttcaacaccaccgccgtcgcgtggccgcccatgacgctgctgttcgacggcatgcaggtgacgttgccggaggagaacgtggtcatccacagcacgtacgcgaccatcagctgcctggccatggccgcggcgcccgacggcgtcaacaccgtgctcaacgtcatcccagcatgcagcagcagaaccaccgtgtgctcttcgacgtgcccaacggacgcgtcggcttcgcgcgcgagcgctgcactgccgcttgatcagcttgctcgcgcgcctgcgcgcgggctcggattcgggttatatttagttaaacctacgttctacggttgtggacgtcatgcactgctgtcggagtgggtgattaataatttaactttccttttctttttaatctcgttgctcttcagatttaccatatgtgtttcacattcaccgcgttatgtggtttaggggctgaatgattggggtctaaataatgtactgcatattccagttttggattaagcacggtcgtcgtttaggcttgatatgcctaac

SEQ ID NO: 18109 - protein, 391 aa, Zea mays subsp. mays
  peptide (1)..(391): Ceres Seq. ID no. 15180127
  misc_feature (1)..(298): Pfam Name: Eukaryotic aspartyl protease Pfam Description: Eukaryotic aspartyl protease
  misc_feature (4)..(297): Homolog of NCBI NO: 21594980 NR Description: chloroplast nucleoid DNA binding protein,
  misc_feature (4)..(297): Homolog of NCBI NO: 15228618 NR Description: expressed protein [Arabidopsis thaliana]
  misc_feature (4)..(297): Homolog of NCBI NO: 15223368 NR Description: chloroplast nucleoid DNA binding protein -related
  misc_feature (2)..(298): Homolog of NCBI NO: 21450872 NR Description: unknown protein [Arabidopsis thaliana]
  misc_feature (2)..(298): Homolog of NCBI NO: 18391062 NR Description: expressed protein [Arabidopsis thaliana]
  misc_feature (2)..(298): Homolog of NCBI NO: 15240680 NR Description: nucleoid DNA-binding-related protein [Arabidopsis
  misc_feature (2)..(298): Homolog of NCBI NO: 21617933 NR Description: nucleoid DNA-binding-like protein [Arabidopsis
  misc_feature (2)..(298): Homolog of NCBI NO: 15232503 NR Description: nucleoid DNA-binding - like protein [Arabidopsis
  misc_feature (2)..(298): Homolog of NCBI NO: 20161865 NR Description: putative nucleoid DNA-binding-like protein
  misc_feature (1)..(298): Homolog of NCBI NO: 34899068 NR Description: similar to nucleoid DNA-binding-like protein
QLLLAVDTSNYASWIPCAGCAGCPTSSAAPFDPAASASYRTVPCGSPLCAQAPNAASPPGGKACGFSLTYADSSLQAALSQDSLAVAGNAVKAYTFGCLQRATGTAAPPQGLLGLGRGPLSFLSQTKDMYEATFSYCLPSFKSLNFSGTLRLGRNGQPQRIKTTPLLANPHRSSLYYVNMTGVRVGRKVVPIPAFDPATGAGTVLDSGTMFTRLVAPAYVAVRDEVRRRVGAPVSSLGGFDTCFNTTAVAWPPMTLLFDGMQVTLPEENVVIHSTYATISCLAMAAAPDGVNTVLNVIPACSSRTTVCSSTCPTDASASRASAALPLDQLARAPARGLGFGLYLVKPTFYGCGRHALLSEWVINNLTFLFFLISLLFRFTICVSHSPRYVV

SEQ ID NO: 18110 - protein, 326 aa, Zea mays subsp. mays
  peptide (1)..(326): Ceres Seq. ID no. 15180128
  misc_feature (299)..(325): Homolog of NCBI NO: 34910676 NR Description: P0690B02.2 [Oryza sativa (japonica
  misc_feature (299)..(323): Homolog of NCBI NO: 21450872 NR Description: unknown protein [Arabidopsis thaliana]
  misc_feature (299)..(323): Homolog of NCBI NO: 18391062 NR Description: expressed protein [Arabidopsis thaliana]
  misc_feature (299)..(324): Homolog of NCBI NO: 15240680 NR Description: nucleoid DNA-binding-related protein [Arabidopsis
  misc_feature (299)..(324): Homolog of NCBI NO: 21617933 NR Description: nucleoid DNA-binding-like protein [Arabidopsis
  misc_feature (299)..(324): Homolog of NCBI NO: 15232503 NR Description: nucleoid DNA-binding - like protein [Arabidopsis
  misc_feature (299)..(325): Homolog of NCBI NO: 20161865 NR Description: putative nucleoid DNA-binding-like protein
  misc_feature (299)..(326): Homolog of NCBI NO: 34899068 NR Description: similar to nucleoid DNA-binding-like protein
AAPGRRHQQLRLVDPLRRLRGLPHVVRGALRPGRVRLVPHGALRVAAVRAGTQRGVPARRQGLRLQPHLRRLLAAGRAVAGLPRRRRQRREGLHLRVPAEGHWHGCAAAGAAGSRPRPAVVPFADQGHVRGHLLVLSPQLQVAQLLWNAPARAQRPAAAHQDDAAAGQPAPVVALLREHDRRPRGQEGGAHPGVRPGDGRGHRAGLWHHVHPAGGAGVRGRAGRGPAPRRRARILAGRVRHVLQHHRRRVAAHDAAVRRHAGDVAGGERGHPQHVRDHQLPGHGRGARRRQHRAQRHPSMQQQNHRVLFDVPNGRVGFARERCTAA

SEQ ID NO: 18111 - protein, 263 aa, Zea mays subsp. mays
  peptide (1)..(263): Ceres Seq. ID no. 15180129
  misc_feature (1)..(170): Pfam Name: Eukaryotic aspartyl protease Pfam Description: Eukaryotic aspartyl protease
  misc_feature (1)..(169): Homolog of NCBI NO: 21594980 NR Description: chloroplast nucleoid DNA binding protein,
  misc_feature (1)..(169): Homolog of NCBI NO: 15228618 NR Description: expressed protein [Arabidopsis thaliana]
  misc_feature (1)..(169): Homolog of NCBI NO: 15223368 NR Description: chloroplast nucleoid DNA binding protein -related
  misc_feature (1)..(170): Homolog of NCBI NO: 21450872 NR Description: unknown protein [Arabidopsis thaliana]
  misc_feature (1)..(170): Homolog of NCBI NO: 18391062 NR Description: expressed protein [Arabidopsis thaliana]
  misc_feature (1)..(170): Homolog of NCBI NO: 15240680 NR Description: nucleoid DNA-binding-related protein [Arabidopsis
  misc_feature (1)..(170): Homolog of NCBI NO: 21617933 NR Description: nucleoid DNA-binding-like protein [Arabidopsis
  misc_feature (1)..(170): Homolog of NCBI NO: 15232503 NR Description: nucleoid DNA-binding - like protein [Arabidopsis
  misc_feature (1)..(170): Homolog of NCBI NO: 20161865 NR Description: putative nucleoid DNA-binding-like protein
  misc_feature (1)..(170): Homolog of NCBI NO: 34899068 NR Description: similar to nucleoid DNA-binding-like protein
MYEATFSYCLPSFKSLNFSGTLRLGRNGQPQRIKTTPLLANPHRSSLYYVNMTGVRVGRKVVPIPAFDPATGAGTVLDSGTMFTRLVAPAYVAVRDEVRRRVGAPVSSLGGFDTCFNTTAVAWPPMTLLFDGMQVTLPEENVVIHSTYATISCLAMAAAPDGVNTVLNVIPACSSRTTVCSSTCPTDASASRASAALPLDQLARAPARGLGFGLYLVKPTFYGCGRHALLSEWVINNLTFLFFLISLLFRFTICVSHSPRYVV

SEQ ID NO: 18112 - DNA, 625 bp, Zea mays subsp. mays
  misc_feature (1)..(625): Ceres Seq. ID no. 13491331
  misc_feature: MA Experiment ID: 108523 Result: Up-regulated in Transcription
  misc_feature: MA Experiment 108523 PARAMETER Experiment Name: Zm_42deg_Heat_P Parameter: Age (day) Value: 8
  misc_feature: MA Experiment 108523 PARAMETER Experiment Name: Zm_42deg_Heat_P Parameter: Organism Value: Zea mays
  misc_feature: MA Experiment 108523 PARAMETER Experiment Name: Zm_42deg_Heat_P Parameter: Plant Line Value: 35A19
  misc_feature: MA Experiment 108523 PARAMETER Experiment Name: Zm_42deg_Heat_P Parameter: Temperature (deg C) Value: 42 vs. 22
  misc_feature: MA Experiment 108523 PARAMETER Experiment Name: Zm_42deg_Heat_P Parameter: Timepoint (hr) Value: 6
  misc_feature: MA Experiment 108523 PARAMETER Experiment Name: Zm_42deg_Heat_P Parameter: Tissue Value: Aerial
  misc_feature: MA Experiment ID: 108527 Result: Up-regulated in Transcription
  misc_feature: MA Experiment 108527 PARAMETER Experiment Name: Zm_5mM_NO_P Parameter: Age (day) Value: 8
  misc_feature: MA Experiment 108527 PARAMETER Experiment Name: Zm_5mM_NO_P Parameter: Organism Value: Zea mays
  misc_feature: MA Experiment 108527 PARAMETER Experiment Name: Zm_5mM_NO_P Parameter: Plant Line Value: 35A19
  misc_feature: MA Experiment 108527 PARAMETER Experiment Name: Zm_5mM_NO_P Parameter: Timepoint (hr) Value: 6
  misc_feature: MA Experiment 108527 PARAMETER Experiment Name: Zm_5mM_NO_P Parameter: Tissue Value: Aerial
  misc_feature: MA Experiment 108527 PARAMETER Experiment Name: Zm_5mM_NO_P Parameter: Treatment Value: 5mM NO vs. No Treatment
  misc_feature: MA Experiment ID: 20000478 Result: Up-regulated in Transcription
  misc_feature: MA Experiment 20000478 PARAMETER Experiment Name: Zm_5mM_SA_P Parameter: Age (day) Value: 11
  misc_feature: MA Experiment 20000478 PARAMETER Experiment Name: Zm_5mM_SA_P Parameter: Organism Value: Zea mays
  misc_feature: MA Experiment 20000478 PARAMETER Experiment Name: Zm_5mM_SA_P Parameter: Plant Line Value: 35A19
  misc_feature: MA Experiment 20000478 PARAMETER Experiment Name: Zm_5mM_SA_P Parameter: Timepoint (hr) Value: 72
  misc_feature: MA Experiment 20000478 PARAMETER Experiment Name: Zm_5mM_SA_P Parameter: Tissue Value: Aerial
  misc_feature: MA Experiment 20000478 PARAMETER Experiment Name: Zm_5mM_SA_P Parameter: Treatment Value: 5mM SA vs. No Treatment
  misc_feature: MA Experiment ID: 20000479 Result: Up-regulated in Transcription
  misc_feature: MA Experiment 20000479 PARAMETER Experiment Name: Zm_Drought_P Parameter: Age (day) Value: 10
  misc_feature: MA Experiment 20000479 PARAMETER Experiment Name: Zm_Drought_P Parameter: Organism Value: Zea mays
  misc_feature: MA Experiment 20000479 PARAMETER Experiment Name: Zm_Drought_P Parameter: Plant Line Value: 35A19
  misc_feature: MA Experiment 20000479 PARAMETER Experiment Name: Zm_Drought_P Parameter: Timepoint (hr) Value: 48
  misc_feature: MA Experiment 20000479 PARAMETER Experiment Name: Zm_Drought_P Parameter: Tissue Value: Aerial
  misc_feature: MA Experiment 20000479 PARAMETER Experiment Name: Zm_Drought_P Parameter: Treatment Value: Drought vs. No Drought
  misc_feature: MA Experiment ID: 20000480 Result: Up-regulated in Transcription
  misc_feature: MA Experiment 20000480 PARAMETER Experiment Name: Zm_Drought_P Parameter: Age (day) Value: 11
  misc_feature: MA Experiment 20000480 PARAMETER Experiment Name: Zm_Drought_P Parameter: Organism Value: Zea mays
  misc_feature: MA Experiment 20000480 PARAMETER Experiment Name: Zm_Drought_P Parameter: Plant Line Value: 35A19
  misc_feature: MA Experiment 20000480 PARAMETER Experiment Name: Zm_Drought_P Parameter: Timepoint (hr) Value: 72
  misc_feature: MA Experiment 20000480 PARAMETER Experiment Name: Zm_Drought_P Parameter: Tissue Value: Aerial
  misc_feature: MA Experiment 20000480 PARAMETER Experiment Name: Zm_Drought_P Parameter: Treatment Value: Drought vs. No Drought
  misc_feature: MA Experiment ID: 20000492 Result: Up-regulated in Transcription
  misc_feature: MA Experiment 20000492 PARAMETER Experiment Name: Zm_Hybrid_Seed_Dev_P Parameter: DAP Value: 12
  misc_feature: MA Experiment 20000492 PARAMETER Experiment Name: Zm_Hybrid_Seed_Dev_P Parameter: Organism Value: Zea mays
  misc_feature: MA Experiment 20000492 PARAMETER Experiment Name: Zm_Hybrid_Seed_Dev_P Parameter: Plant Line Value: 35A19
  misc_feature: MA Experiment 20000492 PARAMETER Experiment Name: Zm_Hybrid_Seed_Dev_P Parameter: Tissue Value: Fert Kernel vs. Unfert Floret
atttgactgggattcaggtgacggcacaagaagtgtcaacgatgctccggtgggggcacaacagcatcatcttcctgataaacaatggagggtacacaatcgaggtggagattcacgatggcccttataacgttatcaagaactggaactacaccggtctggtggaagcgttccacaatggcgagggcgcgtgctacacagcaaaggttcgaacagaggaggagctgacggaggcactggaggcagctctgggacctaagaaggactgcttatgcttcatcgaggtcatcgtgcataaggatgacaccagcaaagagcttctcgagtggggatctagggtttctgcggcgaatagccgtccacctaatcctcagtgaatacatcaggtctcccgaattgtcctgtaaaccgatccgctttctggtgacgtccatagcaagaagtctcggcgatgacatgctgccgatttctgaataaatcgtccctgcaattcactggtgttgaagtcctcgttgtaaagatacaaagacgtttggaagaatcactgacaacgtaaactctacgtatcttacgtgaaatagccccgtgatctacatatatataaagcagattttgagagtactag

SEQ ID NO: 18113 - protein, 124 aa, Zea mays subsp. mays
  peptide (1)..(124): Ceres Seq. ID no. 13491332
  misc_feature (5)..(124): Homolog of NCBI NO: 10121330 NR Description: pyruvate decarboxylase [Fragaria x ananassa]
  misc_feature (5)..(124): Homolog of NCBI NO: 19851522 NR Description: pyruvate decarboxylase [Zea mays]
  misc_feature (5)..(124): Homolog of NCBI NO: 19851524 NR Description: pyruvate decarboxylase [Zea mays]
  misc_feature (5)..(124): Homolog of NCBI NO: 17225598 NR Description: pyruvate decarboxylase [Fragaria x ananassa]
  misc_feature (5)..(124): Homolog of NCBI NO: 1706328 NR Description: Pyruvate decarboxylase isozyme 2 (PDC)
  misc_feature (5)..(124): Homolog of NCBI NO: 29373077 NR Description: pyruvate decarboxylase 1 [Lotus corniculatus]
  misc_feature (5)..(124): Homolog of NCBI NO: 6469312 NR Description: pyruvate decarboxylase [Saccharum officinarum]
  misc_feature (20)..(124): Homolog of NCBI NO: 729304 NR Description: Pyruvate decarboxylase isozyme 2 (PDC)
  misc_feature (5)..(124): Homolog of NCBI NO: 34896032 NR Description: Similar to Zea mays mRNA for pyruvate
  misc_feature (5)..(124): Homolog of NCBI NO: 19851518 NR Description: pyruvate decarboxylase [Zea mays]
LTGIQVTAQEVSTMLRWGHNSIIFLINNGGYTIEVEIHDGPYNVIKNWNYTGLVEAFHNGEGACYTAKVRTEEELTEALEAALGPKKDCLCFIEVIVHKDDTSKELLEWGSRVSAANSRPPNPQ

SEQ ID NO: 18114 - protein, 111 aa, Zea mays subsp. mays
  peptide (1)..(111): Ceres Seq. ID no. 13491333
  misc_feature (1)..(111): Homolog of NCBI NO: 10121330 NR Description: pyruvate decarboxylase [Fragaria x ananassa]
  misc_feature (1)..(111): Homolog of NCBI NO: 19851524 NR Description: pyruvate decarboxylase [Zea mays]
  misc_feature (1)..(111): Homolog of NCBI NO: 19851522 NR Description: pyruvate decarboxylase [Zea mays]
  misc_feature (1)..(111): Homolog of NCBI NO: 17225598 NR Description: pyruvate decarboxylase [Fragaria x ananassa]
  misc_feature (1)..(111): Homolog of NCBI NO: 1706328 NR Description: Pyruvate decarboxylase isozyme 2 (PDC)
  misc_feature (1)..(111): Homolog of NCBI NO: 29373077 NR Description: pyruvate decarboxylase 1 [Lotus corniculatus]
  misc_feature (1)..(111): Homolog of NCBI NO: 6469312 NR Description: pyruvate decarboxylase [Saccharum officinarum]
  misc_feature (7)..(111): Homolog of NCBI NO: 729304 NR Description: Pyruvate decarboxylase isozyme 2 (PDC)
  misc_feature (1)..(111): Homolog of NCBI NO: 34896032 NR Description: Similar to Zea mays mRNA for pyruvate
  misc_feature (1)..(111): Homolog of NCBI NO: 19851518 NR Description: pyruvate decarboxylase [Zea mays]
MLRWGHNSIIFLINNGGYTIEVEIHDGPYNVIKNWNYTGLVEAFHNGEGACYTAKVRTEEELTEALEAALGPKKDCLCFIEVIVHKDDTSKELLEWGSRVSAANSRPPNPQ

SEQ ID NO: 18115 - DNA, 796 bp, Zea mays subsp. mays
  misc_feature (1)..(796): Ceres Seq. ID no. 12454792
  misc_feature: MA Experiment ID: 108504 Result: Down-regulated in Transcription
  misc_feature: MA Experiment 108504 PARAMETER Experiment Name: Zm_Drought_P Parameter: Age (day) Value: 8
  misc_feature: MA Experiment 108504 PARAMETER Experiment Name: Zm_Drought_P Parameter: Organism Value: Zea mays
  misc_feature: MA Experiment 108504 PARAMETER Experiment Name: Zm_Drought_P Parameter: Plant Line Value: 35A19
  misc_feature: MA Experiment 108504 PARAMETER Experiment Name: Zm_Drought_P Parameter: Timepoint (hr) Value: 12
  misc_feature: MA Experiment 108504 PARAMETER Experiment Name: Zm_Drought_P Parameter: Tissue Value: Aerial
  misc_feature: MA Experiment 108504 PARAMETER Experiment Name: Zm_Drought_P Parameter: Treatment Value: Drought vs. No Drought
  misc_feature: MA Experiment ID: 108527 Result: Down-regulated in Transcription
  misc_feature: MA Experiment 108527 PARAMETER Experiment Name: Zm_5mM_NO_P Parameter: Age (day) Value: 8
  misc_feature: MA Experiment 108527 PARAMETER Experiment Name: Zm_5mM_NO_P Parameter: Organism Value: Zea mays
  misc_feature: MA Experiment 108527 PARAMETER Experiment Name: Zm_5mM_NO_P Parameter: Plant Line Value: 35A19
  misc_feature: MA Experiment 108527 PARAMETER Experiment Name: Zm_5mM_NO_P Parameter: Timepoint (hr) Value: 6
  misc_feature: MA Experiment 108527 PARAMETER Experiment Name: Zm_5mM_NO_P Parameter: Tissue Value: Aerial
  misc_feature: MA Experiment 108527 PARAMETER Experiment Name: Zm_5mM_NO_P Parameter: Treatment Value: 5mM NO vs. No Treatment
  misc_feature: MA Experiment ID: 108528 Result: Down-regulated in Transcription
  misc_feature: MA Experiment 108528 PARAMETER Experiment Name: Zm_Imbibed_Seeds_P Parameter: Age (day) Value: 5 vs. 2
  misc_feature: MA Experiment 108528 PARAMETER Experiment Name: Zm_Imbibed_Seeds_P Parameter: Organism Value: Zea mays
  misc_feature: MA Experiment 108528 PARAMETER Experiment Name: Zm_Imbibed_Seeds_P Parameter: Plant Line Value: 35A19
  misc_feature: MA Experiment 108528 PARAMETER Experiment Name: Zm_Imbibed_Seeds_P Parameter: Tissue Value: Aerial vs. Embryo
  misc_feature: MA Experiment ID: 108529 Result: Down-regulated in Transcription
  misc_feature: MA Experiment 108529 PARAMETER Experiment Name: Zm_Imbibed_Seeds_P Parameter: Age (day) Value: 5 vs. 2
  misc_feature: MA Experiment 108529 PARAMETER Experiment Name: Zm_Imbibed_Seeds_P Parameter: Organism Value: Zea mays
  misc_feature: MA Experiment 108529 PARAMETER Experiment Name: Zm_Imbibed_Seeds_P Parameter: Plant Line Value: 35A19
  misc_feature: MA Experiment 108529 PARAMETER Experiment Name: Zm_Imbibed_Seeds_P Parameter: Tissue Value: Roots vs. Embryo
  misc_feature: MA Experiment ID: 108535 Result: Up-regulated in Transcription
  misc_feature: MA Experiment 108535 PARAMETER Experiment Name: Zm_Meristem_P Parameter: Age (day) Value: 8
  misc_feature: MA Experiment 108535 PARAMETER Experiment Name: Zm_Meristem_P Parameter: Organism Value: Zea mays
  misc_feature: MA Experiment 108535 PARAMETER Experiment Name: Zm_Meristem_P Parameter: Plant Line Value: 35A19
  misc_feature: MA Experiment 108535 PARAMETER Experiment Name: Zm_Meristem_P Parameter: Tissue Value: Root Meristem vs. Above Root Meristem
  misc_feature: MA Experiment ID: 108536 Result: Down-regulated in Transcription
  misc_feature: MA Experiment 108536 PARAMETER Experiment Name: Zm_Meristem_P Parameter: Age (day) Value: 8
  misc_feature: MA Experiment 108536 PARAMETER Experiment Name: Zm_Meristem_P Parameter: Organism Value: Zea mays
  misc_feature: MA Experiment 108536 PARAMETER Experiment Name: Zm_Meristem_P Parameter: Plant Line Value: 35A19
  misc_feature: MA Experiment 108536 PARAMETER Experiment Name: Zm_Meristem_P Parameter: Tissue Value: Shoot Meristem vs. Above Shoot Meristem
  misc_feature: MA Experiment ID: 108543 Result: Up-regulated in Transcription
  misc_feature: MA Experiment ID: 108544 Result: Down-regulated in Transcription
  misc_feature: MA Experiment ID: 108547 Result: Down-regulated in Transcription
  misc_feature: MA Experiment 108547 PARAMETER Experiment Name: Zm_Imbibed_Seeds_P Parameter: Age (day) Value: 4 vs. 2
  misc_feature: MA Experiment 108547 PARAMETER Experiment Name: Zm_Imbibed_Seeds_P Parameter: Organism Value: Zea mays
  misc_feature: MA Experiment 108547 PARAMETER Experiment Name: Zm_Imbibed_Seeds_P Parameter: Plant Line Value: 35A19
  misc_feature: MA Experiment 108547 PARAMETER Experiment Name: Zm_Imbibed_Seeds_P Parameter: Tissue Value: Aerial vs. Embryo
  misc_feature: MA Experiment ID: 108559 Result: Down-regulated in Transcription
  misc_feature: MA Experiment 108559 PARAMETER Experiment Name: Zm_5mM_NO_P Parameter: Age (day) Value: 8
  misc_feature: MA Experiment 108559 PARAMETER Experiment Name: Zm_5mM_NO_P Parameter: Organism Value: Zea mays
  misc_feature: MA Experiment 108559 PARAMETER Experiment Name: Zm_5mM_NO_P Parameter: Plant Line Value: 35A19
  misc_feature: MA Experiment 108559 PARAMETER Experiment Name: Zm_5mM_NO_P Parameter: Timepoint (hr) Value: 12
  misc_feature: MA Experiment 108559 PARAMETER Experiment Name: Zm_5mM_NO_P Parameter: Tissue Value: Aerial
  misc_feature: MA Experiment 108559 PARAMETER Experiment Name: Zm_5mM_NO_P Parameter: Treatment Value: 5mM NO vs. No Treatment
  misc_feature: MA Experiment ID: 108597 Result: Down-regulated in Transcription
  misc_feature: MA Experiment 108597 PARAMETER Experiment Name: Zm_100uM_ABA_P Parameter: Age (day) Value: 9
  misc_feature: MA Experiment 108597 PARAMETER Experiment Name: Zm_100uM_ABA_P Parameter: Organism Value: Zea mays
  misc_feature: MA Experiment 108597 PARAMETER Experiment Name: Zm_100uM_ABA_P Parameter: Plant Line Value: 35A19
  misc_feature: MA Experiment 108597 PARAMETER Experiment Name: Zm_100uM_ABA_P Parameter: Timepoint (hr) Value: 24
  misc_feature: MA Experiment 108597 PARAMETER Experiment Name: Zm_100uM_ABA_P Parameter: Tissue Value: Aerial
  misc_feature: MA Experiment 108597 PARAMETER Experiment Name: Zm_100uM_ABA_P Parameter: Treatment Value: 100uM ABA vs. No Treatment
  misc_feature: MA Experiment ID: 20000479 Result: Down-regulated in Transcription
  misc_feature: MA Experiment 20000479 PARAMETER Experiment Name: Zm_Drought_P Parameter: Age (day) Value: 10
  misc_feature: MA Experiment 20000479 PARAMETER Experiment Name: Zm_Drought_P Parameter: Organism Value: Zea mays
  misc_feature: MA Experiment 20000479 PARAMETER Experiment Name: Zm_Drought_P Parameter: Plant Line Value: 35A19
  misc_feature: MA Experiment 20000479 PARAMETER Experiment Name: Zm_Drought_P Parameter: Timepoint (hr) Value: 48
  misc_feature: MA Experiment 20000479 PARAMETER Experiment Name: Zm_Drought_P Parameter: Tissue Value: Aerial
  misc_feature: MA Experiment 20000479 PARAMETER Experiment Name: Zm_Drought_P Parameter: Treatment Value: Drought vs. No Drought
  misc_feature: MA Experiment ID: 20000488 Result: Down-regulated in Transcription
  misc_feature: MA Experiment 20000488 PARAMETER Experiment Name: Zm_50mM_NH4NO3_L_to_H_P Parameter: Organism Value: Zea mays
  misc_feature: MA Experiment 20000488 PARAMETER Experiment Name: Zm_50mM_NH4NO3_L_to_H_P Parameter: Timepoint (hr) Value: 8
  misc_feature: MA Experiment 20000488 PARAMETER Experiment Name: Zm_50mM_NH4NO3_L_to_H_P Parameter: Tissue Value: Leaves
  misc_feature: MA Experiment 20000488 PARAMETER Experiment Name: Zm_50mM_NH4NO3_L_to_H_P Parameter: Treatment Value: 50mM NH4NO3 vs. 100mM Mannitol
  misc_feature: MA Experiment ID: 20000532 Result: Down-regulated in Transcription
  misc_feature: MA Experiment 20000532 PARAMETER Experiment Name: Zm_0.001percent_MeJA_P Parameter: Age (day) Value: 10
  misc_feature: MA Experiment 20000532 PARAMETER Experiment Name: Zm_0.001percent_MeJA_P Parameter: Organism Value: Zea mays
  misc_feature: MA Experiment 20000532 PARAMETER Experiment Name: Zm_0.001percent_MeJA_P Parameter: Plant Line Value: 35A19
  misc_feature: MA Experiment 20000532 PARAMETER Experiment Name: Zm_0.001percent_MeJA_P Parameter: Timepoint (hr) Value: 48
  misc_feature: MA Experiment 20000532 PARAMETER Experiment Name: Zm_0.001percent_MeJA_P Parameter: Tissue Value: Aerial
  misc_feature: MA Experiment 20000532 PARAMETER Experiment Name: Zm_0.001percent_MeJA_P Parameter: Treatment Value: 0.001percent MeJA vs. No Treatment
  misc_feature: MA Experiment ID: 20000533 Result: Down-regulated in Transcription
  misc_feature: MA Experiment 20000533 PARAMETER Experiment Name: Zm_0.001percent_MeJA_P Parameter: Age (day) Value: 11
  misc_feature: MA Experiment 20000533 PARAMETER Experiment Name: Zm_0.001percent_MeJA_P Parameter: Organism Value: Zea mays
  misc_feature: MA Experiment 20000533 PARAMETER Experiment Name: Zm_0.001percent_MeJA_P Parameter: Plant Line Value: 35A19
  misc_feature: MA Experiment 20000533 PARAMETER Experiment Name: Zm_0.001percent_MeJA_P Parameter: Timepoint (hr) Value: 72
  misc_feature: MA Experiment 20000533 PARAMETER Experiment Name: Zm_0.001percent_MeJA_P Parameter: Tissue Value: Aerial
  misc_feature: MA Experiment 20000533 PARAMETER Experiment Name: Zm_0.001percent_MeJA_P Parameter: Treatment Value: 0.001percent MeJA vs. No Treatment
  misc_feature: MA Experiment ID: 20000626 Result: Down-regulated in Transcription
  misc_feature: MA Experiment 20000626 PARAMETER Experiment Name: Zm_Herbicide-Treatments_P Parameter: Timepoint (hr) Value: 12
  misc_feature: MA Experiment 20000626 PARAMETER Experiment Name: Zm_Herbicide-Treatments_P Parameter: Tissue Value: Aerial
  misc_feature: MA Experiment 20000626 PARAMETER Experiment Name: Zm_Herbicide-Treatments_P Parameter: Treatment Value: Roundup vs. No Treatment
  misc_feature: MA Experiment ID: 20000627 Result: Down-regulated in Transcription
  misc_feature: MA Experiment 20000627 PARAMETER Experiment Name: Zm_Herbicide-Treatments_P Parameter: Timepoint (hr) Value: 12
  misc_feature: MA Experiment 20000627 PARAMETER Experiment Name: Zm_Herbicide-Treatments_P Parameter: Tissue Value: Aerial
  misc_feature: MA Experiment 20000627 PARAMETER Experiment Name: Zm_Herbicide-Treatments_P Parameter: Treatment Value: Finale vs. No Treatment
  misc_feature: MA Experiment ID: 20001608 Result: Up-regulated in Transcription
  misc_feature: MA Experiment 20001608 PARAMETER Experiment Name: Zm_50ppm_KNO3_L-to-H_P Parameter: Age (day) Value: 21
  misc_feature: MA Experiment 20001608 PARAMETER Experiment Name: Zm_50ppm_KNO3_L-to-H_P Parameter: Organism Value: Zea mays
  misc_feature: MA Experiment 20001608 PARAMETER Experiment Name: Zm_50ppm_KNO3_L-to-H_P Parameter: Plant Line Value: 35A19
  misc_feature: MA Experiment 20001608 PARAMETER Experiment Name: Zm_50ppm_KNO3_L-to-H_P Parameter: Timepoint (hr) Value: 48
  misc_feature: MA Experiment 20001608 PARAMETER Experiment Name: Zm_50ppm_KNO3_L-to-H_P Parameter: Tissue Value: Shoots
  misc_feature: MA Experiment 20001608 PARAMETER Experiment Name: Zm_50ppm_KNO3_L-to-H_P Parameter: Treatment Value: 50ppm KNO3 vs. 50ppm KCl
aacatcaacaccagacagcactacagtctacagcagcagggcaccaccaccacagcaatgcagcagaacgccgcccgcctgctggccgccgccgtggcctgcctggcgctggcgctggcgccatcctcggacgcgcaggggacggcggtgccgtcgtgcgcggcgaagcttgtgccgtgcacggggtacctcaactccacgtccacggcggcgcccgcggcggcctgctgcgggccgctcagggaggcagcggccaacgagacggcgtgcctctgcgccatgctgctcaacagggccgcgctgcgggcgttcggcgtggcgcccgagcagggcctggtcctcgcccggcggtgcaacgtcaccaccgacgcctccgcctgcgccgccgccggaggctcagccacgggcggcagtactgctgcatcttcagcttccaccggcagcgcttcctcctcctcctctttcttcttcagtggccaaaccaacagccaacggaggcggcgtggcgcgtcgcctgagcatgactggcgcgtcctcattgctaggcttcagtttcatctggtggtgggcggtcatggcgtaggagtatctgccgtggcaccggcgattttcctggctggatccagaattccagacttatatgtactactgttgagtagcaggtttcattgcttctttttatatataatatgccctgttgtaccactaccattgatgccgtgagcagaacaagagaaaaaaattgtcaagaacgatgcaaacaaccagaaggaaagaacgtactctcattttaaat

SEQ ID NO: 18116 - protein, 240 aa, Zea mays subsp. mays
  peptide (1)..(240): Ceres Seq. ID no. 12454793
  misc_feature (53)..(127): Pfam Name: Protease inhibitor/seed storage/LTP family Pfam Description: Protease inhibitor/seed storage/LTP family
  misc_feature (27)..(127): Homolog of NCBI NO: 6630451 NR Description: F23N19.16 [Arabidopsis thaliana]
  misc_feature (27)..(138): Homolog of NCBI NO: 30696757 NR Description: protease inhibitor/seed storage/lipid transfer
  misc_feature (30)..(170): Homolog of NCBI NO: 28269449 NR Description: putative protease inhibitor
  misc_feature (38)..(145): Homolog of NCBI NO: 37531932 NR Description: putative proline-rich cell wall protein
  misc_feature (41)..(163): Homolog of NCBI NO: 15221052 NR Description: lipid transfer protein, putative
  misc_feature (26)..(158): Homolog of NCBI NO: 18410388 NR Description: lipid transfer protein, putative
  misc_feature (26)..(158): Homolog of NCBI NO: 21593596 NR Description: lipid transfer protein, putative [Arabidopsis
  misc_feature (26)..(128): Homolog of NCBI NO: 25406276 NR Description: probable lipid transfer protein F6D5.5
  misc_feature (49)..(128): Homolog of NCBI NO: 15223104 NR Description: lipid transfer protein, putative; protein id:
  misc_feature (27)..(138): Homolog of NCBI NO: 15221585 NR Description: unknown protein; protein id: At1g62790.1
NINTRQHYSLQQQGTTTTAMQQNAARLLAAAVACLALALAPSSDAQGTAVPSCAAKLVPCTGYLNSTSTAAPAAACCGPLREAAANETACLCAMLLNRAALRAFGVAPEQGLVLARRCNVTTDASACAAAGGSATGGSTAASSASTGSASSSSSFFFSGQTNSQRRRRGASPEHDWRVLIARLQFHLVVGGHGVGVSAVAPAIFLAGSRIPDLYVLLLSSRFHCFFLYIICPVVPLPLMP

SEQ ID NO: 18117 - protein, 221 aa, Zea mays subsp. mays
  peptide (1)..(221): Ceres Seq. ID no. 12454794
  misc_feature (34)..(108): Pfam Name: Protease inhibitor/seed storage/LTP family Pfam Description: Protease inhibitor/seed storage/LTP family
  misc_feature (30)..(109): Homolog of NCBI NO: 15223104 NR Description: lipid transfer protein, putative; protein id:
  misc_feature (11)..(151): Homolog of NCBI NO: 28269449 NR Description: putative protease inhibitor
  misc_feature (7)..(109): Homolog of NCBI NO: 25406276 NR Description: probable lipid transfer protein F6D5.5
  misc_feature (19)..(126): Homolog of NCBI NO: 37531932 NR Description: putative proline-rich cell wall protein
  misc_feature (7)..(139): Homolog of NCBI NO: 21593596 NR Description: lipid transfer protein, putative [Arabidopsis
  misc_feature (22)..(144): Homolog of NCBI NO: 15221052 NR Description: lipid transfer protein, putative
  misc_feature (7)..(139): Homolog of NCBI NO: 18410388 NR Description: lipid transfer protein, putative
  misc_feature (8)..(108): Homolog of NCBI NO: 6630451 NR Description: F23N19.16 [Arabidopsis thaliana]
  misc_feature (8)..(119): Homolog of NCBI NO: 30696757 NR Description: protease inhibitor/seed storage/lipid transfer
  misc_feature (8)..(119): Homolog of NCBI NO: 15221585 NR Description: unknown protein; protein id: At1g62790.1
MQQNAARLLAAAVACLALALAPSSDAQGTAVPSCAAKLVPCTGYLNSTSTAAPAAACCGPLREAAANETACLCAMLLNRAALRAFGVAPEQGLVLARRCNVTTDASACAAAGGSATGGSTAASSASTGSASSSSSFFFSGQTNSQRRRRGASPEHDWRVLIARLQFHLVVGGHGVGVSAVAPAIFLAGSRIPDLYVLLLSSRFHCFFLYIICPVVPLPLMP

SEQ ID NO: 18118 - protein, 193 aa, Zea mays subsp. mays
  peptide (1)..(193): Ceres Seq. ID no. 12454795
  misc_feature (12)..(166): Homolog of NCBI NO: 3044086 NR Description: unknown [Myxococcus xanthus]
TSTPDSTTVYSSRAPPPQQCSRTPPACWPPPWPAWRWRWRHPRTRRGRRCRRARRSLCRARGTSTPRPRRRPRRPAAGRSGRQRPTRRRASAPCCSTGPRCGRSAWRPSRAWSSPGGATSPPTPPPAPPPEAQPRAAVLLHLQLPPAALPPPPLSSSVAKPTANGGGVARRLSMTGASSLLGFSFIWWWAVMA

SEQ ID NO: 18119 - DNA, 468 bp, Zea mays subsp. mays
  misc_feature (1)..(468): Ceres Seq. ID no. 2790932
  misc_feature: MA Experiment ID: 20000534 Result: Up-regulated in Transcription
  misc_feature: MA Experiment 20000534 PARAMETER Experiment Name: Zm_Hybrid_Pollen_P Parameter: Age (day) Value: 8
  misc_feature: MA Experiment 20000534 PARAMETER Experiment Name: Zm_Hybrid_Pollen_P Parameter: Organism Value: Zea mays
  misc_feature: MA Experiment 20000534 PARAMETER Experiment Name: Zm_Hybrid_Pollen_P Parameter: Plant Line Value: 35A19
  misc_feature: MA Experiment 20000534 PARAMETER Experiment Name: Zm_Hybrid_Pollen_P Parameter: Tissue Value: Pollen vs. Aerial
gtagtacatcacgagtgctccaaacaaatagagttttccttcaccgagccagacccagaagaaggggagccggaggtagaaagaccagagaagatggcgaccaccgagccggcggcggtgaggctggtgggctccttcgccagcccgttcgtccaccgcgccgaggtggccctgcgcctcaaaggggtgccctacgagctcatcctggaggacctgggcaacaagagcgagctgctgctggcacacaaccccgtgcacaaactcgtgcccgtgctcctccacggcgacagggccatctccgagtcgctcgtcatcctcgagtacgtcgacgaggccttcgacgggccgcctctcctccccgcggaaccccacgcgagggcggacgcgcggttctgggcccacttcatcgaccaaaagttcgcgcggccgttctggatgtcgttctggacggacgacgaggagcgcagg

SEQ ID NO: 18120 - protein, 156 aa, Zea mays subsp. mays
  peptide (1)..(156): Ceres Seq. ID no. 2790933
  misc_feature (32)..(155): Homolog of NCBI NO: 19386822 NR Description: putative glutathione S-transferase GST 24
  misc_feature (32)..(153): Homolog of NCBI NO: 13699857 NR Description: glutathione S-transferase GST 24 [Zea mays]
  misc_feature (40)..(148): Homolog of NCBI NO: 19386817 NR Description: putative glutathione S-transferase GST 24
  misc_feature (40)..(155): Homolog of NCBI NO: 34896730 NR Description: putative glutathione transferase
  misc_feature (39)..(155): Homolog of NCBI NO: 11385509 NR Description: glutathione S-transferase GST 29 [Zea mays]
  misc_feature (35)..(155): Homolog of NCBI NO: 11385493 NR Description: glutathione S-transferase GST 21 [Zea mays]
  misc_feature (40)..(155): Homolog of NCBI NO: 19386820 NR Description: putative glutathione S-transferase GST 24
  misc_feature (32)..(155): Homolog of NCBI NO: 19386816 NR Description: putative glutathione S-transferase GST 24
  misc_feature (40)..(155): Homolog of NCBI NO: 4468798 NR Description: GST7 protein [Zea mays]
  misc_feature (39)..(155): Homolog of NCBI NO: 11385507 NR Description: glutathione S-transferase GST 28 [Zea mays]
VVHHECSKQIEFSFTEPDPEEGEPEVERPEKMATTEPAAVRLVGSFASPFVHRAEVALRLKGVPYELILEDLGNKSELLLAHNPVHKLVPVLLHGDRAISESLVILEYVDEAFDGPPLLPAEPHARADARFWAHFIDQKFARPFWMSFWTDDEERR

SEQ ID NO: 18121 - protein, 155 aa, Zea mays subsp. mays
  peptide (1)..(155): Ceres Seq. ID no. 2790934
STSRVLQTNRVFLHRARPRRRGAGGRKTREDGDHRAGGGEAGGLLRQPVRPPRRGGPAPQRGALRAHPGGPGQQERAAAGTQPRAQTRARAPPRRQGHLRVARHPRVRRRGLRRAASPPRGTPREGGRAVLGPLHRPKVRAAVLDVVLDGRRGAQ

SEQ ID NO: 18122 - protein, 125 aa, Zea mays subsp. mays
  peptide (1)..(125): Ceres Seq. ID no. 2790935
  misc_feature (1)..(124): Homolog of NCBI NO: 19386822 NR Description: putative glutathione S-transferase GST 24
  misc_feature (1)..(122): Homolog of NCBI NO: 13699857 NR Description: glutathione S-transferase GST 24 [Zea mays]
  misc_feature (9)..(117): Homolog of NCBI NO: 19386817 NR Description: putative glutathione S-transferase GST 24
  misc_feature (9)..(124): Homolog of NCBI NO: 34896730 NR Description: putative glutathione transferase
  misc_feature (8)..(124): Homolog of NCBI NO: 11385509 NR Description: glutathione S-transferase GST 29 [Zea mays]
  misc_feature (4)..(124): Homolog of NCBI NO: 11385493 NR Description: glutathione S-transferase GST 21 [Zea mays]
  misc_feature (9)..(124): Homolog of NCBI NO: 19386820 NR Description: putative glutathione S-transferase GST 24
  misc_feature (1)..(124): Homolog of NCBI NO: 19386816 NR Description: putative glutathione S-transferase GST 24
  misc_feature (9)..(124): Homolog of NCBI NO: 4468798 NR Description: GST7 protein [Zea mays]
  misc_feature (8)..(124): Homolog of NCBI NO: 11385507 NR Description: glutathione S-transferase GST 28 [Zea mays]
MATTEPAAVRLVGSFASPFVHRAEVALRLKGVPYELILEDLGNKSELLLAHNPVHKLVPVLLHGDRAISESLVILEYVDEAFDGPPLLPAEPHARADARFWAHFIDQKFARPFWMSFWTDDEERR

SEQ ID NO: 18123 - DNA, 693 bp, Zea mays subsp. mays
  misc_feature (1)..(693): Ceres Seq. ID no. 12359278
  misc_feature: MA Experiment ID: 108535 Result: Down-regulated in Transcription
  misc_feature: MA Experiment 108535 PARAMETER Experiment Name: Zm_Meristem_P Parameter: Age (day) Value: 8
  misc_feature: MA Experiment 108535 PARAMETER Experiment Name: Zm_Meristem_P Parameter: Organism Value: Zea mays
  misc_feature: MA Experiment 108535 PARAMETER Experiment Name: Zm_Meristem_P Parameter: Plant Line Value: 35A19
  misc_feature: MA Experiment 108535 PARAMETER Experiment Name: Zm_Meristem_P Parameter: Tissue Value: Root Meristem vs. Above Root Meristem
  misc_feature: MA Experiment ID: 108536 Result: Down-regulated in Transcription
  misc_feature: MA Experiment 108536 PARAMETER Experiment Name: Zm_Meristem_P Parameter: Age (day) Value: 8
  misc_feature: MA Experiment 108536 PARAMETER Experiment Name: Zm_Meristem_P Parameter: Organism Value: Zea mays
  misc_feature: MA Experiment 108536 PARAMETER Experiment Name: Zm_Meristem_P Parameter: Plant Line Value: 35A19
  misc_feature: MA Experiment 108536 PARAMETER Experiment Name: Zm_Meristem_P Parameter: Tissue Value: Shoot Meristem vs. Above Shoot Meristem
  misc_feature: MA Experiment ID: 108544 Result: Down-regulated in Transcription
  misc_feature: MA Experiment ID: 108597 Result: Down-regulated in Transcription
  misc_feature: MA Experiment 108597 PARAMETER Experiment Name: Zm_100uM_ABA_P Parameter: Age (day) Value: 9
  misc_feature: MA Experiment 108597 PARAMETER Experiment Name: Zm_100uM_ABA_P Parameter: Organism Value: Zea mays
  misc_feature: MA Experiment 108597 PARAMETER Experiment Name: Zm_100uM_ABA_P Parameter: Plant Line Value: 35A19
  misc_feature: MA Experiment 108597 PARAMETER Experiment Name: Zm_100uM_ABA_P Parameter: Timepoint (hr) Value: 24
  misc_feature: MA Experiment 108597 PARAMETER Experiment Name: Zm_100uM_ABA_P Parameter: Tissue Value: Aerial
  misc_feature: MA Experiment 108597 PARAMETER Experiment Name: Zm_100uM_ABA_P Parameter: Treatment Value: 100uM ABA vs. No Treatment
  misc_feature: MA Experiment ID: 20000477 Result: Down-regulated in Transcription
  misc_feature: MA Experiment 20000477 PARAMETER Experiment Name: Zm_5mM_SA_P Parameter: Age (day) Value: 10
  misc_feature: MA Experiment 20000477 PARAMETER Experiment Name: Zm_5mM_SA_P Parameter: Organism Value: Zea mays
  misc_feature: MA Experiment 20000477 PARAMETER Experiment Name: Zm_5mM_SA_P Parameter: Plant Line Value: 35A19
  misc_feature: MA Experiment 20000477 PARAMETER Experiment Name: Zm_5mM_SA_P Parameter: Timepoint (hr) Value: 48
  misc_feature: MA Experiment 20000477 PARAMETER Experiment Name: Zm_5mM_SA_P Parameter: Tissue Value: Aerial
  misc_feature: MA Experiment 20000477 PARAMETER Experiment Name: Zm_5mM_SA_P Parameter: Treatment Value: 5mM SA vs. No Treatment
  misc_feature: MA Experiment ID: 20000479 Result: Down-regulated in Transcription
  misc_feature: MA Experiment 20000479 PARAMETER Experiment Name: Zm_Drought_P Parameter: Age (day) Value: 10
  misc_feature: MA Experiment 20000479 PARAMETER Experiment Name: Zm_Drought_P Parameter: Organism Value: Zea mays
  misc_feature: MA Experiment 20000479 PARAMETER Experiment Name: Zm_Drought_P Parameter: Plant Line Value: 35A19
  misc_feature: MA Experiment 20000479 PARAMETER Experiment Name: Zm_Drought_P Parameter: Timepoint (hr) Value: 48
  misc_feature: MA Experiment 20000479 PARAMETER Experiment Name: Zm_Drought_P Parameter: Tissue Value: Aerial
  misc_feature: MA Experiment 20000479 PARAMETER Experiment Name: Zm_Drought_P Parameter: Treatment Value: Drought vs. No Drought
  misc_feature: MA Experiment ID: 20000480 Result: Down-regulated in Transcription
  misc_feature: MA Experiment 20000480 PARAMETER Experiment Name: Zm_Drought_P Parameter: Age (day) Value: 11
  misc_feature: MA Experiment 20000480 PARAMETER Experiment Name: Zm_Drought_P Parameter: Organism Value: Zea mays
  misc_feature: MA Experiment 20000480 PARAMETER Experiment Name: Zm_Drought_P Parameter: Plant Line Value: 35A19
  misc_feature: MA Experiment 20000480 PARAMETER Experiment Name: Zm_Drought_P Parameter: Timepoint (hr) Value: 72
  misc_feature: MA Experiment 20000480 PARAMETER Experiment Name: Zm_Drought_P Parameter: Tissue Value: Aerial
  misc_feature: MA Experiment 20000480 PARAMETER Experiment Name: Zm_Drought_P Parameter: Treatment Value: Drought vs. No Drought
agcaaacaagagctaagctactagagacatggccgacaaccttatcaagcccgtggctttgctgctgctgctcctgaacctgtgcatgtacgtcatcctggccatcatcggcggctgggctctgaacgtggccatcgaccgcggcttcatcatcggcccggagctgcggcttcccgcgcatttccaccctatcttcttccccatcggcaacttcgccaccggcttcttcgtcctcttctccctcatagcgggcgtcgtcgggatcgcctccgccatggtgggcttcaaccacctccgcttctggaactacgaaagccagcagcccgcggcggcgttggggattgtggcgtgggcgctcacagtcctagccatgggcctagcttgtcaggaaatctctttcgaccgaagaaacgccaagctgggcaccatggagaccttcaccatcatcctaacagtgacgcagttcttctacgtgctcgcgatacgcgggggaaggcacggacccgtccacgtggagcgccgcggcaactttgcatgaaagaccaccgacaaatattcattcatttgtgcacgtaccgtccatggagaccttcactattaattcgtttgctggattcgttaattatttcattattgtttgacagtttcatatggatggaatggaatggactccaagattattggtttgattcc

SEQ ID NO: 18124 - protein, 169 aa, Zea mays subsp. mays
  peptide (1)..(169): Ceres Seq. ID no. 12359279
  misc_feature (15)..(131): Pfam Name: AWPM-19-like family Pfam Description: AWPM-19-like family
  misc_feature (13)..(168): Homolog of NCBI NO: 6851373 NR Description: plasma membrane associated protein [Hordeum
  misc_feature (13)..(158): Homolog of NCBI NO: 4097340 NR Description: hydrophobic LEA-like protein [Oryza sativa]
  misc_feature (9)..(159): Homolog of NCBI NO: 7488688 NR Description: maturation protein PM3 - soybean
  misc_feature (1)..(159): Homolog of NCBI NO: 18390408 NR Description: expressed protein
  misc_feature (41)..(156): Homolog of NCBI NO: 15237455 NR Description: putative protein; protein id: At5g46530.1
  misc_feature (1)..(155): Homolog of NCBI NO: 15239619 NR Description: plasma membrane associated protein -like
  misc_feature (1)..(156): Homolog of NCBI NO: 15218953 NR Description: plasma membrane associated protein, putative
  misc_feature (1)..(156): Homolog of NCBI NO: 34911480 NR Description: putative plasma membrane associated protein
  misc_feature (132)..(164): Homolog of NCBI NO: 34904644 NR Description: putative ABA-induced plasma membrane protein
  misc_feature (1)..(131): Homolog of NCBI NO: 34904644 NR Description: putative ABA-induced plasma membrane protein
MADNLIKPVALLLLLLNLCMYVILAIIGGWALNVAIDRGFIIGPELRLPAHFHPIFFPIGNFATGFFVLFSLIAGVVGIASAMVGFNHLRFWNYESQQPAAALGIVAWALTVLAMGLACQEISFDRRNAKLGTMETFTIILTVTQFFYVLAIRGGRHGPVHVERRGNFA

SEQ ID NO: 18125 - protein, 150 aa, Zea mays subsp. mays
  peptide (1)..(150): Ceres Seq. ID no. 12359280
  misc_feature (1)..(112): Pfam Name: AWPM-19-like family Pfam Description: AWPM-19-like family
  misc_feature (1)..(149): Homolog of NCBI NO: 6851373 NR Description: plasma membrane associated protein [Hordeum
  misc_feature (1)..(139): Homolog of NCBI NO: 4097340 NR Description: hydrophobic LEA-like protein [Oryza sativa]
  misc_feature (1)..(140): Homolog of NCBI NO: 7488688 NR Description: maturation protein PM3 - soybean
  misc_feature (1)..(140): Homolog of NCBI NO: 18390408 NR Description: expressed protein
  misc_feature (22)..(137): Homolog of NCBI NO: 15237455 NR Description: putative protein; protein id: At5g46530.1
  misc_feature (1)..(136): Homolog of NCBI NO: 15239619 NR Description: plasma membrane associated protein -like
  misc_feature (1)..(137): Homolog of NCBI NO: 15218953 NR Description: plasma membrane associated protein, putative
  misc_feature (1)..(137): Homolog of NCBI NO: 34911480 NR Description: putative plasma membrane associated protein
  misc_feature (113)..(145): Homolog of NCBI NO: 34904644 NR Description: putative ABA-induced plasma membrane protein
  misc_feature (1)..(112): Homolog of NCBI NO: 34904644 NR Description: putative ABA-induced plasma membrane protein
MYVILAIIGGWALNVAIDRGFIIGPELRLPAHFHPIFFPIGNFATGFFVLFSLIAGVVGIASAMVGFNHLRFWNYESQQPAAALGIVAWALTVLAMGLACQEISFDRRNAKLGTMETFTIILTVTQFFYVLAIRGGRHGPVHVERRGNFA

SEQ ID NO: 18126 - protein, 87 aa, Zea mays subsp. mays
  peptide (1)..(87): Ceres Seq. ID no. 12359281
  misc_feature (1)..(86): Homolog of NCBI NO: 6851373 NR Description: plasma membrane associated protein [Hordeum
  misc_feature (1)..(76): Homolog of NCBI NO: 4097340 NR Description: hydrophobic LEA-like protein [Oryza sativa]
  misc_feature (1)..(77): Homolog of NCBI NO: 7488688 NR Description: maturation protein PM3 - soybean
  misc_feature (1)..(77): Homolog of NCBI NO: 18390408 NR Description: expressed protein
  misc_feature (1)..(74): Homolog of NCBI NO: 15237455 NR Description: putative protein; protein id: At5g46530.1
  misc_feature (1)..(73): Homolog of NCBI NO: 15239619 NR Description: plasma membrane associated protein -like
  misc_feature (1)..(74): Homolog of NCBI NO: 15218953 NR Description: plasma membrane associated protein, putative
  misc_feature (1)..(74): Homolog of NCBI NO: 34911480 NR Description: putative plasma membrane associated protein
  misc_feature (50)..(82): Homolog of NCBI NO: 34904644 NR Description: putative ABA-induced plasma membrane protein
  misc_feature (1)..(49): Homolog of NCBI NO: 34904644 NR Description: putative ABA-induced plasma membrane protein
MVGFNHLRFWNYESQQPAAALGIVAWALTVLAMGLACQEISFDRRNAKLGTMETFTIILTVTQFFYVLAIRGGRHGPVHVERRGNFA

SEQ ID NO: 18127 - DNA, 1071 bp, Zea mays subsp. mays
  misc_feature (1)..(1071): Ceres Seq. ID no. 13503114
  misc_feature: MA Experiment ID: 108528 Result: Down-regulated in Transcription
  misc_feature: MA Experiment 108528 PARAMETER Experiment Name: Zm_Imbibed_Seeds_P Parameter: Age (day) Value: 5 vs. 2
  misc_feature: MA Experiment 108528 PARAMETER Experiment Name: Zm_Imbibed_Seeds_P Parameter: Organism Value: Zea mays
  misc_feature: MA Experiment 108528 PARAMETER Experiment Name: Zm_Imbibed_Seeds_P Parameter: Plant Line Value: 35A19
  misc_feature: MA Experiment 108528 PARAMETER Experiment Name: Zm_Imbibed_Seeds_P Parameter: Tissue Value: Aerial vs. Embryo
  misc_feature: MA Experiment ID: 108530 Result: Down-regulated in Transcription
  misc_feature: MA Experiment 108530 PARAMETER Experiment Name: Zm_Imbibed_Seeds_P Parameter: Age (day) Value: 6 vs. 2
  misc_feature: MA Experiment 108530 PARAMETER Experiment Name: Zm_Imbibed_Seeds_P Parameter: Organism Value: Zea mays
  misc_feature: MA Experiment 108530 PARAMETER Experiment Name: Zm_Imbibed_Seeds_P Parameter: Plant Line Value: 35A19
  misc_feature: MA Experiment 108530 PARAMETER Experiment Name: Zm_Imbibed_Seeds_P Parameter: Tissue Value: Aerial vs. Embryo
  misc_feature: MA Experiment ID: 108535 Result: Down-regulated in Transcription
  misc_feature: MA Experiment 108535 PARAMETER Experiment Name: Zm_Meristem_P Parameter: Age (day) Value: 8
  misc_feature: MA Experiment 108535 PARAMETER Experiment Name: Zm_Meristem_P Parameter: Organism Value: Zea mays
  misc_feature: MA Experiment 108535 PARAMETER Experiment Name: Zm_Meristem_P Parameter: Plant Line Value: 35A19
  misc_feature: MA Experiment 108535 PARAMETER Experiment Name: Zm_Meristem_P Parameter: Tissue Value: Root Meristem vs. Above Root Meristem
  misc_feature: MA Experiment ID: 108543 Result: Up-regulated in Transcription
  misc_feature: MA Experiment ID: 108545 Result: Down-regulated in Transcription
  misc_feature: MA Experiment 108545 PARAMETER Experiment Name: Zm_Imbibed_Seeds_P Parameter: Age (day) Value: 3 vs. 2
  misc_feature: MA Experiment 108545 PARAMETER Experiment Name: Zm_Imbibed_Seeds_P Parameter: Organism Value: Zea mays
  misc_feature: MA Experiment 108545 PARAMETER Experiment Name: Zm_Imbibed_Seeds_P Parameter: Plant Line Value: 35A19
  misc_feature: MA Experiment 108545 PARAMETER Experiment Name: Zm_Imbibed_Seeds_P Parameter: Tissue Value: Aerial vs. Embryo
  misc_feature: MA Experiment ID: 108547 Result: Down-regulated in Transcription
  misc_feature: MA Experiment 108547 PARAMETER Experiment Name: Zm_Imbibed_Seeds_P Parameter: Age (day) Value: 4 vs. 2
  misc_feature: MA Experiment 108547 PARAMETER Experiment Name: Zm_Imbibed_Seeds_P Parameter: Organism Value: Zea mays
  misc_feature: MA Experiment 108547 PARAMETER Experiment Name: Zm_Imbibed_Seeds_P Parameter: Plant Line Value: 35A19
  misc_feature: MA Experiment 108547 PARAMETER Experiment Name: Zm_Imbibed_Seeds_P Parameter: Tissue Value: Aerial vs. Embryo
  misc_feature: MA Experiment ID: 20000630 Result: Up-regulated in Transcription
  misc_feature: MA Experiment 20000630 PARAMETER Experiment Name: Zm_Herbicide-Treatments_P Parameter: Timepoint (hr) Value: 4
  misc_feature: MA Experiment 20000630 PARAMETER Experiment Name: Zm_Herbicide-Treatments_P Parameter: Tissue Value: Aerial
  misc_feature: MA Experiment 20000630 PARAMETER Experiment Name: Zm_Herbicide-Treatments_P Parameter: Treatment Value: Roundup vs. No Treatment
atcagcggcctgataagctatagccatcttcttctcttctctgaattccagtccaagggccggaataccgtcagagcagagggagtgggaggaagaaaaaaaaaagatggtgaagctcgcatttggaagctttcgcgactctttgagcgccgcgtcgctcaaggcctatgtggccgagttcatcgccacgctgctcttcgtgttcgccggcgtcgggtccgccattgcctactcgcaattgacgaagggcggcgctctggaccccgccggcctggtggccatcgccatcgcccatgcgttcgcgctcttcgtcggcgtctccatggccgccaacatctccggcggccacctgaaccccgccgtcaccttcggcctcgccgtcggcggccacatcaccatcctcaccggcatcctctactgggttgcccagcttctcggcgcttccgtggcgtgctttctcctgcagtacgtcacacacggacaggctatcccgacgcacggcgtctccgggatcagcgagatcgagggcgtggtgatggagatcgtgatcaccttcgcgctggtgtacaccgtgtacgccaccgcggccgacccgaagaaggggtccctgggcaccatcgcgcccatggccatcggcttcatcgtcggcgccaacatcctggccgccggccccttcagcggcggctccatgaacccggcccgctccttcggccccgccgtggcggccggtaacttcgccggcaactgggtgtactgggtcggccccctcgtcggcggtggcctggcggggcccgtctacggcgacgtgttcatcgcctcctaccagccggtcggccagcaggagtacccatgaaagtccggagctagcccgatcgatccgtctgtgttgatttcaccatcgtcgtcgtcgtgtcacctggcgcttcgtgctgtaatcatgtttggtcctgtttgcatttcccaacgtctggttttcatttccattcaccaacggtgccaagatgccgtactgtaagcgagagaagtgttcggtctgtatctgtataaatgcaatgcacagttcggcgtttc

SEQ ID NO: 18128 - protein, 248 aa, Zea mays subsp. mays
  peptide (1)..(248): Ceres Seq. ID no. 13503115
  misc_feature (11)..(231): Pfam Name: Major intrinsic protein Pfam Description: Major intrinsic protein
  misc_feature (1)..(244): Homolog of NCBI NO: 7441268 NR Description: probable membrane protein - carrot
  misc_feature (1)..(246): Homolog of NCBI NO: 11276918 NR Description: membrane channel protein [imported] - potato
  misc_feature (1)..(246): Homolog of NCBI NO: 2058706 NR Description: Rb7 [Lycopersicon esculentum]
  misc_feature (1)..(247): Homolog of NCBI NO: 13447823 NR Description: tonoplast membrane integral protein ZmTIP2-2 [Zea
  misc_feature (1)..(242): Homolog of NCBI NO: 38605857 NR Description: OSJNBb0034G17.15 [Oryza sativa (japonica
  misc_feature (1)..(247): Homolog of NCBI NO: 13447821 NR Description: tonoplast membrane integral protein ZmTIP2-1 [Zea
  misc_feature (1)..(247): Homolog of NCBI NO: 14140156 NR Description: putative aquaporin [Oryza sativa]
  misc_feature (1)..(248): Homolog of NCBI NO: 9623335 NR Description: tonoplast intrinsic protein 1 [Hordeum vulgare]
  misc_feature (1)..(248): Homolog of NCBI NO: 7441255 NR Description: probable tonoplast aquaporin - maize
  misc_feature (1)..(248): Homolog of NCBI NO: 29650739 NR Description: tonoplast water channel [Zea mays]
MVKLAFGSFRDSLSAASLKAYVAEFIATLLFVFAGVGSAIAYSQLTKGGALDPAGLVAIAIAHAFALFVGVSMAANISGGHLNPAVTFGLAVGGHITILTGILYWVAQLLGASVACFLLQYVTHGQAIPTHGVSGISEIEGVVMEIVITFALVYTVYATAADPKKGSLGTIAPMAIGFIVGANILAAGPFSGGSMNPARSFGPAVAAGNFAGNWVYWVGPLVGGGLAGPVYGDVFIASYQPVGQQEYP

SEQ ID NO: 18129 - protein, 243 aa, Zea mays subsp. mays
  peptide (1)..(243): Ceres Seq. ID no. 13503116
ISGLISYSHLLLFSEFQSKGRNTVRAEGVGGRKKKDGEARIWKLSRLFERRVAQGLCGRVHRHAALRVRRRRVRHCLLAIDEGRRSGPRRPGGHRHRPCVRALRRRLHGRQHLRRPPEPRRHLRPRRRRPHHHPHRHPLLGCPASRRFRGVLSPAVRHTRTGYPDARRLRDQRDRGRGDGDRDHLRAGVHRVRHRGRPEEGVPGHHRAHGHRLHRRRQHPGRRPLQRRLHEPGPLLRPRRGGR

SEQ ID NO: 18130 - protein, 176 aa, Zea mays subsp. mays
  peptide (1)..(176): Ceres Seq. ID no. 13503117
  misc_feature (1)..(159): Pfam Name: Major intrinsic protein Pfam Description: Major intrinsic protein
  misc_feature (1)..(172): Homolog of NCBI NO: 7441268 NR Description: probable membrane protein - carrot
  misc_feature (1)..(174): Homolog of NCBI NO: 11276918 NR Description: membrane channel protein [imported] - potato
  misc_feature (1)..(174): Homolog of NCBI NO: 2058706 NR Description: Rb7 [Lycopersicon esculentum]
  misc_feature (1)..(175): Homolog of NCBI NO: 13447823 NR Description: tonoplast membrane integral protein ZmTIP2-2 [Zea
  misc_feature (1)..(170): Homolog of NCBI NO: 38605857 NR Description: OSJNBb0034G17.15 [Oryza sativa (japonica
  misc_feature (1)..(175): Homolog of NCBI NO: 13447821 NR Description: tonoplast membrane integral protein ZmTIP2-1 [Zea
  misc_feature (1)..(175): Homolog of NCBI NO: 14140156 NR Description: putative aquaporin [Oryza sativa]
  misc_feature (1)..(176): Homolog of NCBI NO: 9623335 NR Description: tonoplast intrinsic protein 1 [Hordeum vulgare]
  misc_feature (1)..(176): Homolog of NCBI NO: 7441255 NR Description: probable tonoplast aquaporin - maize
  misc_feature (1)..(176): Homolog of NCBI NO: 29650739 NR Description: tonoplast water channel [Zea mays]
MAANISGGHLNPAVTFGLAVGGHITILTGILYWVAQLLGASVACFLLQYVTHGQAIPTHGVSGISEIEGVVMEIVITFALVYTVYATAADPKKGSLGTIAPMAIGFIVGANILAAGPFSGGSMNPARSFGPAVAAGNFAGNWVYWVGPLVGGGLAGPVYGDVFIASYQPVGQQEYP

SEQ ID NO: 18131 - DNA, 938 bp, Zea mays subsp. mays
  misc_feature (1)..(938): Ceres Seq. ID no. 12359282
  misc_feature: MA Experiment ID: 108529 Result: Up-regulated in Transcription
  misc_feature: MA Experiment 108529 PARAMETER Experiment Name: Zm_Imbibed_Seeds_P Parameter: Age (day) Value: 5 vs. 2
  misc_feature: MA Experiment 108529 PARAMETER Experiment Name: Zm_Imbibed_Seeds_P Parameter: Organism Value: Zea mays
  misc_feature: MA Experiment 108529 PARAMETER Experiment Name: Zm_Imbibed_Seeds_P Parameter: Plant Line Value: 35A19
  misc_feature: MA Experiment 108529 PARAMETER Experiment Name: Zm_Imbibed_Seeds_P Parameter: Tissue Value: Roots vs. Embryo
  misc_feature: MA Experiment ID: 108544 Result: Up-regulated in Transcription
  misc_feature: MA Experiment ID: 108546 Result: Up-regulated in Transcription
  misc_feature: MA Experiment 108546 PARAMETER Experiment Name: Zm_Imbibed_Seeds_P Parameter: Age (day) Value: 3 vs. 2
  misc_feature: MA Experiment 108546 PARAMETER Experiment Name: Zm_Imbibed_Seeds_P Parameter: Organism Value: Zea mays
  misc_feature: MA Experiment 108546 PARAMETER Experiment Name: Zm_Imbibed_Seeds_P Parameter: Plant Line Value: 35A19
  misc_feature: MA Experiment 108546 PARAMETER Experiment Name: Zm_Imbibed_Seeds_P Parameter: Tissue Value: Roots vs. Embryo
  misc_feature: MA Experiment ID: 108547 Result: Down-regulated in Transcription
  misc_feature: MA Experiment 108547 PARAMETER Experiment Name: Zm_Imbibed_Seeds_P Parameter: Age (day) Value: 4 vs. 2
  misc_feature: MA Experiment 108547 PARAMETER Experiment Name: Zm_Imbibed_Seeds_P Parameter: Organism Value: Zea mays
  misc_feature: MA Experiment 108547 PARAMETER Experiment Name: Zm_Imbibed_Seeds_P Parameter: Plant Line Value: 35A19
  misc_feature: MA Experiment 108547 PARAMETER Experiment Name: Zm_Imbibed_Seeds_P Parameter: Tissue Value: Aerial vs. Embryo
  misc_feature: MA Experiment ID: 108689 Result: Up-regulated in Transcription
  misc_feature: MA Experiment 108689 PARAMETER Experiment Name: Zm_Drought_Roots_P Parameter: Age (day) Value: 9
  misc_feature: MA Experiment 108689 PARAMETER Experiment Name: Zm_Drought_Roots_P Parameter: Organism Value: Zea mays
  misc_feature: MA Experiment 108689 PARAMETER Experiment Name: Zm_Drought_Roots_P Parameter: Plant Line Value: 35A19
  misc_feature: MA Experiment 108689 PARAMETER Experiment Name: Zm_Drought_Roots_P Parameter: Timepoint (hr) Value: 24
  misc_feature: MA Experiment 108689 PARAMETER Experiment Name: Zm_Drought_Roots_P Parameter: Tissue Value: Roots
  misc_feature: MA Experiment 108689 PARAMETER Experiment Name: Zm_Drought_Roots_P Parameter: Treatment Value: Drought vs. No Drought
  misc_feature: MA Experiment ID: 20000480 Result: Up-regulated in Transcription
  misc_feature: MA Experiment 20000480 PARAMETER Experiment Name: Zm_Drought_P Parameter: Age (day) Value: 11
  misc_feature: MA Experiment 20000480 PARAMETER Experiment Name: Zm_Drought_P Parameter: Organism Value: Zea mays
  misc_feature: MA Experiment 20000480 PARAMETER Experiment Name: Zm_Drought_P Parameter: Plant Line Value: 35A19
  misc_feature: MA Experiment 20000480 PARAMETER Experiment Name: Zm_Drought_P Parameter: Timepoint (hr) Value: 72
  misc_feature: MA Experiment 20000480 PARAMETER Experiment Name: Zm_Drought_P Parameter: Tissue Value: Aerial
  misc_feature: MA Experiment 20000480 PARAMETER Experiment Name: Zm_Drought_P Parameter: Treatment Value: Drought vs. No Drought
  misc_feature: MA Experiment ID: 20000535 Result: Down-regulated in Transcription
  misc_feature: MA Experiment 20000535 PARAMETER Experiment Name: Zm_Hybrid_Seed_Dev_P Parameter: DAP Value: 30 vs. 12
  misc_feature: MA Experiment 20000535 PARAMETER Experiment Name: Zm_Hybrid_Seed_Dev_P Parameter: Organism Value: Zea mays
  misc_feature: MA Experiment 20000535 PARAMETER Experiment Name: Zm_Hybrid_Seed_Dev_P Parameter: Plant Line Value: 35A19
  misc_feature: MA Experiment 20000535 PARAMETER Experiment Name: Zm_Hybrid_Seed_Dev_P Parameter: Tissue Value: Embryo vs. Unfert Floret
acacttcactcacccatccaccgcaaacgccaaacggccggcacacaactacacaagccgctggcaaagatggcctcctccttggtcctcatcgcagcggccctgcttgcgctggcctcgtcgtggcagcaggccatcgcctacgatcctagccccctccaggacttctgtgtcgcagacaagaactcgcctgttcgcgtcaacgggttcccttgcaaggacccgatggcggtcaccccggacgacttcttcaacgcggcgatgatcatcgacaagcggagggacacgaacaacaaggtggggtccaacgtcaccaacgtgaacgtggagagcttcccggggctgaacacgctgggcatctcgctggcgcgcatcgactacgcgccgctcggggtgaacccgccgcacatccacccacgcgctaccgagctgctcaccgtgctcgagggcaccctctacctcggcttcgtcacgtccaaccccaaccgcctcttctccaaggtggtcaagaagggcgacgtcttcgtcttccccaaggccatgatccacttccagatgaacctggaccacgacaagcccgccgcggcgctctcgtcgctcagcagccagaaccctggcgtcatcaccatcgccagcgccgtcttcggctccaagccgcccatctcggacgacgtcttggccaaggcgttccaggtggagaagaaactcatcgactggctccagtctcagttctgggataccaactactagctgcctagctagctagtaatatacttgcttgcttatttgttgcatatacatgcaccaccaacacaagccttatattaattacgtacgtacatctatgtataatatcgaataaatggccggtatgcatttggaggagtgaaacttattactgtgcgtgattaataatatttaatgtaaacttttcattg

SEQ ID NO: 18132 - protein, 249 aa, Zea mays subsp. mays
  peptide (1)..(249): Ceres Seq. ID no. 12359283
  misc_feature (89)..(238): Pfam Name: Cupin Pfam Description: Cupin
  misc_feature (27)..(249): Homolog of NCBI NO: 6996619 NR Description: oxalate oxidase [Triticum aestivum]
  misc_feature (24)..(249): Homolog of NCBI NO: 40253800 NR Description: putative germin A [Oryza sativa (japonica
  misc_feature (24)..(244): Homolog of NCBI NO: 40253832 NR Description: putative germin A [Oryza sativa (japonica
  misc_feature (66)..(249): Homolog of NCBI NO: 9837119 NR Description: germin E [Hordeum vulgare]
  misc_feature (25)..(248): Homolog of NCBI NO: 9837117 NR Description: germin D [Hordeum vulgare]
  misc_feature (24)..(248): Homolog of NCBI NO: 9837113 NR Description: germin B [Hordeum vulgare]
  misc_feature (24)..(248): Homolog of NCBI NO: 9837115 NR Description: germin F [Hordeum vulgare]
  misc_feature (24)..(249): Homolog of NCBI NO: 7447338 NR Description: probable germin protein type 2 - rice
  misc_feature (25)..(249): Homolog of NCBI NO: 7447333 NR Description: germin protein type 1 - rice
  misc_feature (24)..(249): Homolog of NCBI NO: 38175449 NR Description: putative germin protein type 1
TLHSPIHRKRQTAGTQLHKPLAKMASSLVLIAAALLALASSWQQAIAYDPSPLQDFCVADKNSPVRVNGFPCKDPMAVTPDDFFNAAMIIDKRRDTNNKVGSNVTNVNVESFPGLNTLGISLARIDYAPLGVNPPHIHPRATELLTVLEGTLYLGFVTSNPNRLFSKVVKKGDVFVFPKAMIHFQMNLDHDKPAAALSSLSSQNPGVITIASAVFGSKPPISDDVLAKAFQVEKKLIDWLQSQFWDTNY

SEQ ID NO: 18133 - protein, 226 aa, Zea mays subsp. mays
  peptide (1)..(226): Ceres Seq. ID no. 12359284
  misc_feature (66)..(215): Pfam Name: Cupin Pfam Description: Cupin
  misc_feature (1)..(226): Homolog of NCBI NO: 40253800 NR Description: putative germin A [Oryza sativa (japonica
  misc_feature (1)..(221): Homolog of NCBI NO: 40253832 NR Description: putative germin A [Oryza sativa (japonica
  misc_feature (43)..(226): Homolog of NCBI NO: 9837119 NR Description: germin E [Hordeum vulgare]
  misc_feature (2)..(225): Homolog of NCBI NO: 9837117 NR Description: germin D [Hordeum vulgare]
  misc_feature (1)..(225): Homolog of NCBI NO: 9837113 NR Description: germin B [Hordeum vulgare]
  misc_feature (1)..(225): Homolog of NCBI NO: 9837115 NR Description: germin F [Hordeum vulgare]
  misc_feature (1)..(226): Homolog of NCBI NO: 7447338 NR Description: probable germin protein type 2 - rice
  misc_feature (2)..(226): Homolog of NCBI NO: 7447333 NR Description: germin protein type 1 - rice
  misc_feature (1)..(226): Homolog of NCBI NO: 38175449 NR Description: putative germin protein type 1
  misc_feature (4)..(226): Homolog of NCBI NO: 6996619 NR Description: oxalate oxidase [Triticum aestivum]
MASSLVLIAAALLALASSWQQAIAYDPSPLQDFCVADKNSPVRVNGFPCKDPMAVTPDDFFNAAMIIDKRRDTNNKVGSNVTNVNVESFPGLNTLGISLARIDYAPLGVNPPHIHPRATELLTVLEGTLYLGFVTSNPNRLFSKVVKKGDVFVFPKAMIHFQMNLDHDKPAAALSSLSSQNPGVITIASAVFGSKPPISDDVLAKAFQVEKKLIDWLQSQFWDTNY

SEQ ID NO: 18134 - protein, 174 aa, Zea mays subsp. mays
  peptide (1)..(174): Ceres Seq. ID no. 12359285
  misc_feature (14)..(163): Pfam Name: Cupin Pfam Description: Cupin
  misc_feature (1)..(174): Homolog of NCBI NO: 40253800 NR Description: putative germin A [Oryza sativa (japonica
  misc_feature (1)..(169): Homolog of NCBI NO: 40253832 NR Description: putative germin A [Oryza sativa (japonica
  misc_feature (1)..(174): Homolog of NCBI NO: 9837119 NR Description: germin E [Hordeum vulgare]
  misc_feature (1)..(173): Homolog of NCBI NO: 9837117 NR Description: germin D [Hordeum vulgare]
  misc_feature (1)..(173): Homolog of NCBI NO: 9837113 NR Description: germin B [Hordeum vulgare]
  misc_feature (1)..(173): Homolog of NCBI NO: 9837115 NR Description: germin F [Hordeum vulgare]
  misc_feature (1)..(174): Homolog of NCBI NO: 7447338 NR Description: probable germin protein type 2 - rice
  misc_feature (1)..(174): Homolog of NCBI NO: 7447333 NR Description: germin protein type 1 - rice
  misc_feature (1)..(174): Homolog of NCBI NO: 38175449 NR Description: putative germin protein type 1
  misc_feature (1)..(174): Homolog of NCBI NO: 6996619 NR Description: oxalate oxidase [Triticum aestivum]
MAVTPDDFFNAAMIIDKRRDTNNKVGSNVTNVNVESFPGLNTLGISLARIDYAPLGVNPPHIHPRATELLTVLEGTLYLGFVTSNPNRLFSKVVKKGDVFVFPKAMIHFQMNLDHDKPAAALSSLSSQNPGVITIASAVFGSKPPISDDVLAKAFQVEKKLIDWLQSQFWDTNY

SEQ ID NO: 18135 - DNA, 679 bp, Zea mays subsp. mays
  misc_feature (1)..(679): Ceres Seq. ID no. 12377122
  misc_feature: MA Experiment ID: 108528 Result: Up-regulated in Transcription
  misc_feature: MA Experiment 108528 PARAMETER Experiment Name: Zm_Imbibed_Seeds_P Parameter: Age (day) Value: 5 vs. 2
  misc_feature: MA Experiment 108528 PARAMETER Experiment Name: Zm_Imbibed_Seeds_P Parameter: Organism Value: Zea mays
  misc_feature: MA Experiment 108528 PARAMETER Experiment Name: Zm_Imbibed_Seeds_P Parameter: Plant Line Value: 35A19
  misc_feature: MA Experiment 108528 PARAMETER Experiment Name: Zm_Imbibed_Seeds_P Parameter: Tissue Value: Aerial vs. Embryo
  misc_feature: MA Experiment ID: 108530 Result: Up-regulated in Transcription
  misc_feature: MA Experiment 108530 PARAMETER Experiment Name: Zm_Imbibed_Seeds_P Parameter: Age (day) Value: 6 vs. 2
  misc_feature: MA Experiment 108530 PARAMETER Experiment Name: Zm_Imbibed_Seeds_P Parameter: Organism Value: Zea mays
  misc_feature: MA Experiment 108530 PARAMETER Experiment Name: Zm_Imbibed_Seeds_P Parameter: Plant Line Value: 35A19
  misc_feature: MA Experiment 108530 PARAMETER Experiment Name: Zm_Imbibed_Seeds_P Parameter: Tissue Value: Aerial vs. Embryo
  misc_feature: MA Experiment ID: 108545 Result: Up-regulated in Transcription
  misc_feature: MA Experiment 108545 PARAMETER Experiment Name: Zm_Imbibed_Seeds_P Parameter: Age (day) Value: 3 vs. 2
  misc_feature: MA Experiment 108545 PARAMETER Experiment Name: Zm_Imbibed_Seeds_P Parameter: Organism Value: Zea mays
  misc_feature: MA Experiment 108545 PARAMETER Experiment Name: Zm_Imbibed_Seeds_P Parameter: Plant Line Value: 35A19
  misc_feature: MA Experiment 108545 PARAMETER Experiment Name: Zm_Imbibed_Seeds_P Parameter: Tissue Value: Aerial vs. Embryo
  misc_feature: MA Experiment ID: 108547 Result: Up-regulated in Transcription
  misc_feature: MA Experiment 108547 PARAMETER Experiment Name: Zm_Imbibed_Seeds_P Parameter: Age (day) Value: 4 vs. 2
  misc_feature: MA Experiment 108547 PARAMETER Experiment Name: Zm_Imbibed_Seeds_P Parameter: Organism Value: Zea mays
  misc_feature: MA Experiment 108547 PARAMETER Experiment Name: Zm_Imbibed_Seeds_P Parameter: Plant Line Value: 35A19
  misc_feature: MA Experiment 108547 PARAMETER Experiment Name: Zm_Imbibed_Seeds_P Parameter: Tissue Value: Aerial vs. Embryo
aagggcgagcaaaactggaagcctacgaaaatggtggagctcacctccttatccccagggccaccacgtccttctcggctgactcctcgccgccggccgccgccgccgacacctcatgttcatacctcctcgcgtcgtcgcgggaggatcctcggcgccgcgaccgccacgcctggcgccgacgactaccactccaccatccgctccctcaactcccgcggccgccacgtcccccgaaaatccctcgggcaggtcatcccgctgaccccagaatccgcgccacccacaggcgggctcaccattcaccacgtaccgacgcgtctctcgtctccccgcagaactacacgctcaactccaaggtgaacgaggagctggtggcggcggcgggggtggaggagggtgacgtcgtgctcgagatcggcccaggcaccggctcgctcacttccgcgctgctccaggccggcgctaccgtctttgccgtcgagaaggtctgtaacgttgctttgctcggtgttccgtagctggactgctgaaagtgagagcgagccgctagggggaaaaattcgaaagatcttcctgagacgaaattgaaattgtgtgtaaaatggttactatcatctgtgtcactgtgtgtgattgtctcaaatctcaattgttgatgcctcaaaatgtagctctc

SEQ ID NO: 18136 - protein, 172 aa, Zea mays subsp. mays
  peptide (1)..(172): Ceres Seq. ID no. 12377123
  misc_feature (112)..(162): Homolog of NCBI NO: 15220982 NR Description: dimethyladenosine transferase, putative; protein
  misc_feature (112)..(162): Homolog of NCBI NO: 25518538 NR Description: hypothetical protein F22M8.1 - Arabidopsis
GRAKLEAYENGGAHLLIPRATTSFSADSSPPAAAADTSCSYLLASSREDPRRRDRHAWRRRLPLHHPLPQLPRPPRPPKIPRAGHPADPRIRATHRRAHHSPRTDASLVSPQNYTLNSKVNEELVAAAGVEEGDVVLEIGPGTGSLTSALLQAGATVFAVEKVCNVALLGVP

SEQ ID NO: 18137 - protein, 120 aa, Zea mays subsp. mays
  peptide (1)..(120): Ceres Seq. ID no. 12377124
  misc_feature (44)..(84): Homolog of NCBI NO: 15220982 NR Description: dimethyladenosine transferase, putative; protein
  misc_feature (44)..(84): Homolog of NCBI NO: 25518538 NR Description: hypothetical protein F22M8.1 - Arabidopsis
KGEQNWKPTKMVELTSLSPGPPRPSRLTPRRRPPPPTPHVHTSSRRRGRILGAATATPGADDYHSTIRSLNSRGRHVPRKSLGQVIPLTPESAPPTGGLTIHHVPTRLSSPRRTTRSTPR

SEQ ID NO: 18138 - protein, 110 aa, Zea mays subsp. mays
  peptide (1)..(110): Ceres Seq. ID no. 12377125
  misc_feature (34)..(74): Homolog of NCBI NO: 15220982 NR Description: dimethyladenosine transferase, putative; protein
  misc_feature (34)..(74): Homolog of NCBI NO: 25518538 NR Description: hypothetical protein F22M8.1 - Arabidopsis
MVELTSLSPGPPRPSRLTPRRRPPPPTPHVHTSSRRRGRILGAATATPGADDYHSTIRSLNSRGRHVPRKSLGQVIPLTPESAPPTGGLTIHHVPTRLSSPRRTTRSTPR

SEQ ID NO: 18139 - DNA, 879 bp, Zea mays subsp. mays
  misc_feature (1)..(879): Ceres Seq. ID no. 12364309
  misc_feature: MA Experiment ID: 108556 Result: Up-regulated in Transcription
  misc_feature: MA Experiment 108556 PARAMETER Experiment Name: Zm_Drought_P Parameter: Age (day) Value: 9
  misc_feature: MA Experiment 108556 PARAMETER Experiment Name: Zm_Drought_P Parameter: Organism Value: Zea mays
  misc_feature: MA Experiment 108556 PARAMETER Experiment Name: Zm_Drought_P Parameter: Plant Line Value: 35A19
  misc_feature: MA Experiment 108556 PARAMETER Experiment Name: Zm_Drought_P Parameter: Timepoint (hr) Value: 24
  misc_feature: MA Experiment 108556 PARAMETER Experiment Name: Zm_Drought_P Parameter: Tissue Value: Aerial
  misc_feature: MA Experiment 108556 PARAMETER Experiment Name: Zm_Drought_P Parameter: Treatment Value: Drought vs. No Drought
  misc_feature: MA Experiment ID: 20000480 Result: Up-regulated in Transcription
  misc_feature: MA Experiment 20000480 PARAMETER Experiment Name: Zm_Drought_P Parameter: Age (day) Value: 11
  misc_feature: MA Experiment 20000480 PARAMETER Experiment Name: Zm_Drought_P Parameter: Organism Value: Zea mays
  misc_feature: MA Experiment 20000480 PARAMETER Experiment Name: Zm_Drought_P Parameter: Plant Line Value: 35A19
  misc_feature: MA Experiment 20000480 PARAMETER Experiment Name: Zm_Drought_P Parameter: Timepoint (hr) Value: 72
  misc_feature: MA Experiment 20000480 PARAMETER Experiment Name: Zm_Drought_P Parameter: Tissue Value: Aerial
  misc_feature: MA Experiment 20000480 PARAMETER Experiment Name: Zm_Drought_P Parameter: Treatment Value: Drought vs. No Drought
  misc_feature: MA Experiment ID: 20000535 Result: Up-regulated in Transcription
  misc_feature: MA Experiment 20000535 PARAMETER Experiment Name: Zm_Hybrid_Seed_Dev_P Parameter: DAP Value: 30 vs. 12
  misc_feature: MA Experiment 20000535 PARAMETER Experiment Name: Zm_Hybrid_Seed_Dev_P Parameter: Organism Value: Zea mays
  misc_feature: MA Experiment 20000535 PARAMETER Experiment Name: Zm_Hybrid_Seed_Dev_P Parameter: Plant Line Value: 35A19
  misc_feature: MA Experiment 20000535 PARAMETER Experiment Name: Zm_Hybrid_Seed_Dev_P Parameter: Tissue Value: Embryo vs. Unfert Floret
gcacgagaccattacctagaacatcctaatcaaaaacacacctccgaagtcggaacctccctgccccaacacaatggcctcctccctcgccgcgcgccgcctcctctcccgcgcagccgccgtgcatggggtggagcgagtcggccatggtcgcgggggcgagggacgttggcgtgtcccctgccatcgtgggcgcatttccaaggaaggaggccgcccttgtggagtttttcatggatgactgcctccaacaactgatggatcgaattgatgctggagaaggagagcagttgaagaacttgatactgagtgagagactctcaaaacttgttcggatgaggctggaaatgcaggcaccttatatatctaagtggcctcaagcactgagtattcagtctcaaccagcaaacgtctcaacaagcttgaagcagcgagctatcctggtggatgagatatggcatgctgctggagattctgggtcagatattgattggtatgtgaaacgtacagtgcttggtggtatctactcaacctcagaggtgtatatgttgacagacaattctccagagttccgtgatacttggacgtttgtgaaccgcagaataaaggatgctcttgatcttcagaaaaccttccaagaggccgcatacctcgctgaagccgtgggagcaggcatgagcggtaccgtgcagggtgttctcaacagggtcttccagaaccgtagtggatgaactttctttttctcaaacacgtagtgtggatggactaattccgtcttttgcacgctgcacaggataaagcacattttcccgttgaccaactggcgtatgtttataataaagcaaatggtgatgtggttgagatgcatcacgttagggt

SEQ ID NO: 18140 - protein, 201 aa, Zea mays subsp. mays
  peptide (1)..(201): Ceres Seq. ID no. 12364310
  misc_feature (1)..(196): Homolog of NCBI NO: 18447632 NR Description: SD02734p [Drosophila melanogaster]
  misc_feature (1)..(196): Homolog of NCBI NO: 24586344 NR Description: CG30493-PB [Drosophila melanogaster]
  misc_feature (1)..(193): Homolog of NCBI NO: 6841302 NR Description: HSPC326 [Homo sapiens]
  misc_feature (1)..(172): Homolog of NCBI NO: 34851240 NR Description: similar to Polymerase (RNA) II (DNA directed)
  misc_feature (3)..(193): Homolog of NCBI NO: 33987999 NR Description: Unknown (protein for IMAGE:2967312) [Homo sapiens]
  misc_feature (1)..(193): Homolog of NCBI NO: 40789233 NR Description: hypothetical protein DKFZp434K046 [Homo sapiens]
  misc_feature (1)..(193): Homolog of NCBI NO: 33859690 NR Description: RIKEN cDNA 2310005O14 [Mus musculus]
  misc_feature (1)..(146): Homolog of NCBI NO: 8778288 NR Description: F14D16.30 [Arabidopsis thaliana]
  misc_feature (1)..(200): Homolog of NCBI NO: 21593282 NR Description: unknown [Arabidopsis thaliana]
  misc_feature (1)..(200): Homolog of NCBI NO: 18394701 NR Description: expressed protein
MGWSESAMVAGARDVGVSPAIVGAFPRKEAALVEFFMDDCLQQLMDRIDAGEGEQLKNLILSERLSKLVRMRLEMQAPYISKWPQALSIQSQPANVSTSLKQRAILVDEIWHAAGDSGSDIDWYVKRTVLGGIYSTSEVYMLTDNSPEFRDTWTFVNRRIKDALDLQKTFQEAAYLAEAVGAGMSGTVQGVLNRVFQNRSG

SEQ ID NO: 18141 - protein, 194 aa, Zea mays subsp. mays
  peptide (1)..(194): Ceres Seq. ID no. 12364311
  misc_feature (1)..(189): Homolog of NCBI NO: 18447632 NR Description: SD02734p [Drosophila melanogaster]
  misc_feature (1)..(189): Homolog of NCBI NO: 24586344 NR Description: CG30493-PB [Drosophila melanogaster]
  misc_feature (1)..(186): Homolog of NCBI NO: 6841302 NR Description: HSPC326 [Homo sapiens]
  misc_feature (1)..(165): Homolog of NCBI NO: 34851240 NR Description: similar to Polymerase (RNA) II (DNA directed)
  misc_feature (1)..(186): Homolog of NCBI NO: 33987999 NR Description: Unknown (protein for IMAGE:2967312) [Homo sapiens]
  misc_feature (1)..(186): Homolog of NCBI NO: 40789233 NR Description: hypothetical protein DKFZp434K046 [Homo sapiens]
  misc_feature (1)..(186): Homolog of NCBI NO: 33859690 NR Description: RIKEN cDNA 2310005O14 [Mus musculus]
  misc_feature (1)..(139): Homolog of NCBI NO: 8778288 NR Description: F14D16.30 [Arabidopsis thaliana]
  misc_feature (1)..(193): Homolog of NCBI NO: 21593282 NR Description: unknown [Arabidopsis thaliana]
  misc_feature (1)..(193): Homolog of NCBI NO: 18394701 NR Description: expressed protein
MVAGARDVGVSPAIVGAFPRKEAALVEFFMDDCLQQLMDRIDAGEGEQLKNLILSERLSKLVRMRLEMQAPYISKWPQALSIQSQPANVSTSLKQRAILVDEIWHAAGDSGSDIDWYVKRTVLGGIYSTSEVYMLTDNSPEFRDTWTFVNRRIKDALDLQKTFQEAAYLAEAVGAGMSGTVQGVLNRVFQNRSG

SEQ ID NO: 18142 - protein, 165 aa, Zea mays subsp. mays
  peptide (1)..(165): Ceres Seq. ID no. 12364312
  misc_feature (1)..(160): Homolog of NCBI NO: 18447632 NR Description: SD02734p [Drosophila melanogaster]
  misc_feature (1)..(160): Homolog of NCBI NO: 24586344 NR Description: CG30493-PB [Drosophila melanogaster]
  misc_feature (1)..(157): Homolog of NCBI NO: 6841302 NR Description: HSPC326 [Homo sapiens]
  misc_feature (1)..(136): Homolog of NCBI NO: 34851240 NR Description: similar to Polymerase (RNA) II (DNA directed)
  misc_feature (1)..(157): Homolog of NCBI NO: 33987999 NR Description: Unknown (protein for IMAGE:2967312) [Homo sapiens]
  misc_feature (1)..(157): Homolog of NCBI NO: 40789233 NR Description: hypothetical protein DKFZp434K046 [Homo sapiens]
  misc_feature (1)..(157): Homolog of NCBI NO: 33859690 NR Description: RIKEN cDNA 2310005O14 [Mus musculus]
  misc_feature (1)..(110): Homolog of NCBI NO: 8778288 NR Description: F14D16.30 [Arabidopsis thaliana]
  misc_feature (1)..(164): Homolog of NCBI NO: 21593282 NR Description: unknown [Arabidopsis thaliana]
  misc_feature (1)..(164): Homolog of NCBI NO: 18394701 NR Description: expressed protein
MDDCLQQLMDRIDAGEGEQLKNLILSERLSKLVRMRLEMQAPYISKWPQALSIQSQPANVSTSLKQRAILVDEIWHAAGDSGSDIDWYVKRTVLGGIYSTSEVYMLTDNSPEFRDTWTFVNRRIKDALDLQKTFQEAAYLAEAVGAGMSGTVQGVLNRVFQNRSG

SEQ ID NO: 18143 - DNA, 1394 bp, Zea mays subsp. mays
  misc_feature (1)..(1394): Ceres Seq. ID no. 13494608
  misc_feature: MA Experiment ID: 108535 Result: Up-regulated in Transcription
  misc_feature: MA Experiment 108535 PARAMETER Experiment Name: Zm_Meristem_P Parameter: Age (day) Value: 8
  misc_feature: MA Experiment 108535 PARAMETER Experiment Name: Zm_Meristem_P Parameter: Organism Value: Zea mays
  misc_feature: MA Experiment 108535 PARAMETER Experiment Name: Zm_Meristem_P Parameter: Plant Line Value: 35A19
  misc_feature: MA Experiment 108535 PARAMETER Experiment Name: Zm_Meristem_P Parameter: Tissue Value: Root Meristem vs. Above Root Meristem
  misc_feature: MA Experiment ID: 20000487 Result: Up-regulated in Transcription
  misc_feature: MA Experiment 20000487 PARAMETER Experiment Name: Zm_50mM_NH4NO3_L_to_H_P Parameter: Organism Value: Zea mays
  misc_feature: MA Experiment 20000487 PARAMETER Experiment Name: Zm_50mM_NH4NO3_L_to_H_P Parameter: Timepoint (hr) Value: 4
  misc_feature: MA Experiment 20000487 PARAMETER Experiment Name: Zm_50mM_NH4NO3_L_to_H_P Parameter: Tissue Value: Leaves
  misc_feature: MA Experiment 20000487 PARAMETER Experiment Name: Zm_50mM_NH4NO3_L_to_H_P Parameter: Treatment Value: 50mM NH4NO3 vs. 100mM Mannitol
  misc_feature: MA Experiment ID: 20000534 Result: Down-regulated in Transcription
  misc_feature: MA Experiment 20000534 PARAMETER Experiment Name: Zm_Hybrid_Pollen_P Parameter: Age (day) Value: 8
  misc_feature: MA Experiment 20000534 PARAMETER Experiment Name: Zm_Hybrid_Pollen_P Parameter: Organism Value: Zea mays
  misc_feature: MA Experiment 20000534 PARAMETER Experiment Name: Zm_Hybrid_Pollen_P Parameter: Plant Line Value: 35A19
  misc_feature: MA Experiment 20000534 PARAMETER Experiment Name: Zm_Hybrid_Pollen_P Parameter: Tissue Value: Pollen vs. Aerial
aatcgaaaagatttgttttgatttctgagccttctcttgtgtcgttctgtgttgggttgcggacgcgtcctcaactaggtttttcttccatcatttgtgtgttcgttcaactgagccgccatgcgccagccacggtccgggccggggaagaggcggggccgcggtccgcgcatccctgcggcgacgcttcagaagcagaaaacggcgttggcgaacgtcgaccagatcaccggcgccaagattccgaagagcttcgtattctcccgcggtaaactcccctccacgcttcgccatcttcagcaggacctccgcaaggtcatgctcccctacactgctctcaatctcaaggagaagaaacgaaataacctcaaggattttgtcaatgttgccggcccgatgggtgtgacacatttcttaatcctctcaaaccctcaaagcctgccacatttgcgctttgccaaatcaccgcagggcccaacattcacatttcagatagaggagtactcacttgcggcggacattgcaaactctcagaagcgcccaaggtgcccaccagggatattcaaaaactcaccactggttgtacttggtgggttgacaggtctcggcaaccctttcaggagtttggtcgaatacttccaacatatgttcccttccgttgacccaaccactgtcaagctggcaacatgccaaaggattctgttgttaaaacatgataaagagaaggatgttattgaattccggcattactccatcaagctccagcctgttggggtcagtcgcaggattagaaagctcatgcaaaacaatcaagtgcctgatctaggagaatttgaagatgttagtgagtttgtgaaaaaagctgggtatggatcagaaagtgaagcagacgatgaagcagcaatggtaagcttgccaagtgacattgacaaattaaaccgggcatccagaaaaagcgctgtcagactccaggagattggaccaaggatgactatgcgcctagttaaagttgaagctgggctatgttcaggagatgtcttatacccatggcctgtggaaaaggaagtggtgggaaagaaaggaacagaaactggggaagtagaagggcaagaagacgattctgaggccacagatgagtccgaggatgagatggtgtaggatttcagatgttttggacaggcagacgcaggtgttttgacagtcctggatgtttcatgctgaaaccaacgggccctgtgcccaataacgtggtgcattcatgccaattttgtcactgaaggtgcattgcattcgttgtaacgaagtgtaacattgttttgccgatggttacctcttttgtgttatgacaagtttggaggatagtttttggttcgcagtctaagatttctcattct

SEQ ID NO: 18144 - protein, 345 aa, Zea mays subsp. mays
  peptide (1)..(345): Ceres Seq. ID no. 13494609
  misc_feature (24)..(308): Homolog of NCBI NO: 11877243 NR Description: SSF1/P2Y11 chimeric protein [Homo sapiens]
  misc_feature (24)..(308): Homolog of NCBI NO: 9910566 NR Description: peter pan homolog; second-step splicing factor 1
  misc_feature (24)..(314): Homolog of NCBI NO: 28278954 NR Description: Unknown (protein for MGC:55956) [Danio rerio]
  misc_feature (24)..(308): Homolog of NCBI NO: 26332985 NR Description: unnamed protein product [Mus musculus]
  misc_feature (24)..(308): Homolog of NCBI NO: 21704228 NR Description: peter pan
  misc_feature (24)..(308): Homolog of NCBI NO: 28277332 NR Description: Similar to peter pan homolog (Drosophila)
  misc_feature (24)..(314): Homolog of NCBI NO: 39794499 NR Description: Unknown (protein for MGC:76273) [Silurana
  misc_feature (24)..(308): Homolog of NCBI NO: 28422433 NR Description: Similar to peter pan homolog (Drosophila)
  misc_feature (32)..(345): Homolog of NCBI NO: 30697573 NR Description: Peter Pan - like protein [Arabidopsis thaliana]
  misc_feature (32)..(345): Homolog of NCBI NO: 30697571 NR Description: Peter Pan - like protein [Arabidopsis thaliana]
  misc_feature (24)..(308): Homolog of NCBI NO: 11877243 NR Description: SSF1/P2Y11 chimeric protein [Homo sapiens]
  misc_feature (24)..(308): Homolog of NCBI NO: 9910566 NR Description: peter pan homolog; second-step splicing factor 1
  misc_feature (24)..(314): Homolog of NCBI NO: 28278954 NR Description: Unknown (protein for MGC:55956) [Danio rerio]
  misc_feature (24)..(308): Homolog of NCBI NO: 26332985 NR Description: unnamed protein product [Mus musculus]
  misc_feature (24)..(308): Homolog of NCBI NO: 21704228 NR Description: peter pan
  misc_feature (24)..(308): Homolog of NCBI NO: 28277332 NR Description: Similar to peter pan homolog (Drosophila)
  misc_feature (24)..(314): Homolog of NCBI NO: 39794499 NR Description: Unknown (protein for MGC:76273) [Silurana
  misc_feature (24)..(308): Homolog of NCBI NO: 28422433 NR Description: Similar to peter pan homolog (Drosophila)
  misc_feature (32)..(345): Homolog of NCBI NO: 30697573 NR Description: Peter Pan - like protein [Arabidopsis thaliana]
  misc_feature (32)..(345): Homolog of NCBI NO: 30697571 NR Description: Peter Pan - like protein [Arabidopsis thaliana]
MRQPRSGPGKRRGRGPRIPAATLQKQKTALANVDQITGAKIPKSFVFSRGKLPSTLRHLQQDLRKVMLPYTALNLKEKKRNNLKDFVNVAGPMGVTHFLILSNPQSLPHLRFAKSPQGPTFTFQIEEYSLAADIANSQKRPRCPPGIFKNSPLVVLGGLTGLGNPFRSLVEYFQHMFPSVDPTTVKLATCQRILLLKHDKEKDVIEFRHYSIKLQPVGVSRRIRKLMQNNQVPDLGEFEDVSEFVKKAGYGSESEADDEAAMVSLPSDIDKLNRASRKSAVRLQEIGPRMTMRLVKVEAGLCSGDVLYPWPVEKEVVGKKGTETGEVEGQEDDSEATDESEDEMV

SEQ ID NO: 18145 - protein, 279 aa, Zea mays subsp. mays
  peptide (1)..(279): Ceres Seq. ID no. 13494610
  misc_feature (1)..(248): Homolog of NCBI NO: 39794499 NR Description: Unknown (protein for MGC:76273) [Silurana
  misc_feature (1)..(242): Homolog of NCBI NO: 28422433 NR Description: Similar to peter pan homolog (Drosophila)
  misc_feature (1)..(279): Homolog of NCBI NO: 30697573 NR Description: Peter Pan - like protein [Arabidopsis thaliana]
  misc_feature (1)..(279): Homolog of NCBI NO: 30697571 NR Description: Peter Pan - like protein [Arabidopsis thaliana]
  misc_feature (1)..(242): Homolog of NCBI NO: 21704228 NR Description: peter pan
  misc_feature (1)..(242): Homolog of NCBI NO: 28277332 NR Description: Similar to peter pan homolog (Drosophila)
  misc_feature (1)..(242): Homolog of NCBI NO: 11877243 NR Description: SSF1/P2Y11 chimeric protein [Homo sapiens]
  misc_feature (1)..(242): Homolog of NCBI NO: 9910566 NR Description: peter pan homolog; second-step splicing factor 1
  misc_feature (1)..(248): Homolog of NCBI NO: 28278954 NR Description: Unknown (protein for MGC:55956) [Danio rerio]
  misc_feature (1)..(242): Homolog of NCBI NO: 26332985 NR Description: unnamed protein product [Mus musculus]
  misc_feature (1)..(242): Homolog of NCBI NO: 11877243 NR Description: SSF1/P2Y11 chimeric protein [Homo sapiens]
  misc_feature (1)..(242): Homolog of NCBI NO: 9910566 NR Description: peter pan homolog; second-step splicing factor 1
  misc_feature (1)..(248): Homolog of NCBI NO: 28278954 NR Description: Unknown (protein for MGC:55956) [Danio rerio]
  misc_feature (1)..(242): Homolog of NCBI NO: 26332985 NR Description: unnamed protein product [Mus musculus]
  misc_feature (1)..(242): Homolog of NCBI NO: 21704228 NR Description: peter pan
  misc_feature (1)..(242): Homolog of NCBI NO: 28277332 NR Description: Similar to peter pan homolog (Drosophila)
  misc_feature (1)..(248): Homolog of NCBI NO: 39794499 NR Description: Unknown (protein for MGC:76273) [Silurana
  misc_feature (1)..(242): Homolog of NCBI NO: 28422433 NR Description: Similar to peter pan homolog (Drosophila)
  misc_feature (1)..(279): Homolog of NCBI NO: 30697573 NR Description: Peter Pan - like protein [Arabidopsis thaliana]
  misc_feature (1)..(279): Homolog of NCBI NO: 30697571 NR Description: Peter Pan - like protein [Arabidopsis thaliana]
MLPYTALNLKEKKRNNLKDFVNVAGPMGVTHFLILSNPQSLPHLRFAKSPQGPTFTFQIEEYSLAADIANSQKRPRCPPGIFKNSPLVVLGGLTGLGNPFRSLVEYFQHMFPSVDPTTVKLATCQRILLLKHDKEKDVIEFRHYSIKLQPVGVSRRIRKLMQNNQVPDLGEFEDVSEFVKKAGYGSESEADDEAAMVSLPSDIDKLNRASRKSAVRLQEIGPRMTMRLVKVEAGLCSGDVLYPWPVEKEVVGKKGTETGEVEGQEDDSEATDESEDEMV

SEQ ID NO: 18146 - protein, 253 aa, Zea mays subsp. mays
  peptide (1)..(253): Ceres Seq. ID no. 13494611
  misc_feature (1)..(216): Homolog of NCBI NO: 11877243 NR Description: SSF1/P2Y11 chimeric protein [Homo sapiens]
  misc_feature (1)..(216): Homolog of NCBI NO: 9910566 NR Description: peter pan homolog; second-step splicing factor 1
  misc_feature (1)..(222): Homolog of NCBI NO: 28278954 NR Description: Unknown (protein for MGC:55956) [Danio rerio]
  misc_feature (1)..(216): Homolog of NCBI NO: 26332985 NR Description: unnamed protein product [Mus musculus]
  misc_feature (1)..(216): Homolog of NCBI NO: 21704228 NR Description: peter pan
  misc_feature (1)..(216): Homolog of NCBI NO: 28277332 NR Description: Similar to peter pan homolog (Drosophila)
  misc_feature (1)..(222): Homolog of NCBI NO: 39794499 NR Description: Unknown (protein for MGC:76273) [Silurana
  misc_feature (1)..(216): Homolog of NCBI NO: 28422433 NR Description: Similar to peter pan homolog (Drosophila)
  misc_feature (1)..(253): Homolog of NCBI NO: 30697573 NR Description: Peter Pan - like protein [Arabidopsis thaliana]
  misc_feature (1)..(253): Homolog of NCBI NO: 30697571 NR Description: Peter Pan - like protein [Arabidopsis thaliana]
  misc_feature (1)..(216): Homolog of NCBI NO: 11877243 NR Description: SSF1/P2Y11 chimeric protein [Homo sapiens]
  misc_feature (1)..(216): Homolog of NCBI NO: 9910566 NR Description: peter pan homolog; second-step splicing factor 1
  misc_feature (1)..(222): Homolog of NCBI NO: 28278954 NR Description: Unknown (protein for MGC:55956) [Danio rerio]
  misc_feature (1)..(216): Homolog of NCBI NO: 26332985 NR Description: unnamed protein product [Mus musculus]
  misc_feature (1)..(216): Homolog of NCBI NO: 21704228 NR Description: peter pan
  misc_feature (1)..(216): Homolog of NCBI NO: 28277332 NR Description: Similar to peter pan homolog (Drosophila)
  misc_feature (1)..(222): Homolog of NCBI NO: 39794499 NR Description: Unknown (protein for MGC:76273) [Silurana
  misc_feature (1)..(216): Homolog of NCBI NO: 28422433 NR Description: Similar to peter pan homolog (Drosophila)
  misc_feature (1)..(253): Homolog of NCBI NO: 30697573 NR Description: Peter Pan - like protein [Arabidopsis thaliana]
  misc_feature (1)..(253): Homolog of NCBI NO: 30697571 NR Description: Peter Pan - like protein [Arabidopsis thaliana]
MGVTHFLILSNPQSLPHLRFAKSPQGPTFTFQIEEYSLAADIANSQKRPRCPPGIFKNSPLVVLGGLTGLGNPFRSLVEYFQHMFPSVDPTTVKLATCQRILLLKHDKEKDVIEFRHYSIKLQPVGVSRRIRKLMQNNQVPDLGEFEDVSEFVKKAGYGSESEADDEAAMVSLPSDIDKLNRASRKSAVRLQEIGPRMTMRLVKVEAGLCSGDVLYPWPVEKEVVGKKGTETGEVEGQEDDSEATDESEDEMV

SEQ ID NO: 18147 - DNA, 1172 bp, Zea mays subsp. mays
  misc_feature (1)..(1172): Ceres Seq. ID no. 12350812
  misc_feature: MA Experiment ID: 108522 Result: Up-regulated in Transcription
  misc_feature: MA Experiment 108522 PARAMETER Experiment Name: Zm_42deg_Heat_P Parameter: Age (day) Value: 8
  misc_feature: MA Experiment 108522 PARAMETER Experiment Name: Zm_42deg_Heat_P Parameter: Organism Value: Zea mays
  misc_feature: MA Experiment 108522 PARAMETER Experiment Name: Zm_42deg_Heat_P Parameter: Plant Line Value: 35A19
  misc_feature: MA Experiment 108522 PARAMETER Experiment Name: Zm_42deg_Heat_P Parameter: Temperature (deg C) Value: 42 vs. 22
  misc_feature: MA Experiment 108522 PARAMETER Experiment Name: Zm_42deg_Heat_P Parameter: Timepoint (hr) Value: 1
  misc_feature: MA Experiment 108522 PARAMETER Experiment Name: Zm_42deg_Heat_P Parameter: Tissue Value: Aerial
  misc_feature: MA Experiment ID: 108523 Result: Up-regulated in Transcription
  misc_feature: MA Experiment 108523 PARAMETER Experiment Name: Zm_42deg_Heat_P Parameter: Age (day) Value: 8
  misc_feature: MA Experiment 108523 PARAMETER Experiment Name: Zm_42deg_Heat_P Parameter: Organism Value: Zea mays
  misc_feature: MA Experiment 108523 PARAMETER Experiment Name: Zm_42deg_Heat_P Parameter: Plant Line Value: 35A19
  misc_feature: MA Experiment 108523 PARAMETER Experiment Name: Zm_42deg_Heat_P Parameter: Temperature (deg C) Value: 42 vs. 22
  misc_feature: MA Experiment 108523 PARAMETER Experiment Name: Zm_42deg_Heat_P Parameter: Timepoint (hr) Value: 6
  misc_feature: MA Experiment 108523 PARAMETER Experiment Name: Zm_42deg_Heat_P Parameter: Tissue Value: Aerial
  misc_feature: MA Experiment ID: 108527 Result: Up-regulated in Transcription
  misc_feature: MA Experiment 108527 PARAMETER Experiment Name: Zm_5mM_NO_P Parameter: Age (day) Value: 8
  misc_feature: MA Experiment 108527 PARAMETER Experiment Name: Zm_5mM_NO_P Parameter: Organism Value: Zea mays
  misc_feature: MA Experiment 108527 PARAMETER Experiment Name: Zm_5mM_NO_P Parameter: Plant Line Value: 35A19
  misc_feature: MA Experiment 108527 PARAMETER Experiment Name: Zm_5mM_NO_P Parameter: Timepoint (hr) Value: 6
  misc_feature: MA Experiment 108527 PARAMETER Experiment Name: Zm_5mM_NO_P Parameter: Tissue Value: Aerial
  misc_feature: MA Experiment 108527 PARAMETER Experiment Name: Zm_5mM_NO_P Parameter: Treatment Value: 5mM NO vs. No Treatment
  misc_feature: MA Experiment ID: 108529 Result: Down-regulated in Transcription
  misc_feature: MA Experiment 108529 PARAMETER Experiment Name: Zm_Imbibed_Seeds_P Parameter: Age (day) Value: 5 vs. 2
  misc_feature: MA Experiment 108529 PARAMETER Experiment Name: Zm_Imbibed_Seeds_P Parameter: Organism Value: Zea mays
  misc_feature: MA Experiment 108529 PARAMETER Experiment Name: Zm_Imbibed_Seeds_P Parameter: Plant Line Value: 35A19
  misc_feature: MA Experiment 108529 PARAMETER Experiment Name: Zm_Imbibed_Seeds_P Parameter: Tissue Value: Roots vs. Embryo
  misc_feature: MA Experiment ID: 108530 Result: Down-regulated in Transcription
  misc_feature: MA Experiment 108530 PARAMETER Experiment Name: Zm_Imbibed_Seeds_P Parameter: Age (day) Value: 6 vs. 2
  misc_feature: MA Experiment 108530 PARAMETER Experiment Name: Zm_Imbibed_Seeds_P Parameter: Organism Value: Zea mays
  misc_feature: MA Experiment 108530 PARAMETER Experiment Name: Zm_Imbibed_Seeds_P Parameter: Plant Line Value: 35A19
  misc_feature: MA Experiment 108530 PARAMETER Experiment Name: Zm_Imbibed_Seeds_P Parameter: Tissue Value: Aerial vs. Embryo
  misc_feature: MA Experiment ID: 108533 Result: Up-regulated in Transcription
  misc_feature: MA Experiment 108533 PARAMETER Experiment Name: Zm_4deg_Cold_P Parameter: Age (hr) Value: 8
  misc_feature: MA Experiment 108533 PARAMETER Experiment Name: Zm_4deg_Cold_P Parameter: Organism Value: Zea mays
  misc_feature: MA Experiment 108533 PARAMETER Experiment Name: Zm_4deg_Cold_P Parameter: Plant Line Value: 35A19
  misc_feature: MA Experiment 108533 PARAMETER Experiment Name: Zm_4deg_Cold_P Parameter: Temperature (deg C) Value: 4 vs. 22
  misc_feature: MA Experiment 108533 PARAMETER Experiment Name: Zm_4deg_Cold_P Parameter: Timepoint (hr) Value: 1
  misc_feature: MA Experiment 108533 PARAMETER Experiment Name: Zm_4deg_Cold_P Parameter: Tissue Value: Aerial
  misc_feature: MA Experiment ID: 108546 Result: Down-regulated in Transcription
  misc_feature: MA Experiment 108546 PARAMETER Experiment Name: Zm_Imbibed_Seeds_P Parameter: Age (day) Value: 3 vs. 2
  misc_feature: MA Experiment 108546 PARAMETER Experiment Name: Zm_Imbibed_Seeds_P Parameter: Organism Value: Zea mays
  misc_feature: MA Experiment 108546 PARAMETER Experiment Name: Zm_Imbibed_Seeds_P Parameter: Plant Line Value: 35A19
  misc_feature: MA Experiment 108546 PARAMETER Experiment Name: Zm_Imbibed_Seeds_P Parameter: Tissue Value: Roots vs. Embryo
  misc_feature: MA Experiment ID: 108687 Result: Up-regulated in Transcription
  misc_feature: MA Experiment 108687 PARAMETER Experiment Name: Zm_Embryos-Flowers__P Parameter: Tissue Value: Embryo vs. Aerial+
  misc_feature: MA Experiment ID: 108689 Result: Up-regulated in Transcription
  misc_feature: MA Experiment 108689 PARAMETER Experiment Name: Zm_Drought_Roots_P Parameter: Age (day) Value: 9
  misc_feature: MA Experiment 108689 PARAMETER Experiment Name: Zm_Drought_Roots_P Parameter: Organism Value: Zea mays
  misc_feature: MA Experiment 108689 PARAMETER Experiment Name: Zm_Drought_Roots_P Parameter: Plant Line Value: 35A19
  misc_feature: MA Experiment 108689 PARAMETER Experiment Name: Zm_Drought_Roots_P Parameter: Timepoint (hr) Value: 24
  misc_feature: MA Experiment 108689 PARAMETER Experiment Name: Zm_Drought_Roots_P Parameter: Tissue Value: Roots
  misc_feature: MA Experiment 108689 PARAMETER Experiment Name: Zm_Drought_Roots_P Parameter: Treatment Value: Drought vs. No Drought
  misc_feature: MA Experiment ID: 20000535 Result: Up-regulated in Transcription
  misc_feature: MA Experiment 20000535 PARAMETER Experiment Name: Zm_Hybrid_Seed_Dev_P Parameter: DAP Value: 30 vs. 12
  misc_feature: MA Experiment 20000535 PARAMETER Experiment Name: Zm_Hybrid_Seed_Dev_P Parameter: Organism Value: Zea mays
  misc_feature: MA Experiment 20000535 PARAMETER Experiment Name: Zm_Hybrid_Seed_Dev_P Parameter: Plant Line Value: 35A19
  misc_feature: MA Experiment 20000535 PARAMETER Experiment Name: Zm_Hybrid_Seed_Dev_P Parameter: Tissue Value: Embryo vs. Unfert Floret
tgaatatgatgtttatacatggggttggaaagaatgtgttccaactggaagggttattggagaccagtcttcagttggaaccatggaaaaggatgaaaggcaaatggcaatggccactgaccaagtgagccctaggtcacaggtgtctaggacaagcagcggagcggcagctggttcctctgaaagcagaggcactgatgacagcacaaagcgacgaaagttgtctttagcaaaacatggacctgagagttcgacatccagtgatgaaagtctttcagcacccccttgtgttgtgacatttagtacaggagtgaaaatagtggctgtagccgctggtggtcgtcatacattagcactatcagatttaggtcaggtgtggggttggggatatggaggagaagggcaactaggtttgggttctagaatccgaactgtttcttctccccatcctgtaccgtgcattgaatcagcactatacaccaaggataggccatcagctatgaaaggtaacaaggctgctgaaggacatgtcagtaaagtcttgggaaattgcgtgagggcaattgcttgtggaggtcgtcacagtgctgtagtaacagattcaggagcacttcttacatttggatgggggctgtatggacagtgtggacaagggaatacagatgatgttttaagtccaacgtgtgtatcgtctatcctgggaatcaagatgcaagatgttgccgcaggtttgtggcacactgtatgtacatctgtagatggtgatgtgtattcgtttggaggaaaccagtttggacagcttggcactggttctgatcaggctgagactcttccaaaattggtagatgctacaagcctggagaataagaacgccagatccgtttcttgtggagctcgccatagtgctattataacagatgaaggtgaggtattctgctggggatggaacaagtatggccagcttggccttggcgactcaatggacaggaacgtgccttgcagtgtacgtgtggacgcttaccacccgctaaacgtatcatgtggctggtggcacaccttggtgctcgcggagtcgcctgcttgaaacctgacaaagaaattaccttagattgacaattttgttaggaacttgtaggctcgtgcaggtacggtgatgctgcatttcatcgtgt

SEQ ID NO: 18148 - protein, 360 aa, Zea mays subsp. mays
  peptide (1)..(360): Ceres Seq. ID no. 12350813
  misc_feature (307)..(355): Pfam Name: Regulator of chromosome condensation (RCC1) Pfam Description: Regulator of chromosome condensation (RCC1)
  misc_feature (185)..(357): Homolog of NCBI NO: 15237540 NR Description: UVB-resistance protein UVR8 (gb|AAD43920.1)
  misc_feature (185)..(357): Homolog of NCBI NO: 11358913 NR Description: UVB-resistance protein UVR8 [imported] -
  misc_feature (103)..(140): Homolog of NCBI NO: 32487442 NR Description: OSJNBa0006B20.1 [Oryza sativa (japonica
  misc_feature (182)..(357): Homolog of NCBI NO: 32487442 NR Description: OSJNBa0006B20.1 [Oryza sativa (japonica
  misc_feature (103)..(139): Homolog of NCBI NO: 11358913 NR Description: UVB-resistance protein UVR8 [imported] -
  misc_feature (105)..(139): Homolog of NCBI NO: 11358913 NR Description: UVB-resistance protein UVR8 [imported] -
  misc_feature (103)..(139): Homolog of NCBI NO: 15237540 NR Description: UVB-resistance protein UVR8 (gb|AAD43920.1)
  misc_feature (3)..(359): Homolog of NCBI NO: 15232347 NR Description: putative protein; protein id: At3g53830.1
  misc_feature (4)..(357): Homolog of NCBI NO: 15233306 NR Description: regulator of chromosome condensation-like protein
  misc_feature (1)..(359): Homolog of NCBI NO: 34908266 NR Description: P0446B05.22 [Oryza sativa (japonica
EYDVYTWGWKECVPTGRVIGDQSSVGTMEKDERQMAMATDQVSPRSQVSRTSSGAAAGSSESRGTDDSTKRRKLSLAKHGPESSTSSDESLSAPPCVVTFSTGVKIVAVAAGGRHTLALSDLGQVWGWGYGGEGQLGLGSRIRTVSSPHPVPCIESALYTKDRPSAMKGNKAAEGHVSKVLGNCVRAIACGGRHSAVVTDSGALLTFGWGLYGQCGQGNTDDVLSPTCVSSILGIKMQDVAAGLWHTVCTSVDGDVYSFGGNQFGQLGTGSDQAETLPKLVDATSLENKNARSVSCGARHSAIITDEGEVFCWGWNKYGQLGLGDSMDRNVPCSVRVDAYHPLNVSCGWWHTLVLAESPA

SEQ ID NO: 18149 - protein, 333 aa, Zea mays subsp. mays
  peptide (1)..(333): Ceres Seq. ID no. 12350814
  misc_feature (280)..(328): Pfam Name: Regulator of chromosome condensation (RCC1) Pfam Description: Regulator of chromosome condensation (RCC1)
  misc_feature (78)..(112): Homolog of NCBI NO: 11358913 NR Description: UVB-resistance protein UVR8 [imported] -
  misc_feature (76)..(112): Homolog of NCBI NO: 15237540 NR Description: UVB-resistance protein UVR8 (gb|AAD43920.1)
  misc_feature (76)..(112): Homolog of NCBI NO: 11358913 NR Description: UVB-resistance protein UVR8 [imported] -
  misc_feature (158)..(330): Homolog of NCBI NO: 15237540 NR Description: UVB-resistance protein UVR8 (gb|AAD43920.1)
  misc_feature (158)..(330): Homolog of NCBI NO: 11358913 NR Description: UVB-resistance protein UVR8 [imported] -
  misc_feature (76)..(113): Homolog of NCBI NO: 32487442 NR Description: OSJNBa0006B20.1 [Oryza sativa (japonica
  misc_feature (155)..(330): Homolog of NCBI NO: 32487442 NR Description: OSJNBa0006B20.1 [Oryza sativa (japonica
  misc_feature (1)..(332): Homolog of NCBI NO: 15232347 NR Description: putative protein; protein id: At3g53830.1
  misc_feature (1)..(330): Homolog of NCBI NO: 15233306 NR Description: regulator of chromosome condensation-like protein
  misc_feature (1)..(332): Homolog of NCBI NO: 34908266 NR Description: P0446B05.22 [Oryza sativa (japonica
MEKDERQMAMATDQVSPRSQVSRTSSGAAAGSSESRGTDDSTKRRKLSLAKHGPESSTSSDESLSAPPCVVTFSTGVKIVAVAAGGRHTLALSDLGQVWGWGYGGEGQLGLGSRIRTVSSPHPVPCIESALYTKDRPSAMKGNKAAEGHVSKVLGNCVRAIACGGRHSAVVTDSGALLTFGWGLYGQCGQGNTDDVLSPTCVSSILGIKMQDVAAGLWHTVCTSVDGDVYSFGGNQFGQLGTGSDQAETLPKLVDATSLENKNARSVSCGARHSAIITDEGEVFCWGWNKYGQLGLGDSMDRNVPCSVRVDAYHPLNVSCGWWHTLVLAESPA

SEQ ID NO: 18150 - protein, 326 aa, Zea mays subsp. mays
  peptide (1)..(326): Ceres Seq. ID no. 12350815
  misc_feature (273)..(321): Pfam Name: Regulator of chromosome condensation (RCC1) Pfam Description: Regulator of chromosome condensation (RCC1)
  misc_feature (71)..(105): Homolog of NCBI NO: 11358913 NR Description: UVB-resistance protein UVR8 [imported] -
  misc_feature (69)..(105): Homolog of NCBI NO: 15237540 NR Description: UVB-resistance protein UVR8 (gb|AAD43920.1)
  misc_feature (69)..(105): Homolog of NCBI NO: 11358913 NR Description: UVB-resistance protein UVR8 [imported] -
  misc_feature (151)..(323): Homolog of NCBI NO: 15237540 NR Description: UVB-resistance protein UVR8 (gb|AAD43920.1)
  misc_feature (151)..(323): Homolog of NCBI NO: 11358913 NR Description: UVB-resistance protein UVR8 [imported] -
  misc_feature (69)..(106): Homolog of NCBI NO: 32487442 NR Description: OSJNBa0006B20.1 [Oryza sativa (japonica
  misc_feature (148)..(323): Homolog of NCBI NO: 32487442 NR Description: OSJNBa0006B20.1 [Oryza sativa (japonica
  misc_feature (1)..(325): Homolog of NCBI NO: 15232347 NR Description: putative protein; protein id: At3g53830.1
  misc_feature (1)..(323): Homolog of NCBI NO: 15233306 NR Description: regulator of chromosome condensation-like protein
  misc_feature (1)..(325): Homolog of NCBI NO: 34908266 NR Description: P0446B05.22 [Oryza sativa (japonica
MAMATDQVSPRSQVSRTSSGAAAGSSESRGTDDSTKRRKLSLAKHGPESSTSSDESLSAPPCVVTFSTGVKIVAVAAGGRHTLALSDLGQVWGWGYGGEGQLGLGSRIRTVSSPHPVPCIESALYTKDRPSAMKGNKAAEGHVSKVLGNCVRAIACGGRHSAVVTDSGALLTFGWGLYGQCGQGNTDDVLSPTCVSSILGIKMQDVAAGLWHTVCTSVDGDVYSFGGNQFGQLGTGSDQAETLPKLVDATSLENKNARSVSCGARHSAIITDEGEVFCWGWNKYGQLGLGDSMDRNVPCSVRVDAYHPLNVSCGWWHTLVLAESPA

SEQ ID NO: 18151 - DNA, 740 bp, Zea mays subsp. mays
  misc_feature (1)..(740): Ceres Seq. ID no. 12337596
  misc_feature: MA Experiment ID: 108515 Result: Down-regulated in Transcription
  misc_feature: MA Experiment 108515 PARAMETER Experiment Name: Zm_2mM_SA_P Parameter: Age (day) Value: 8
  misc_feature: MA Experiment 108515 PARAMETER Experiment Name: Zm_2mM_SA_P Parameter: Organism Value: Zea mays
  misc_feature: MA Experiment 108515 PARAMETER Experiment Name: Zm_2mM_SA_P Parameter: Plant Line Value: 35A19
  misc_feature: MA Experiment 108515 PARAMETER Experiment Name: Zm_2mM_SA_P Parameter: Timepoint (hr) Value: 12
  misc_feature: MA Experiment 108515 PARAMETER Experiment Name: Zm_2mM_SA_P Parameter: Tissue Value: Aerial
  misc_feature: MA Experiment 108515 PARAMETER Experiment Name: Zm_2mM_SA_P Parameter: Treatment Value: 2mM SA vs. No Treatment
  misc_feature: MA Experiment ID: 108523 Result: Down-regulated in Transcription
  misc_feature: MA Experiment 108523 PARAMETER Experiment Name: Zm_42deg_Heat_P Parameter: Age (day) Value: 8
  misc_feature: MA Experiment 108523 PARAMETER Experiment Name: Zm_42deg_Heat_P Parameter: Organism Value: Zea mays
  misc_feature: MA Experiment 108523 PARAMETER Experiment Name: Zm_42deg_Heat_P Parameter: Plant Line Value: 35A19
  misc_feature: MA Experiment 108523 PARAMETER Experiment Name: Zm_42deg_Heat_P Parameter: Temperature (deg C) Value: 42 vs. 22
  misc_feature: MA Experiment 108523 PARAMETER Experiment Name: Zm_42deg_Heat_P Parameter: Timepoint (hr) Value: 6
  misc_feature: MA Experiment 108523 PARAMETER Experiment Name: Zm_42deg_Heat_P Parameter: Tissue Value: Aerial
  misc_feature: MA Experiment ID: 108527 Result: Down-regulated in Transcription
  misc_feature: MA Experiment 108527 PARAMETER Experiment Name: Zm_5mM_NO_P Parameter: Age (day) Value: 8
  misc_feature: MA Experiment 108527 PARAMETER Experiment Name: Zm_5mM_NO_P Parameter: Organism Value: Zea mays
  misc_feature: MA Experiment 108527 PARAMETER Experiment Name: Zm_5mM_NO_P Parameter: Plant Line Value: 35A19
  misc_feature: MA Experiment 108527 PARAMETER Experiment Name: Zm_5mM_NO_P Parameter: Timepoint (hr) Value: 6
  misc_feature: MA Experiment 108527 PARAMETER Experiment Name: Zm_5mM_NO_P Parameter: Tissue Value: Aerial
  misc_feature: MA Experiment 108527 PARAMETER Experiment Name: Zm_5mM_NO_P Parameter: Treatment Value: 5mM NO vs. No Treatment
  misc_feature: MA Experiment ID: 108529 Result: Down-regulated in Transcription
  misc_feature: MA Experiment 108529 PARAMETER Experiment Name: Zm_Imbibed_Seeds_P Parameter: Age (day) Value: 5 vs. 2
  misc_feature: MA Experiment 108529 PARAMETER Experiment Name: Zm_Imbibed_Seeds_P Parameter: Organism Value: Zea mays
  misc_feature: MA Experiment 108529 PARAMETER Experiment Name: Zm_Imbibed_Seeds_P Parameter: Plant Line Value: 35A19
  misc_feature: MA Experiment 108529 PARAMETER Experiment Name: Zm_Imbibed_Seeds_P Parameter: Tissue Value: Roots vs. Embryo
  misc_feature: MA Experiment ID: 108540 Result: Down-regulated in Transcription
  misc_feature: MA Experiment 108540 PARAMETER Experiment Name: Zm_20percent_PEG_P Parameter: Age (day) Value: 8
  misc_feature: MA Experiment 108540 PARAMETER Experiment Name: Zm_20percent_PEG_P Parameter: Organism Value: Zea mays
  misc_feature: MA Experiment 108540 PARAMETER Experiment Name: Zm_20percent_PEG_P Parameter: Plant Line Value: 35A19
  misc_feature: MA Experiment 108540 PARAMETER Experiment Name: Zm_20percent_PEG_P Parameter: Timepoint (hr) Value: 6
  misc_feature: MA Experiment 108540 PARAMETER Experiment Name: Zm_20percent_PEG_P Parameter: Tissue Value: Aerial
  misc_feature: MA Experiment 108540 PARAMETER Experiment Name: Zm_20percent_PEG_P Parameter: Treatment Value: 20percent PEG vs. No Treatment
  misc_feature: MA Experiment ID: 108543 Result: Up-regulated in Transcription
  misc_feature: MA Experiment ID: 108546 Result: Down-regulated in Transcription
  misc_feature: MA Experiment 108546 PARAMETER Experiment Name: Zm_Imbibed_Seeds_P Parameter: Age (day) Value: 3 vs. 2
  misc_feature: MA Experiment 108546 PARAMETER Experiment Name: Zm_Imbibed_Seeds_P Parameter: Organism Value: Zea mays
  misc_feature: MA Experiment 108546 PARAMETER Experiment Name: Zm_Imbibed_Seeds_P Parameter: Plant Line Value: 35A19
  misc_feature: MA Experiment 108546 PARAMETER Experiment Name: Zm_Imbibed_Seeds_P Parameter: Tissue Value: Roots vs. Embryo
  misc_feature: MA Experiment ID: 108556 Result: Down-regulated in Transcription
  misc_feature: MA Experiment 108556 PARAMETER Experiment Name: Zm_Drought_P Parameter: Age (day) Value: 9
  misc_feature: MA Experiment 108556 PARAMETER Experiment Name: Zm_Drought_P Parameter: Organism Value: Zea mays
  misc_feature: MA Experiment 108556 PARAMETER Experiment Name: Zm_Drought_P Parameter: Plant Line Value: 35A19
  misc_feature: MA Experiment 108556 PARAMETER Experiment Name: Zm_Drought_P Parameter: Timepoint (hr) Value: 24
  misc_feature: MA Experiment 108556 PARAMETER Experiment Name: Zm_Drought_P Parameter: Tissue Value: Aerial
  misc_feature: MA Experiment 108556 PARAMETER Experiment Name: Zm_Drought_P Parameter: Treatment Value: Drought vs. No Drought
  misc_feature: MA Experiment ID: 108559 Result: Down-regulated in Transcription
  misc_feature: MA Experiment 108559 PARAMETER Experiment Name: Zm_5mM_NO_P Parameter: Age (day) Value: 8
  misc_feature: MA Experiment 108559 PARAMETER Experiment Name: Zm_5mM_NO_P Parameter: Organism Value: Zea mays
  misc_feature: MA Experiment 108559 PARAMETER Experiment Name: Zm_5mM_NO_P Parameter: Plant Line Value: 35A19
  misc_feature: MA Experiment 108559 PARAMETER Experiment Name: Zm_5mM_NO_P Parameter: Timepoint (hr) Value: 12
  misc_feature: MA Experiment 108559 PARAMETER Experiment Name: Zm_5mM_NO_P Parameter: Tissue Value: Aerial
  misc_feature: MA Experiment 108559 PARAMETER Experiment Name: Zm_5mM_NO_P Parameter: Treatment Value: 5mM NO vs. No Treatment
  misc_feature: MA Experiment ID: 108689 Result: Down-regulated in Transcription
  misc_feature: MA Experiment 108689 PARAMETER Experiment Name: Zm_Drought_Roots_P Parameter: Age (day) Value: 9
  misc_feature: MA Experiment 108689 PARAMETER Experiment Name: Zm_Drought_Roots_P Parameter: Organism Value: Zea mays
  misc_feature: MA Experiment 108689 PARAMETER Experiment Name: Zm_Drought_Roots_P Parameter: Plant Line Value: 35A19
  misc_feature: MA Experiment 108689 PARAMETER Experiment Name: Zm_Drought_Roots_P Parameter: Timepoint (hr) Value: 24
  misc_feature: MA Experiment 108689 PARAMETER Experiment Name: Zm_Drought_Roots_P Parameter: Tissue Value: Roots
  misc_feature: MA Experiment 108689 PARAMETER Experiment Name: Zm_Drought_Roots_P Parameter: Treatment Value: Drought vs. No Drought
  misc_feature: MA Experiment ID: 20000477 Result: Down-regulated in Transcription
  misc_feature: MA Experiment 20000477 PARAMETER Experiment Name: Zm_5mM_SA_P Parameter: Age (day) Value: 10
  misc_feature: MA Experiment 20000477 PARAMETER Experiment Name: Zm_5mM_SA_P Parameter: Organism Value: Zea mays
  misc_feature: MA Experiment 20000477 PARAMETER Experiment Name: Zm_5mM_SA_P Parameter: Plant Line Value: 35A19
  misc_feature: MA Experiment 20000477 PARAMETER Experiment Name: Zm_5mM_SA_P Parameter: Timepoint (hr) Value: 48
  misc_feature: MA Experiment 20000477 PARAMETER Experiment Name: Zm_5mM_SA_P Parameter: Tissue Value: Aerial
  misc_feature: MA Experiment 20000477 PARAMETER Experiment Name: Zm_5mM_SA_P Parameter: Treatment Value: 5mM SA vs. No Treatment
  misc_feature: MA Experiment ID: 20000478 Result: Down-regulated in Transcription
  misc_feature: MA Experiment 20000478 PARAMETER Experiment Name: Zm_5mM_SA_P Parameter: Age (day) Value: 11
  misc_feature: MA Experiment 20000478 PARAMETER Experiment Name: Zm_5mM_SA_P Parameter: Organism Value: Zea mays
  misc_feature: MA Experiment 20000478 PARAMETER Experiment Name: Zm_5mM_SA_P Parameter: Plant Line Value: 35A19
  misc_feature: MA Experiment 20000478 PARAMETER Experiment Name: Zm_5mM_SA_P Parameter: Timepoint (hr) Value: 72
  misc_feature: MA Experiment 20000478 PARAMETER Experiment Name: Zm_5mM_SA_P Parameter: Tissue Value: Aerial
  misc_feature: MA Experiment 20000478 PARAMETER Experiment Name: Zm_5mM_SA_P Parameter: Treatment Value: 5mM SA vs. No Treatment
  misc_feature: MA Experiment ID: 20000479 Result: Down-regulated in Transcription
  misc_feature: MA Experiment 20000479 PARAMETER Experiment Name: Zm_Drought_P Parameter: Age (day) Value: 10
  misc_feature: MA Experiment 20000479 PARAMETER Experiment Name: Zm_Drought_P Parameter: Organism Value: Zea mays
  misc_feature: MA Experiment 20000479 PARAMETER Experiment Name: Zm_Drought_P Parameter: Plant Line Value: 35A19
  misc_feature: MA Experiment 20000479 PARAMETER Experiment Name: Zm_Drought_P Parameter: Timepoint (hr) Value: 48
  misc_feature: MA Experiment 20000479 PARAMETER Experiment Name: Zm_Drought_P Parameter: Tissue Value: Aerial
  misc_feature: MA Experiment 20000479 PARAMETER Experiment Name: Zm_Drought_P Parameter: Treatment Value: Drought vs. No Drought
  misc_feature: MA Experiment ID: 20000480 Result: Down-regulated in Transcription
  misc_feature: MA Experiment 20000480 PARAMETER Experiment Name: Zm_Drought_P Parameter: Age (day) Value: 11
  misc_feature: MA Experiment 20000480 PARAMETER Experiment Name: Zm_Drought_P Parameter: Organism Value: Zea mays
  misc_feature: MA Experiment 20000480 PARAMETER Experiment Name: Zm_Drought_P Parameter: Plant Line Value: 35A19
  misc_feature: MA Experiment 20000480 PARAMETER Experiment Name: Zm_Drought_P Parameter: Timepoint (hr) Value: 72
  misc_feature: MA Experiment 20000480 PARAMETER Experiment Name: Zm_Drought_P Parameter: Tissue Value: Aerial
  misc_feature: MA Experiment 20000480 PARAMETER Experiment Name: Zm_Drought_P Parameter: Treatment Value: Drought vs. No Drought
  misc_feature: MA Experiment ID: 20000533 Result: Down-regulated in Transcription
  misc_feature: MA Experiment 20000533 PARAMETER Experiment Name: Zm_0.001percent_MeJA_P Parameter: Age (day) Value: 11
  misc_feature: MA Experiment 20000533 PARAMETER Experiment Name: Zm_0.001percent_MeJA_P Parameter: Organism Value: Zea mays
  misc_feature: MA Experiment 20000533 PARAMETER Experiment Name: Zm_0.001percent_MeJA_P Parameter: Plant Line Value: 35A19
  misc_feature: MA Experiment 20000533 PARAMETER Experiment Name: Zm_0.001percent_MeJA_P Parameter: Timepoint (hr) Value: 72
  misc_feature: MA Experiment 20000533 PARAMETER Experiment Name: Zm_0.001percent_MeJA_P Parameter: Tissue Value: Aerial
  misc_feature: MA Experiment 20000533 PARAMETER Experiment Name: Zm_0.001percent_MeJA_P Parameter: Treatment Value: 0.001percent MeJA vs. No Treatment
  misc_feature: MA Experiment ID: 20000626 Result: Down-regulated in Transcription
  misc_feature: MA Experiment 20000626 PARAMETER Experiment Name: Zm_Herbicide-Treatments_P Parameter: Timepoint (hr) Value: 12
  misc_feature: MA Experiment 20000626 PARAMETER Experiment Name: Zm_Herbicide-Treatments_P Parameter: Tissue Value: Aerial
  misc_feature: MA Experiment 20000626 PARAMETER Experiment Name: Zm_Herbicide-Treatments_P Parameter: Treatment Value: Roundup vs. No Treatment
taccagcttcatgtacctcaaagccaaagcaatcacctgagctgtgtatgttcccacagtatgttgtcccgacaatgcgcacaccattgttcatacttaatgcagcctacgattcgtggcaggtcaagaacgtcctagcacctagtccagctgatccgaagaagacttgggcccaatgcaagcttgacatcaagagctgctccgccagccaactcacaaccttgcaaaatttcaggacagattttctggcagcactccctaaaacgcagtctgtaggcatgttcatcgactcatgcaatgctcactgccaatcaggatctcaagacacgtggctagccgatggttctcccacggttaacaagacgcaaattggtaaggcggtgggggactggtactacgatagggaggtccctcggcagattgattgcccgtatccctgcaacccaacttgcaagaaccgtgatgatgattggagcatttgtataagtagttcatgttatcgaaatgaaaacaataaaggatcacaacgcgcgcccgtagttgtagatgatgaattataaacacatatgactgagctcaaagttgtttaatcatcatctgttgcgaaatgaggaagacaattggtgtcttgaagctgtgttttcgactgtgtntaaagcgtaaatgtaacgtatattgtgtcttcgcctatgcttaagacattggactagttgattggtcaatttaatttattaaatgcc

SEQ ID NO: 18152 - protein, 185 aa, Zea mays subsp. mays
  peptide (1)..(185): Ceres Seq. ID no. 12337597
  misc_feature (1)..(140): Pfam Name: Pectinacetylesterase Pfam Description: Pectinacetylesterase
  misc_feature (15)..(152): Homolog of NCBI NO: 7487997 NR Description: pectin acetylesterase homolog F21E10.11 -
  misc_feature (1)..(152): Homolog of NCBI NO: 18397406 NR Description: pectinacetylesterase, putative
  misc_feature (9)..(152): Homolog of NCBI NO: 6478931 NR Description: putative pectinacetylesterase [Arabidopsis
  misc_feature (1)..(150): Homolog of NCBI NO: 15242357 NR Description: pectinacetylesterase, putative
  misc_feature (1)..(150): Homolog of NCBI NO: 21593445 NR Description: pectin acetylesterase [Arabidopsis thaliana]
  misc_feature (1)..(153): Homolog of NCBI NO: 22328797 NR Description: pectinacetylesterase family; protein id:
  misc_feature (1)..(150): Homolog of NCBI NO: 18415308 NR Description: pectinacetylesterase, putative
  misc_feature (1)..(150): Homolog of NCBI NO: 7488140 NR Description: probable pectin acetylesterase (EC 3.1.1.-) -
  misc_feature (1)..(153): Homolog of NCBI NO: 7488883 NR Description: pectin acetylesterase (EC 3.1.1.-) precursor -
  misc_feature (1)..(156): Homolog of NCBI NO: 38344147 NR Description: OSJNBa0041A02.14 [Oryza sativa (japonica
PASCTSKPKQSPELCMFPQYVVPTMRTPLFILNAAYDSWQVKNVLAPSPADPKKTWAQCKLDIKSCSASQLTTLQNFRTDFLAALPKTQSVGMFIDSCNAHCQSGSQDTWLADGSPTVNKTQIGKAVGDWYYDREVPRQIDCPYPCNPTCKNRDDDWSICISSSCYRNENNKGSQRAPVVVDDEL

SEQ ID NO: 18153 - protein, 170 aa, Zea mays subsp. mays
  peptide (1)..(170): Ceres Seq. ID no. 12337598
  misc_feature (1)..(125): Pfam Name: Pectinacetylesterase Pfam Description: Pectinacetylesterase
  misc_feature (1)..(137): Homolog of NCBI NO: 7487997 NR Description: pectin acetylesterase homolog F21E10.11 -
  misc_feature (1)..(137): Homolog of NCBI NO: 18397406 NR Description: pectinacetylesterase, putative
  misc_feature (1)..(137): Homolog of NCBI NO: 6478931 NR Description: putative pectinacetylesterase [Arabidopsis
  misc_feature (1)..(135): Homolog of NCBI NO: 15242357 NR Description: pectinacetylesterase, putative
  misc_feature (1)..(135): Homolog of NCBI NO: 21593445 NR Description: pectin acetylesterase [Arabidopsis thaliana]
  misc_feature (1)..(138): Homolog of NCBI NO: 22328797 NR Description: pectinacetylesterase family; protein id:
  misc_feature (1)..(135): Homolog of NCBI NO: 18415308 NR Description: pectinacetylesterase, putative
  misc_feature (1)..(135): Homolog of NCBI NO: 7488140 NR Description: probable pectin acetylesterase (EC 3.1.1.-) -
  misc_feature (1)..(138): Homolog of NCBI NO: 7488883 NR Description: pectin acetylesterase (EC 3.1.1.-) precursor -
  misc_feature (1)..(141): Homolog of NCBI NO: 38344147 NR Description: OSJNBa0041A02.14 [Oryza sativa (japonica
MFPQYVVPTMRTPLFILNAAYDSWQVKNVLAPSPADPKKTWAQCKLDIKSCSASQLTTLQNFRTDFLAALPKTQSVGMFIDSCNAHCQSGSQDTWLADGSPTVNKTQIGKAVGDWYYDREVPRQIDCPYPCNPTCKNRDDDWSICISSSCYRNENNKGSQRAPVVVDDEL

SEQ ID NO: 18154 - protein, 161 aa, Zea mays subsp. mays
  peptide (1)..(161): Ceres Seq. ID no. 12337599
  misc_feature (1)..(116): Pfam Name: Pectinacetylesterase Pfam Description: Pectinacetylesterase
  misc_feature (1)..(128): Homolog of NCBI NO: 7487997 NR Description: pectin acetylesterase homolog F21E10.11 -
  misc_feature (1)..(128): Homolog of NCBI NO: 18397406 NR Description: pectinacetylesterase, putative
  misc_feature (1)..(128): Homolog of NCBI NO: 6478931 NR Description: putative pectinacetylesterase [Arabidopsis
  misc_feature (1)..(126): Homolog of NCBI NO: 15242357 NR Description: pectinacetylesterase, putative
  misc_feature (1)..(126): Homolog of NCBI NO: 21593445 NR Description: pectin acetylesterase [Arabidopsis thaliana]
  misc_feature (1)..(129): Homolog of NCBI NO: 22328797 NR Description: pectinacetylesterase family; protein id:
  misc_feature (1)..(126): Homolog of NCBI NO: 18415308 NR Description: pectinacetylesterase, putative
  misc_feature (1)..(126): Homolog of NCBI NO: 7488140 NR Description: probable pectin acetylesterase (EC 3.1.1.-) -
  misc_feature (1)..(129): Homolog of NCBI NO: 7488883 NR Description: pectin acetylesterase (EC 3.1.1.-) precursor -
  misc_feature (1)..(132): Homolog of NCBI NO: 38344147 NR Description: OSJNBa0041A02.14 [Oryza sativa (japonica
MRTPLFILNAAYDSWQVKNVLAPSPADPKKTWAQCKLDIKSCSASQLTTLQNFRTDFLAALPKTQSVGMFIDSCNAHCQSGSQDTWLADGSPTVNKTQIGKAVGDWYYDREVPRQIDCPYPCNPTCKNRDDDWSICISSSCYRNENNKGSQRAPVVVDDEL

SEQ ID NO: 18155 - DNA, 658 bp, Zea mays subsp. mays
  misc_feature (1)..(658): Ceres Seq. ID no. 12435220
  misc_feature: MA Experiment ID: 108528 Result: Up-regulated in Transcription
  misc_feature: MA Experiment 108528 PARAMETER Experiment Name: Zm_Imbibed_Seeds_P Parameter: Age (day) Value: 5 vs. 2
  misc_feature: MA Experiment 108528 PARAMETER Experiment Name: Zm_Imbibed_Seeds_P Parameter: Organism Value: Zea mays
  misc_feature: MA Experiment 108528 PARAMETER Experiment Name: Zm_Imbibed_Seeds_P Parameter: Plant Line Value: 35A19
  misc_feature: MA Experiment 108528 PARAMETER Experiment Name: Zm_Imbibed_Seeds_P Parameter: Tissue Value: Aerial vs. Embryo
  misc_feature: MA Experiment ID: 108530 Result: Up-regulated in Transcription
  misc_feature: MA Experiment 108530 PARAMETER Experiment Name: Zm_Imbibed_Seeds_P Parameter: Age (day) Value: 6 vs. 2
  misc_feature: MA Experiment 108530 PARAMETER Experiment Name: Zm_Imbibed_Seeds_P Parameter: Organism Value: Zea mays
  misc_feature: MA Experiment 108530 PARAMETER Experiment Name: Zm_Imbibed_Seeds_P Parameter: Plant Line Value: 35A19
  misc_feature: MA Experiment 108530 PARAMETER Experiment Name: Zm_Imbibed_Seeds_P Parameter: Tissue Value: Aerial vs. Embryo
  misc_feature: MA Experiment ID: 108547 Result: Up-regulated in Transcription
  misc_feature: MA Experiment 108547 PARAMETER Experiment Name: Zm_Imbibed_Seeds_P Parameter: Age (day) Value: 4 vs. 2
  misc_feature: MA Experiment 108547 PARAMETER Experiment Name: Zm_Imbibed_Seeds_P Parameter: Organism Value: Zea mays
  misc_feature: MA Experiment 108547 PARAMETER Experiment Name: Zm_Imbibed_Seeds_P Parameter: Plant Line Value: 35A19
  misc_feature: MA Experiment 108547 PARAMETER Experiment Name: Zm_Imbibed_Seeds_P Parameter: Tissue Value: Aerial vs. Embryo
  misc_feature: MA Experiment ID: 108559 Result: Down-regulated in Transcription
  misc_feature: MA Experiment 108559 PARAMETER Experiment Name: Zm_5mM_NO_P Parameter: Age (day) Value: 8
  misc_feature: MA Experiment 108559 PARAMETER Experiment Name: Zm_5mM_NO_P Parameter: Organism Value: Zea mays
  misc_feature: MA Experiment 108559 PARAMETER Experiment Name: Zm_5mM_NO_P Parameter: Plant Line Value: 35A19
  misc_feature: MA Experiment 108559 PARAMETER Experiment Name: Zm_5mM_NO_P Parameter: Timepoint (hr) Value: 12
  misc_feature: MA Experiment 108559 PARAMETER Experiment Name: Zm_5mM_NO_P Parameter: Tissue Value: Aerial
  misc_feature: MA Experiment 108559 PARAMETER Experiment Name: Zm_5mM_NO_P Parameter: Treatment Value: 5mM NO vs. No Treatment
  misc_feature: MA Experiment ID: 20000488 Result: Up-regulated in Transcription
  misc_feature: MA Experiment 20000488 PARAMETER Experiment Name: Zm_50mM_NH4NO3_L_to_H_P Parameter: Organism Value: Zea mays
  misc_feature: MA Experiment 20000488 PARAMETER Experiment Name: Zm_50mM_NH4NO3_L_to_H_P Parameter: Timepoint (hr) Value: 8
  misc_feature: MA Experiment 20000488 PARAMETER Experiment Name: Zm_50mM_NH4NO3_L_to_H_P Parameter: Tissue Value: Leaves
  misc_feature: MA Experiment 20000488 PARAMETER Experiment Name: Zm_50mM_NH4NO3_L_to_H_P Parameter: Treatment Value: 50mM NH4NO3 vs. 100mM Mannitol
gagctgaacggttctgcttcctcccaatggccttgcaggatggcgacattatcaacatcgacgttactgtctacttaaacggataccatggggacacctcgaggacgtacctgtgcggagaagtcgacgacgcaactaagcagctcgtgaaggtcactgaagagtgcatgatgcgcggcatatcagcctgcaggcacggcgccagtttcaaggaaatcggccagagaataagtgagcacgcggagaagtacggatacggcatcgaccccttcgtggggcacggcgttgggaggatgttccactgcgagcccatcatatggcatacctacgattacgagcccgggttcatggtcgcaggccagacattcaccgtagagccgacgctgtcgatggggagcacgcagtgcgtggtgtgggacgacgggtggacggccgtggcggcggacggcagcctcagcgcgcagttcgagcacaccgtgctggtcaccggcgacggcgcggaggtcctgaccgggttcccgtagctgcctgcacgcatcacgtgagcggtgagcctgggtgggccactgcgtcggcgagggacggaactgcaggagcaggcatgcagctatgcgcacgctgacaattttattaaaaatctatgttggacggttgccgt

SEQ ID NO: 18156 - protein, 173 aa, Zea mays subsp. mays
  peptide (1)..(173): Ceres Seq. ID no. 12435221
  misc_feature (11)..(170): Homolog of NCBI NO: 23018702 NR Description: hypothetical protein [Thermobifida fusca]
  misc_feature (11)..(170): Homolog of NCBI NO: 34394646 NR Description: putative methionine aminopeptidase I (MAP1)
  misc_feature (11)..(170): Homolog of NCBI NO: 25289731 NR Description: methionyl aminopeptidase-like protein
  misc_feature (11)..(170): Homolog of NCBI NO: 18419957 NR Description: methionyl aminopeptidase-like protein; protein
  misc_feature (11)..(170): Homolog of NCBI NO: 7939560 NR Description: methionine aminopeptidase-like protein
  misc_feature (11)..(170): Homolog of NCBI NO: 11320958 NR Description: methionine aminopeptidase-like protein
  misc_feature (11)..(170): Homolog of NCBI NO: 15230872 NR Description: methionine aminopeptidase, putative
  misc_feature (11)..(170): Homolog of NCBI NO: 15222218 NR Description: methionine aminopeptidase I (MAP1), putative
  misc_feature (11)..(170): Homolog of NCBI NO: 11320956 NR Description: methionine aminopeptidase-like protein
  misc_feature (11)..(170): Homolog of NCBI NO: 38345794 NR Description: OSJNBa0085I10.11 [Oryza sativa (japonica
AERFCFLPMALQDGDIINIDVTVYLNGYHGDTSRTYLCGEVDDATKQLVKVTEECMMRGISACRHGASFKEIGQRISEHAEKYGYGIDPFVGHGVGRMFHCEPIIWHTYDYEPGFMVAGQTFTVEPTLSMGSTQCVVWDDGWTAVAADGSLSAQFEHTVLVTGDGAEVLTGFP

SEQ ID NO: 18157 - protein, 165 aa, Zea mays subsp. mays
  peptide (1)..(165): Ceres Seq. ID no. 12435222
  misc_feature (3)..(162): Homolog of NCBI NO: 23018702 NR Description: hypothetical protein [Thermobifida fusca]
  misc_feature (3)..(162): Homolog of NCBI NO: 34394646 NR Description: putative methionine aminopeptidase I (MAP1)
  misc_feature (3)..(162): Homolog of NCBI NO: 25289731 NR Description: methionyl aminopeptidase-like protein
  misc_feature (3)..(162): Homolog of NCBI NO: 18419957 NR Description: methionyl aminopeptidase-like protein; protein
  misc_feature (3)..(162): Homolog of NCBI NO: 7939560 NR Description: methionine aminopeptidase-like protein
  misc_feature (3)..(162): Homolog of NCBI NO: 11320958 NR Description: methionine aminopeptidase-like protein
  misc_feature (3)..(162): Homolog of NCBI NO: 15230872 NR Description: methionine aminopeptidase, putative
  misc_feature (3)..(162): Homolog of NCBI NO: 15222218 NR Description: methionine aminopeptidase I (MAP1), putative
  misc_feature (3)..(162): Homolog of NCBI NO: 11320956 NR Description: methionine aminopeptidase-like protein
  misc_feature (3)..(162): Homolog of NCBI NO: 38345794 NR Description: OSJNBa0085I10.11 [Oryza sativa (japonica
MALQDGDIINIDVTVYLNGYHGDTSRTYLCGEVDDATKQLVKVTEECMMRGISACRHGASFKEIGQRISEHAEKYGYGIDPFVGHGVGRMFHCEPIIWHTYDYEPGFMVAGQTFTVEPTLSMGSTQCVVWDDGWTAVAADGSLSAQFEHTVLVTGDGAEVLTGFP

SEQ ID NO: 18158 - protein, 118 aa, Zea mays subsp. mays
  peptide (1)..(118): Ceres Seq. ID no. 12435223
  misc_feature (1)..(115): Homolog of NCBI NO: 11320958 NR Description: methionine aminopeptidase-like protein
  misc_feature (1)..(115): Homolog of NCBI NO: 15230872 NR Description: methionine aminopeptidase, putative
  misc_feature (1)..(115): Homolog of NCBI NO: 15222218 NR Description: methionine aminopeptidase I (MAP1), putative
  misc_feature (1)..(115): Homolog of NCBI NO: 11320956 NR Description: methionine aminopeptidase-like protein
  misc_feature (1)..(115): Homolog of NCBI NO: 38345794 NR Description: OSJNBa0085I10.11 [Oryza sativa (japonica
  misc_feature (1)..(115): Homolog of NCBI NO: 18419957 NR Description: methionyl aminopeptidase-like protein; protein
  misc_feature (1)..(115): Homolog of NCBI NO: 7939560 NR Description: methionine aminopeptidase-like protein
  misc_feature (1)..(115): Homolog of NCBI NO: 23018702 NR Description: hypothetical protein [Thermobifida fusca]
  misc_feature (1)..(115): Homolog of NCBI NO: 34394646 NR Description: putative methionine aminopeptidase I (MAP1)
  misc_feature (1)..(115): Homolog of NCBI NO: 25289731 NR Description: methionyl aminopeptidase-like protein
MMRGISACRHGASFKEIGQRISEHAEKYGYGIDPFVGHGVGRMFHCEPIIWHTYDYEPGFMVAGQTFTVEPTLSMGSTQCVVWDDGWTAVAADGSLSAQFEHTVLVTGDGAEVLTGFP

SEQ ID NO: 18159 - DNA, 760 bp, Zea mays subsp. mays
  misc_feature (1)..(760): Ceres Seq. ID no. 12416334
  misc_feature: MA Experiment ID: 108503 Result: Up-regulated in Transcription
  misc_feature: MA Experiment 108503 PARAMETER Experiment Name: Zm_Drought_P Parameter: Age (day) Value: 8
  misc_feature: MA Experiment 108503 PARAMETER Experiment Name: Zm_Drought_P Parameter: Organism Value: Zea mays
  misc_feature: MA Experiment 108503 PARAMETER Experiment Name: Zm_Drought_P Parameter: Plant Line Value: 35A19
  misc_feature: MA Experiment 108503 PARAMETER Experiment Name: Zm_Drought_P Parameter: Timepoint (hr) Value: 6
  misc_feature: MA Experiment 108503 PARAMETER Experiment Name: Zm_Drought_P Parameter: Tissue Value: Aerial
  misc_feature: MA Experiment 108503 PARAMETER Experiment Name: Zm_Drought_P Parameter: Treatment Value: Drought vs. No Drought
  misc_feature: MA Experiment ID: 108504 Result: Up-regulated in Transcription
  misc_feature: MA Experiment 108504 PARAMETER Experiment Name: Zm_Drought_P Parameter: Age (day) Value: 8
  misc_feature: MA Experiment 108504 PARAMETER Experiment Name: Zm_Drought_P Parameter: Organism Value: Zea mays
  misc_feature: MA Experiment 108504 PARAMETER Experiment Name: Zm_Drought_P Parameter: Plant Line Value: 35A19
  misc_feature: MA Experiment 108504 PARAMETER Experiment Name: Zm_Drought_P Parameter: Timepoint (hr) Value: 12
  misc_feature: MA Experiment 108504 PARAMETER Experiment Name: Zm_Drought_P Parameter: Tissue Value: Aerial
  misc_feature: MA Experiment 108504 PARAMETER Experiment Name: Zm_Drought_P Parameter: Treatment Value: Drought vs. No Drought
  misc_feature: MA Experiment ID: 108522 Result: Up-regulated in Transcription
  misc_feature: MA Experiment 108522 PARAMETER Experiment Name: Zm_42deg_Heat_P Parameter: Age (day) Value: 8
  misc_feature: MA Experiment 108522 PARAMETER Experiment Name: Zm_42deg_Heat_P Parameter: Organism Value: Zea mays
  misc_feature: MA Experiment 108522 PARAMETER Experiment Name: Zm_42deg_Heat_P Parameter: Plant Line Value: 35A19
  misc_feature: MA Experiment 108522 PARAMETER Experiment Name: Zm_42deg_Heat_P Parameter: Temperature (deg C) Value: 42 vs. 22
  misc_feature: MA Experiment 108522 PARAMETER Experiment Name: Zm_42deg_Heat_P Parameter: Timepoint (hr) Value: 1
  misc_feature: MA Experiment 108522 PARAMETER Experiment Name: Zm_42deg_Heat_P Parameter: Tissue Value: Aerial
  misc_feature: MA Experiment ID: 108527 Result: Up-regulated in Transcription
  misc_feature: MA Experiment 108527 PARAMETER Experiment Name: Zm_5mM_NO_P Parameter: Age (day) Value: 8
  misc_feature: MA Experiment 108527 PARAMETER Experiment Name: Zm_5mM_NO_P Parameter: Organism Value: Zea mays
  misc_feature: MA Experiment 108527 PARAMETER Experiment Name: Zm_5mM_NO_P Parameter: Plant Line Value: 35A19
  misc_feature: MA Experiment 108527 PARAMETER Experiment Name: Zm_5mM_NO_P Parameter: Timepoint (hr) Value: 6
  misc_feature: MA Experiment 108527 PARAMETER Experiment Name: Zm_5mM_NO_P Parameter: Tissue Value: Aerial
  misc_feature: MA Experiment 108527 PARAMETER Experiment Name: Zm_5mM_NO_P Parameter: Treatment Value: 5mM NO vs. No Treatment
  misc_feature: MA Experiment ID: 108534 Result: Up-regulated in Transcription
  misc_feature: MA Experiment 108534 PARAMETER Experiment Name: Zm_4deg_Cold_P Parameter: Age (hr) Value: 8
  misc_feature: MA Experiment 108534 PARAMETER Experiment Name: Zm_4deg_Cold_P Parameter: Organism Value: Zea mays
  misc_feature: MA Experiment 108534 PARAMETER Experiment Name: Zm_4deg_Cold_P Parameter: Plant Line Value: 35A19
  misc_feature: MA Experiment 108534 PARAMETER Experiment Name: Zm_4deg_Cold_P Parameter: Temperature (deg C) Value: 4 vs. 22
  misc_feature: MA Experiment 108534 PARAMETER Experiment Name: Zm_4deg_Cold_P Parameter: Timepoint (hr) Value: 6
  misc_feature: MA Experiment 108534 PARAMETER Experiment Name: Zm_4deg_Cold_P Parameter: Tissue Value: Aerial
  misc_feature: MA Experiment ID: 108535 Result: Down-regulated in Transcription
  misc_feature: MA Experiment 108535 PARAMETER Experiment Name: Zm_Meristem_P Parameter: Age (day) Value: 8
  misc_feature: MA Experiment 108535 PARAMETER Experiment Name: Zm_Meristem_P Parameter: Organism Value: Zea mays
  misc_feature: MA Experiment 108535 PARAMETER Experiment Name: Zm_Meristem_P Parameter: Plant Line Value: 35A19
  misc_feature: MA Experiment 108535 PARAMETER Experiment Name: Zm_Meristem_P Parameter: Tissue Value: Root Meristem vs. Above Root Meristem
  misc_feature: MA Experiment ID: 108539 Result: Up-regulated in Transcription
  misc_feature: MA Experiment 108539 PARAMETER Experiment Name: Zm_20percent_PEG_P Parameter: Age (day) Value: 8
  misc_feature: MA Experiment 108539 PARAMETER Experiment Name: Zm_20percent_PEG_P Parameter: Organism Value: Zea mays
  misc_feature: MA Experiment 108539 PARAMETER Experiment Name: Zm_20percent_PEG_P Parameter: Plant Line Value: 35A19
  misc_feature: MA Experiment 108539 PARAMETER Experiment Name: Zm_20percent_PEG_P Parameter: Timepoint (hr) Value: 1
  misc_feature: MA Experiment 108539 PARAMETER Experiment Name: Zm_20percent_PEG_P Parameter: Tissue Value: Aerial
  misc_feature: MA Experiment 108539 PARAMETER Experiment Name: Zm_20percent_PEG_P Parameter: Treatment Value: 20percent PEG vs. No Treatment
  misc_feature: MA Experiment ID: 108540 Result: Up-regulated in Transcription
  misc_feature: MA Experiment 108540 PARAMETER Experiment Name: Zm_20percent_PEG_P Parameter: Age (day) Value: 8
  misc_feature: MA Experiment 108540 PARAMETER Experiment Name: Zm_20percent_PEG_P Parameter: Organism Value: Zea mays
  misc_feature: MA Experiment 108540 PARAMETER Experiment Name: Zm_20percent_PEG_P Parameter: Plant Line Value: 35A19
  misc_feature: MA Experiment 108540 PARAMETER Experiment Name: Zm_20percent_PEG_P Parameter: Timepoint (hr) Value: 6
  misc_feature: MA Experiment 108540 PARAMETER Experiment Name: Zm_20percent_PEG_P Parameter: Tissue Value: Aerial
  misc_feature: MA Experiment 108540 PARAMETER Experiment Name: Zm_20percent_PEG_P Parameter: Treatment Value: 20percent PEG vs. No Treatment
  misc_feature: MA Experiment ID: 108542 Result: Up-regulated in Transcription
  misc_feature: MA Experiment 108542 PARAMETER Experiment Name: Zm_150mM_NaCl_P Parameter: Age (day) Value: 8
  misc_feature: MA Experiment 108542 PARAMETER Experiment Name: Zm_150mM_NaCl_P Parameter: Organism Value: Zea mays
  misc_feature: MA Experiment 108542 PARAMETER Experiment Name: Zm_150mM_NaCl_P Parameter: Plant Line Value: 35A19
  misc_feature: MA Experiment 108542 PARAMETER Experiment Name: Zm_150mM_NaCl_P Parameter: Timepoint (hr) Value: 6
  misc_feature: MA Experiment 108542 PARAMETER Experiment Name: Zm_150mM_NaCl_P Parameter: Tissue Value: Aerial
  misc_feature: MA Experiment 108542 PARAMETER Experiment Name: Zm_150mM_NaCl_P Parameter: Treatment Value: 150mM NaCl vs. No Treatment
  misc_feature: MA Experiment ID: 108556 Result: Up-regulated in Transcription
  misc_feature: MA Experiment 108556 PARAMETER Experiment Name: Zm_Drought_P Parameter: Age (day) Value: 9
  misc_feature: MA Experiment 108556 PARAMETER Experiment Name: Zm_Drought_P Parameter: Organism Value: Zea mays
  misc_feature: MA Experiment 108556 PARAMETER Experiment Name: Zm_Drought_P Parameter: Plant Line Value: 35A19
  misc_feature: MA Experiment 108556 PARAMETER Experiment Name: Zm_Drought_P Parameter: Timepoint (hr) Value: 24
  misc_feature: MA Experiment 108556 PARAMETER Experiment Name: Zm_Drought_P Parameter: Tissue Value: Aerial
  misc_feature: MA Experiment 108556 PARAMETER Experiment Name: Zm_Drought_P Parameter: Treatment Value: Drought vs. No Drought
  misc_feature: MA Experiment ID: 108687 Result: Up-regulated in Transcription
  misc_feature: MA Experiment 108687 PARAMETER Experiment Name: Zm_Embryos-Flowers__P Parameter: Tissue Value: Embryo vs. Aerial+
  misc_feature: MA Experiment ID: 108689 Result: Up-regulated in Transcription
  misc_feature: MA Experiment 108689 PARAMETER Experiment Name: Zm_Drought_Roots_P Parameter: Age (day) Value: 9
  misc_feature: MA Experiment 108689 PARAMETER Experiment Name: Zm_Drought_Roots_P Parameter: Organism Value: Zea mays
  misc_feature: MA Experiment 108689 PARAMETER Experiment Name: Zm_Drought_Roots_P Parameter: Plant Line Value: 35A19
  misc_feature: MA Experiment 108689 PARAMETER Experiment Name: Zm_Drought_Roots_P Parameter: Timepoint (hr) Value: 24
  misc_feature: MA Experiment 108689 PARAMETER Experiment Name: Zm_Drought_Roots_P Parameter: Tissue Value: Roots
  misc_feature: MA Experiment 108689 PARAMETER Experiment Name: Zm_Drought_Roots_P Parameter: Treatment Value: Drought vs. No Drought
  misc_feature: MA Experiment ID: 20000480 Result: Up-regulated in Transcription
  misc_feature: MA Experiment 20000480 PARAMETER Experiment Name: Zm_Drought_P Parameter: Age (day) Value: 11
  misc_feature: MA Experiment 20000480 PARAMETER Experiment Name: Zm_Drought_P Parameter: Organism Value: Zea mays
  misc_feature: MA Experiment 20000480 PARAMETER Experiment Name: Zm_Drought_P Parameter: Plant Line Value: 35A19
  misc_feature: MA Experiment 20000480 PARAMETER Experiment Name: Zm_Drought_P Parameter: Timepoint (hr) Value: 72
  misc_feature: MA Experiment 20000480 PARAMETER Experiment Name: Zm_Drought_P Parameter: Tissue Value: Aerial
  misc_feature: MA Experiment 20000480 PARAMETER Experiment Name: Zm_Drought_P Parameter: Treatment Value: Drought vs. No Drought
  misc_feature: MA Experiment ID: 20000629 Result: Down-regulated in Transcription
  misc_feature: MA Experiment 20000629 PARAMETER Experiment Name: Zm_Herbicide-Treatments_P Parameter: Timepoint (hr) Value: 12
  misc_feature: MA Experiment 20000629 PARAMETER Experiment Name: Zm_Herbicide-Treatments_P Parameter: Tissue Value: Aerial
  misc_feature: MA Experiment 20000629 PARAMETER Experiment Name: Zm_Herbicide-Treatments_P Parameter: Treatment Value: Trimec vs. No Treatment
  misc_feature: MA Experiment ID: 20000630 Result: Up-regulated in Transcription
  misc_feature: MA Experiment 20000630 PARAMETER Experiment Name: Zm_Herbicide-Treatments_P Parameter: Timepoint (hr) Value: 4
  misc_feature: MA Experiment 20000630 PARAMETER Experiment Name: Zm_Herbicide-Treatments_P Parameter: Tissue Value: Aerial
  misc_feature: MA Experiment 20000630 PARAMETER Experiment Name: Zm_Herbicide-Treatments_P Parameter: Treatment Value: Roundup vs. No Treatment
acatcgcactctcctccagcctccaggcttggcaagcgtgcttcacatgaccacatccatgtcgaacagcgccgctagcgagaagcaatcgcagcaggcaggccacaggcagcggcccccggcggcgtcggccgcggacgcggagatgcagagggtgttctgccgcatcgacgcggacggcgacggccggatctccgcctcggagctggccgcggtgacgcgcgccatctccccgccagcgagctcctcgcacgggcgccgcgaggtggccgccatgatggacgagctggacacggaccgcgacggcttcgtggacctcggcgagttcagggcgttccacgcgcgcggcggcggcggcgtggacgacgacgccgagctccgcgccgccttcgacgtctacgacgtcgacggcgacggccgcgtcacggcggccgagctgggcaaggtgctcgcgcgcatcggcgagggcggatgcagcgccgaggagtgcgagcgggatggtcgccggcgtcgacgccgacggctgcgtcgggttcgaggacttcaagaagatgatgtgcccccagccgcaagccgaagccggcgccgccgggcgggacaaggcagaggccgaggccgaggacaaggaggagtgacgggtgtagtcaggggggaacgggaacggctggagttgtttgcgtctcgcgttcttttcacctgtacgcaggaaatactcctcctgcataagactacngnacttttggataaaaaattttatttc

SEQ ID NO: 18160 - protein, 253 aa, Zea mays subsp. mays
  peptide (1)..(253): Ceres Seq. ID no. 12416335
  misc_feature (125)..(153): Pfam Name: EF hand Pfam Description: EF hand
  misc_feature (44)..(165): Homolog of NCBI NO: 15219514 NR Description: putative calmodulin
  misc_feature (48)..(155): Homolog of NCBI NO: 14423648 NR Description: Calcium-binding allergen Ole e 8 (PCA18/PCA23)
  misc_feature (48)..(165): Homolog of NCBI NO: 15221030 NR Description: calcium-binding protein, putative
  misc_feature (48)..(165): Homolog of NCBI NO: 21618074 NR Description: calmodulin-related protein [Arabidopsis thaliana]
  misc_feature (48)..(165): Homolog of NCBI NO: 18408502 NR Description: calmodulin-related protein
  misc_feature (48)..(155): Homolog of NCBI NO: 6901654 NR Description: calcium-binding protein [Olea europaea]
  misc_feature (42)..(165): Homolog of NCBI NO: 19386815 NR Description: B1147A04.10 [Oryza sativa (japonica
  misc_feature (48)..(165): Homolog of NCBI NO: 15240340 NR Description: CALMODULIN-RELATED PROTEIN 2, TOUCH-INDUCED (TCH2)
  misc_feature (21)..(163): Homolog of NCBI NO: 14589311 NR Description: calcium binding protein [Sesbania rostrata]
  misc_feature (14)..(165): Homolog of NCBI NO: 34895640 NR Description: OSJNBa0083M16.33 [Oryza sativa (japonica
  misc_feature (244)..(244): Xaa is any aa, unknown or other
  misc_feature (245)..(245): Xaa is any aa, unknown or other
HRTLLQPPGLASVLHMTTSMSNSAASEKQSQQAGHRQRPPAASAADAEMQRVFCRIDADGDGRISASELAAVTRAISPPASSSHGRREVAAMMDELDTDRDGFVDLGEFRAFHARGGGGVDDDAELRAAFDVYDVDGDGRVTAAELGKVLARIGEGGCSAEECERDGRRRRRRRLRRVRGLQEDDVPPAASRSRRRRAGQGRGRGRGQGGVTGVVRGERERLELFASRVLFTCTQEILLLHKTXXLLDKKFYF

SEQ ID NO: 18161 - protein, 238 aa, Zea mays subsp. mays
  peptide (1)..(238): Ceres Seq. ID no. 12416336
  misc_feature (110)..(138): Pfam Name: EF hand Pfam Description: EF hand
  misc_feature (29)..(150): Homolog of NCBI NO: 15219514 NR Description: putative calmodulin
  misc_feature (33)..(140): Homolog of NCBI NO: 14423648 NR Description: Calcium-binding allergen Ole e 8 (PCA18/PCA23)
  misc_feature (33)..(150): Homolog of NCBI NO: 15221030 NR Description: calcium-binding protein, putative
  misc_feature (33)..(150): Homolog of NCBI NO: 21618074 NR Description: calmodulin-related protein [Arabidopsis thaliana]
  misc_feature (33)..(150): Homolog of NCBI NO: 18408502 NR Description: calmodulin-related protein
  misc_feature (33)..(140): Homolog of NCBI NO: 6901654 NR Description: calcium-binding protein [Olea europaea]
  misc_feature (27)..(150): Homolog of NCBI NO: 19386815 NR Description: B1147A04.10 [Oryza sativa (japonica
  misc_feature (33)..(150): Homolog of NCBI NO: 15240340 NR Description: CALMODULIN-RELATED PROTEIN 2, TOUCH-INDUCED (TCH2)
  misc_feature (6)..(148): Homolog of NCBI NO: 14589311 NR Description: calcium binding protein [Sesbania rostrata]
  misc_feature (1)..(150): Homolog of NCBI NO: 34895640 NR Description: OSJNBa0083M16.33 [Oryza sativa (japonica
  misc_feature (229)..(229): Xaa is any aa, unknown or other
  misc_feature (230)..(230): Xaa is any aa, unknown or other
MTTSMSNSAASEKQSQQAGHRQRPPAASAADAEMQRVFCRIDADGDGRISASELAAVTRAISPPASSSHGRREVAAMMDELDTDRDGFVDLGEFRAFHARGGGGVDDDAELRAAFDVYDVDGDGRVTAAELGKVLARIGEGGCSAEECERDGRRRRRRRLRRVRGLQEDDVPPAASRSRRRRAGQGRGRGRGQGGVTGVVRGERERLELFASRVLFTCTQEILLLHKTXXLLDKKFYF

SEQ ID NO: 18162 - protein, 234 aa, Zea mays subsp. mays
  peptide (1)..(234): Ceres Seq. ID no. 12416337
  misc_feature (106)..(134): Pfam Name: EF hand Pfam Description: EF hand
  misc_feature (25)..(146): Homolog of NCBI NO: 15219514 NR Description: putative calmodulin
  misc_feature (29)..(136): Homolog of NCBI NO: 14423648 NR Description: Calcium-binding allergen Ole e 8 (PCA18/PCA23)
  misc_feature (29)..(146): Homolog of NCBI NO: 15221030 NR Description: calcium-binding protein, putative
  misc_feature (29)..(146): Homolog of NCBI NO: 21618074 NR Description: calmodulin-related protein [Arabidopsis thaliana]
  misc_feature (29)..(146): Homolog of NCBI NO: 18408502 NR Description: calmodulin-related protein
  misc_feature (29)..(136): Homolog of NCBI NO: 6901654 NR Description: calcium-binding protein [Olea europaea]
  misc_feature (23)..(146): Homolog of NCBI NO: 19386815 NR Description: B1147A04.10 [Oryza sativa (japonica
  misc_feature (29)..(146): Homolog of NCBI NO: 15240340 NR Description: CALMODULIN-RELATED PROTEIN 2, TOUCH-INDUCED (TCH2)
  misc_feature (2)..(144): Homolog of NCBI NO: 14589311 NR Description: calcium binding protein [Sesbania rostrata]
  misc_feature (1)..(146): Homolog of NCBI NO: 34895640 NR Description: OSJNBa0083M16.33 [Oryza sativa (japonica
  misc_feature (225)..(225): Xaa is any aa, unknown or other
  misc_feature (226)..(226): Xaa is any aa, unknown or other
MSNSAASEKQSQQAGHRQRPPAASAADAEMQRVFCRIDADGDGRISASELAAVTRAISPPASSSHGRREVAAMMDELDTDRDGFVDLGEFRAFHARGGGGVDDDAELRAAFDVYDVDGDGRVTAAELGKVLARIGEGGCSAEECERDGRRRRRRRLRRVRGLQEDDVPPAASRSRRRRAGQGRGRGRGQGGVTGVVRGERERLELFASRVLFTCTQEILLLHKTXXLLDKKFYF

SEQ ID NO: 18163 - DNA, 765 bp, Zea mays subsp. mays
  misc_feature (1)..(765): Ceres Seq. ID no. 12367201
  misc_feature: MA Experiment ID: 108527 Result: Down-regulated in Transcription
  misc_feature: MA Experiment 108527 PARAMETER Experiment Name: Zm_5mM_NO_P Parameter: Age (day) Value: 8
  misc_feature: MA Experiment 108527 PARAMETER Experiment Name: Zm_5mM_NO_P Parameter: Organism Value: Zea mays
  misc_feature: MA Experiment 108527 PARAMETER Experiment Name: Zm_5mM_NO_P Parameter: Plant Line Value: 35A19
  misc_feature: MA Experiment 108527 PARAMETER Experiment Name: Zm_5mM_NO_P Parameter: Timepoint (hr) Value: 6
  misc_feature: MA Experiment 108527 PARAMETER Experiment Name: Zm_5mM_NO_P Parameter: Tissue Value: Aerial
  misc_feature: MA Experiment 108527 PARAMETER Experiment Name: Zm_5mM_NO_P Parameter: Treatment Value: 5mM NO vs. No Treatment
  misc_feature: MA Experiment ID: 108530 Result: Up-regulated in Transcription
  misc_feature: MA Experiment 108530 PARAMETER Experiment Name: Zm_Imbibed_Seeds_P Parameter: Age (day) Value: 6 vs. 2
  misc_feature: MA Experiment 108530 PARAMETER Experiment Name: Zm_Imbibed_Seeds_P Parameter: Organism Value: Zea mays
  misc_feature: MA Experiment 108530 PARAMETER Experiment Name: Zm_Imbibed_Seeds_P Parameter: Plant Line Value: 35A19
  misc_feature: MA Experiment 108530 PARAMETER Experiment Name: Zm_Imbibed_Seeds_P Parameter: Tissue Value: Aerial vs. Embryo
  misc_feature: MA Experiment ID: 108534 Result: Up-regulated in Transcription
  misc_feature: MA Experiment 108534 PARAMETER Experiment Name: Zm_4deg_Cold_P Parameter: Age (hr) Value: 8
  misc_feature: MA Experiment 108534 PARAMETER Experiment Name: Zm_4deg_Cold_P Parameter: Organism Value: Zea mays
  misc_feature: MA Experiment 108534 PARAMETER Experiment Name: Zm_4deg_Cold_P Parameter: Plant Line Value: 35A19
  misc_feature: MA Experiment 108534 PARAMETER Experiment Name: Zm_4deg_Cold_P Parameter: Temperature (deg C) Value: 4 vs. 22
  misc_feature: MA Experiment 108534 PARAMETER Experiment Name: Zm_4deg_Cold_P Parameter: Timepoint (hr) Value: 6
  misc_feature: MA Experiment 108534 PARAMETER Experiment Name: Zm_4deg_Cold_P Parameter: Tissue Value: Aerial
  misc_feature: MA Experiment ID: 108544 Result: Up-regulated in Transcription
gcacgagaccattacctagaacatcctaatcaaaaaggaacccactccaactgtgcggcgcgtccaaaaatacaaaaggcaagcgagcgagctccaagttcggctgctccaatttcactcggcatggctcctcaggcgtgggtcgtggcggagaacggcgaggacctccaacaacccagggaattcctgccgctctctaagcttgaagatgttggcgtgttgtattggcatttggaccctaagaagtctgaaagcgaggaggaactagcaaaaatccgcagagacagaggctacagttacatggatcttattgagatatgtcccgacaaactggaaaactatgaggagaaggtgaagaacttcttctgtgagcacatgcacgctgacgaagagatccgctattgcttggagggcagcgggtactttgacgtccgcgacaaagatgacaagtggattcgaattcggataagagaaggagacatgatcatcctaccagctggaatttatcatcggttcaccctcgacagcgctaaatacacgaagctcatgaggcttttcattggggaaccagtctggaccgcgttaaaccgccctcaggaggaccacccggcgaggcaagagtatgtcaagaatgtgagtgcgggcactggatttgctcttgcagcacactgaatatgttttttccctttcccgtgtataagaatatatggtcacttggattcatgtaccacgtcatagtatcatcatatggtatgacgcaaccgc

SEQ ID NO: 18164 - protein, 223 aa, Zea mays subsp. mays
  peptide (1)..(223): Ceres Seq. ID no. 12367202
  misc_feature (45)..(193): Pfam Name: ARD/ARD' family Pfam Description: ARD/ARD' family
  misc_feature (45)..(217): Homolog of NCBI NO: 7489558 NR Description: probable submergence induced protein 2 - rice
  misc_feature (45)..(212): Homolog of NCBI NO: 34902616 NR Description: Putative probable submergence induced,
  misc_feature (45)..(211): Homolog of NCBI NO: 18414293 NR Description: Expressed protein
  misc_feature (45)..(222): Homolog of NCBI NO: 18414289 NR Description: Expressed protein
  misc_feature (45)..(212): Homolog of NCBI NO: 14522834 NR Description: iron-deficiency induced gene [Hordeum vulgare]
  misc_feature (45)..(212): Homolog of NCBI NO: 7489559 NR Description: probable submergence induced, nickel-binding
  misc_feature (45)..(223): Homolog of NCBI NO: 10177955 NR Description: gene_id:MQD19.21~pir||T02918~similar to unknown
  misc_feature (42)..(223): Homolog of NCBI NO: 18422379 NR Description: putative protein
  misc_feature (42)..(223): Homolog of NCBI NO: 21554849 NR Description: submergence induced protein 2A [Arabidopsis
  misc_feature (42)..(223): Homolog of NCBI NO: 37534410 NR Description: putative heat shock protein
ARDHYLEHPNQKGTHSNCAARPKIQKASERAPSSAAPISLGMAPQAWVVAENGEDLQQPREFLPLSKLEDVGVLYWHLDPKKSESEEELAKIRRDRGYSYMDLIEICPDKLENYEEKVKNFFCEHMHADEEIRYCLEGSGYFDVRDKDDKWIRIRIREGDMIILPAGIYHRFTLDSAKYTKLMRLFIGEPVWTALNRPQEDHPARQEYVKNVSAGTGFALAAH

SEQ ID NO: 18165 - protein, 182 aa, Zea mays subsp. mays
  peptide (1)..(182): Ceres Seq. ID no. 12367203
  misc_feature (4)..(152): Pfam Name: ARD/ARD' family Pfam Description: ARD/ARD' family
  misc_feature (4)..(176): Homolog of NCBI NO: 7489558 NR Description: probable submergence induced protein 2 - rice
  misc_feature (4)..(171): Homolog of NCBI NO: 34902616 NR Description: Putative probable submergence induced,
  misc_feature (4)..(170): Homolog of NCBI NO: 18414293 NR Description: Expressed protein
  misc_feature (4)..(181): Homolog of NCBI NO: 18414289 NR Description: Expressed protein
  misc_feature (4)..(171): Homolog of NCBI NO: 14522834 NR Description: iron-deficiency induced gene [Hordeum vulgare]
  misc_feature (4)..(171): Homolog of NCBI NO: 7489559 NR Description: probable submergence induced, nickel-binding
  misc_feature (4)..(182): Homolog of NCBI NO: 10177955 NR Description: gene_id:MQD19.21~pir||T02918~similar to unknown
  misc_feature (1)..(182): Homolog of NCBI NO: 18422379 NR Description: putative protein
  misc_feature (1)..(182): Homolog of NCBI NO: 21554849 NR Description: submergence induced protein 2A [Arabidopsis
  misc_feature (1)..(182): Homolog of NCBI NO: 37534410 NR Description: putative heat shock protein
MAPQAWVVAENGEDLQQPREFLPLSKLEDVGVLYWHLDPKKSESEEELAKIRRDRGYSYMDLIEICPDKLENYEEKVKNFFCEHMHADEEIRYCLEGSGYFDVRDKDDKWIRIRIREGDMIILPAGIYHRFTLDSAKYTKLMRLFIGEPVWTALNRPQEDHPARQEYVKNVSAGTGFALAAH

SEQ ID NO: 18166 - protein, 123 aa, Zea mays subsp. mays
  peptide (1)..(123): Ceres Seq. ID no. 12367204
  misc_feature (1)..(93): Pfam Name: ARD/ARD' family Pfam Description: ARD/ARD' family
  misc_feature (1)..(117): Homolog of NCBI NO: 7489558 NR Description: probable submergence induced protein 2 - rice
  misc_feature (1)..(112): Homolog of NCBI NO: 34902616 NR Description: Putative probable submergence induced,
  misc_feature (1)..(111): Homolog of NCBI NO: 18414293 NR Description: Expressed protein
  misc_feature (1)..(122): Homolog of NCBI NO: 18414289 NR Description: Expressed protein
  misc_feature (1)..(112): Homolog of NCBI NO: 14522834 NR Description: iron-deficiency induced gene [Hordeum vulgare]
  misc_feature (1)..(112): Homolog of NCBI NO: 7489559 NR Description: probable submergence induced, nickel-binding
  misc_feature (1)..(123): Homolog of NCBI NO: 10177955 NR Description: gene_id:MQD19.21~pir||T02918~similar to unknown
  misc_feature (1)..(123): Homolog of NCBI NO: 18422379 NR Description: putative protein
  misc_feature (1)..(123): Homolog of NCBI NO: 21554849 NR Description: submergence induced protein 2A [Arabidopsis
  misc_feature (1)..(123): Homolog of NCBI NO: 37534410 NR Description: putative heat shock protein
MDLIEICPDKLENYEEKVKNFFCEHMHADEEIRYCLEGSGYFDVRDKDDKWIRIRIREGDMIILPAGIYHRFTLDSAKYTKLMRLFIGEPVWTALNRPQEDHPARQEYVKNVSAGTGFALAAH

SEQ ID NO: 18167 - DNA, 1042 bp, Zea mays subsp. mays
  misc_feature (1)..(1042): Ceres Seq. ID no. 12416568
  misc_feature: MA Experiment ID: 108529 Result: Up-regulated in Transcription
  misc_feature: MA Experiment 108529 PARAMETER Experiment Name: Zm_Imbibed_Seeds_P Parameter: Age (day) Value: 5 vs. 2
  misc_feature: MA Experiment 108529 PARAMETER Experiment Name: Zm_Imbibed_Seeds_P Parameter: Organism Value: Zea mays
  misc_feature: MA Experiment 108529 PARAMETER Experiment Name: Zm_Imbibed_Seeds_P Parameter: Plant Line Value: 35A19
  misc_feature: MA Experiment 108529 PARAMETER Experiment Name: Zm_Imbibed_Seeds_P Parameter: Tissue Value: Roots vs. Embryo
  misc_feature: MA Experiment ID: 108530 Result: Up-regulated in Transcription
  misc_feature: MA Experiment 108530 PARAMETER Experiment Name: Zm_Imbibed_Seeds_P Parameter: Age (day) Value: 6 vs. 2
  misc_feature: MA Experiment 108530 PARAMETER Experiment Name: Zm_Imbibed_Seeds_P Parameter: Organism Value: Zea mays
  misc_feature: MA Experiment 108530 PARAMETER Experiment Name: Zm_Imbibed_Seeds_P Parameter: Plant Line Value: 35A19
  misc_feature: MA Experiment 108530 PARAMETER Experiment Name: Zm_Imbibed_Seeds_P Parameter: Tissue Value: Aerial vs. Embryo
  misc_feature: MA Experiment ID: 108534 Result: Down-regulated in Transcription
  misc_feature: MA Experiment 108534 PARAMETER Experiment Name: Zm_4deg_Cold_P Parameter: Age (hr) Value: 8
  misc_feature: MA Experiment 108534 PARAMETER Experiment Name: Zm_4deg_Cold_P Parameter: Organism Value: Zea mays
  misc_feature: MA Experiment 108534 PARAMETER Experiment Name: Zm_4deg_Cold_P Parameter: Plant Line Value: 35A19
  misc_feature: MA Experiment 108534 PARAMETER Experiment Name: Zm_4deg_Cold_P Parameter: Temperature (deg C) Value: 4 vs. 22
  misc_feature: MA Experiment 108534 PARAMETER Experiment Name: Zm_4deg_Cold_P Parameter: Timepoint (hr) Value: 6
  misc_feature: MA Experiment 108534 PARAMETER Experiment Name: Zm_4deg_Cold_P Parameter: Tissue Value: Aerial
  misc_feature: MA Experiment ID: 108689 Result: Down-regulated in Transcription
  misc_feature: MA Experiment 108689 PARAMETER Experiment Name: Zm_Drought_Roots_P Parameter: Age (day) Value: 9
  misc_feature: MA Experiment 108689 PARAMETER Experiment Name: Zm_Drought_Roots_P Parameter: Organism Value: Zea mays
  misc_feature: MA Experiment 108689 PARAMETER Experiment Name: Zm_Drought_Roots_P Parameter: Plant Line Value: 35A19
  misc_feature: MA Experiment 108689 PARAMETER Experiment Name: Zm_Drought_Roots_P Parameter: Timepoint (hr) Value: 24
  misc_feature: MA Experiment 108689 PARAMETER Experiment Name: Zm_Drought_Roots_P Parameter: Tissue Value: Roots
  misc_feature: MA Experiment 108689 PARAMETER Experiment Name: Zm_Drought_Roots_P Parameter: Treatment Value: Drought vs. No Drought
  misc_feature: MA Experiment ID: 20000479 Result: Down-regulated in Transcription
  misc_feature: MA Experiment 20000479 PARAMETER Experiment Name: Zm_Drought_P Parameter: Age (day) Value: 10
  misc_feature: MA Experiment 20000479 PARAMETER Experiment Name: Zm_Drought_P Parameter: Organism Value: Zea mays
  misc_feature: MA Experiment 20000479 PARAMETER Experiment Name: Zm_Drought_P Parameter: Plant Line Value: 35A19
  misc_feature: MA Experiment 20000479 PARAMETER Experiment Name: Zm_Drought_P Parameter: Timepoint (hr) Value: 48
  misc_feature: MA Experiment 20000479 PARAMETER Experiment Name: Zm_Drought_P Parameter: Tissue Value: Aerial
  misc_feature: MA Experiment 20000479 PARAMETER Experiment Name: Zm_Drought_P Parameter: Treatment Value: Drought vs. No Drought
  misc_feature: MA Experiment ID: 20000480 Result: Down-regulated in Transcription
  misc_feature: MA Experiment 20000480 PARAMETER Experiment Name: Zm_Drought_P Parameter: Age (day) Value: 11
  misc_feature: MA Experiment 20000480 PARAMETER Experiment Name: Zm_Drought_P Parameter: Organism Value: Zea mays
  misc_feature: MA Experiment 20000480 PARAMETER Experiment Name: Zm_Drought_P Parameter: Plant Line Value: 35A19
  misc_feature: MA Experiment 20000480 PARAMETER Experiment Name: Zm_Drought_P Parameter: Timepoint (hr) Value: 72
  misc_feature: MA Experiment 20000480 PARAMETER Experiment Name: Zm_Drought_P Parameter: Tissue Value: Aerial
  misc_feature: MA Experiment 20000480 PARAMETER Experiment Name: Zm_Drought_P Parameter: Treatment Value: Drought vs. No Drought
  misc_feature: MA Experiment ID: 20000492 Result: Down-regulated in Transcription
  misc_feature: MA Experiment 20000492 PARAMETER Experiment Name: Zm_Hybrid_Seed_Dev_P Parameter: DAP Value: 12
  misc_feature: MA Experiment 20000492 PARAMETER Experiment Name: Zm_Hybrid_Seed_Dev_P Parameter: Organism Value: Zea mays
  misc_feature: MA Experiment 20000492 PARAMETER Experiment Name: Zm_Hybrid_Seed_Dev_P Parameter: Plant Line Value: 35A19
  misc_feature: MA Experiment 20000492 PARAMETER Experiment Name: Zm_Hybrid_Seed_Dev_P Parameter: Tissue Value: Fert Kernel vs. Unfert Floret
  misc_feature: MA Experiment ID: 20000535 Result: Down-regulated in Transcription
  misc_feature: MA Experiment 20000535 PARAMETER Experiment Name: Zm_Hybrid_Seed_Dev_P Parameter: DAP Value: 30 vs. 12
  misc_feature: MA Experiment 20000535 PARAMETER Experiment Name: Zm_Hybrid_Seed_Dev_P Parameter: Organism Value: Zea mays
  misc_feature: MA Experiment 20000535 PARAMETER Experiment Name: Zm_Hybrid_Seed_Dev_P Parameter: Plant Line Value: 35A19
  misc_feature: MA Experiment 20000535 PARAMETER Experiment Name: Zm_Hybrid_Seed_Dev_P Parameter: Tissue Value: Embryo vs. Unfert Floret
aattccacggaatctctcccagctgtcctgtttttccttccatggatccccctcgctagctgagcccgctggtgctcgcggtcgcgggtggtgagcgcggcctcgccggcggcgcagcggcgatggacctcccgtggctggatctgcccttcaccttcctgacgctgctccttgccacccgcctcgcctacgactactatggcgacgtcgccgccgccttcgccggcggcttctcgatccaggtcttcctcttctactgcttcgcgcgctggtaccgctacgccatcgccggccgcgccgccgccgccgctggggcccgcgacgacccgtcgccgtcggcgcggccgccgccgcagcaggaggaggacgcggacgccccgcccgtcctgacaccgctgctggggtcgccggacggcgcgcggccgtcgacgctggccaaccgttgcttcgccgtcgtgttcatggtcttcgtgccgctggtcatcgtcgtcttcgagcggagccaggccgacgtcgtggcctacgcgctctgcctcgccaacatcatcgtcatggtcgtctggctctcgccggacaccgggtcaacggtctcggccgccaagtcgctcctgcgtctcagcgacgacgaggatgaaggcagcgggggcagctccggcgcagaggacaagtgctgcgtctgcctcgccggcatgcgggaggaccaggcgcttcgggcgctgccgcggtgcggccacagcttccacgacaagtgcatcggcaagtggctcaaggcgcacccaacgtgccctgtgtgccgggccaccgccgtgccgccgccgctccacagcgggggcggcgatccgctagatgacgatattagccccgtctagctagcttcccctcagtgattcatccatcttatcttatctaacgaattttgtggacatttgttgggaaatttggtgaaaacctgtatagtaatccaaaacgttgtcaaggctcaattcaacatgtcaggtaggtgatttgtacatacggtcccgtttgtgcactctgagaaaag

SEQ ID NO: 18168 - protein, 248 aa, Zea mays subsp. mays
  peptide (1)..(248): Ceres Seq. ID no. 12416569
  misc_feature (183)..(224): Pfam Name: Zinc finger, C3HC4 type (RING finger) Pfam Description: Zinc finger, C3HC4 type (RING finger)
  misc_feature (83)..(235): Homolog of NCBI NO: 18414851 NR Description: Expressed protein
  misc_feature (150)..(233): Homolog of NCBI NO: 8698833 NR Description: EL5 [Oryza sativa (japonica cultivar-group)]
  misc_feature (174)..(232): Homolog of NCBI NO: 34899852 NR Description: OJ1714_H10.8 [Oryza sativa (japonica
  misc_feature (149)..(230): Homolog of NCBI NO: 15227839 NR Description: putative RING zinc finger protein
  misc_feature (172)..(230): Homolog of NCBI NO: 34907968 NR Description: P0446G04.15 [Oryza sativa (japonica
  misc_feature (88)..(232): Homolog of NCBI NO: 34903926 NR Description: OSJNBa0038J17.8 [Oryza sativa (japonica
  misc_feature (153)..(232): Homolog of NCBI NO: 15240066 NR Description: C3HC4-type RING zinc finger protein-like; protein
  misc_feature (174)..(232): Homolog of NCBI NO: 34909640 NR Description: P0503C12.20 [Oryza sativa (japonica
  misc_feature (175)..(248): Homolog of NCBI NO: 34899858 NR Description: OJ1714_H10.11 [Oryza sativa (japonica
  misc_feature (82)..(237): Homolog of NCBI NO: 34894518 NR Description: P0551A11.23 [Oryza sativa (japonica
MDLPWLDLPFTFLTLLLATRLAYDYYGDVAAAFAGGFSIQVFLFYCFARWYRYAIAGRAAAAAGARDDPSPSARPPPQQEEDADAPPVLTPLLGSPDGARPSTLANRCFAVVFMVFVPLVIVVFERSQADVVAYALCLANIIVMVVWLSPDTGSTVSAAKSLLRLSDDEDEGSGGSSGAEDKCCVCLAGMREDQALRALPRCGHSFHDKCIGKWLKAHPTCPVCRATAVPPPLHSGGGDPLDDDISPV

SEQ ID NO: 18169 - protein, 135 aa, Zea mays subsp. mays
  peptide (1)..(135): Ceres Seq. ID no. 12416570
  misc_feature (70)..(111): Pfam Name: Zinc finger, C3HC4 type (RING finger) Pfam Description: Zinc finger, C3HC4 type (RING finger)
  misc_feature (1)..(124): Homolog of NCBI NO: 34894518 NR Description: P0551A11.23 [Oryza sativa (japonica
  misc_feature (1)..(122): Homolog of NCBI NO: 18414851 NR Description: Expressed protein
  misc_feature (37)..(120): Homolog of NCBI NO: 8698833 NR Description: EL5 [Oryza sativa (japonica cultivar-group)]
  misc_feature (61)..(119): Homolog of NCBI NO: 34899852 NR Description: OJ1714_H10.8 [Oryza sativa (japonica
  misc_feature (36)..(117): Homolog of NCBI NO: 15227839 NR Description: putative RING zinc finger protein
  misc_feature (59)..(117): Homolog of NCBI NO: 34907968 NR Description: P0446G04.15 [Oryza sativa (japonica
  misc_feature (1)..(119): Homolog of NCBI NO: 34903926 NR Description: OSJNBa0038J17.8 [Oryza sativa (japonica
  misc_feature (40)..(119): Homolog of NCBI NO: 15240066 NR Description: C3HC4-type RING zinc finger protein-like; protein
  misc_feature (61)..(119): Homolog of NCBI NO: 34909640 NR Description: P0503C12.20 [Oryza sativa (japonica
  misc_feature (62)..(135): Homolog of NCBI NO: 34899858 NR Description: OJ1714_H10.11 [Oryza sativa (japonica
MVFVPLVIVVFERSQADVVAYALCLANIIVMVVWLSPDTGSTVSAAKSLLRLSDDEDEGSGGSSGAEDKCCVCLAGMREDQALRALPRCGHSFHDKCIGKWLKAHPTCPVCRATAVPPPLHSGGGDPLDDDISPV

SEQ ID NO: 18170 - DNA, 1052 bp, Zea mays subsp. mays
  misc_feature (1)..(1052): Ceres Seq. ID no. 12416671
  misc_feature: MA Experiment ID: 108545 Result: Up-regulated in Transcription
  misc_feature: MA Experiment 108545 PARAMETER Experiment Name: Zm_Imbibed_Seeds_P Parameter: Age (day) Value: 3 vs. 2
  misc_feature: MA Experiment 108545 PARAMETER Experiment Name: Zm_Imbibed_Seeds_P Parameter: Organism Value: Zea mays
  misc_feature: MA Experiment 108545 PARAMETER Experiment Name: Zm_Imbibed_Seeds_P Parameter: Plant Line Value: 35A19
  misc_feature: MA Experiment 108545 PARAMETER Experiment Name: Zm_Imbibed_Seeds_P Parameter: Tissue Value: Aerial vs. Embryo
  misc_feature: MA Experiment ID: 108689 Result: Down-regulated in Transcription
  misc_feature: MA Experiment 108689 PARAMETER Experiment Name: Zm_Drought_Roots_P Parameter: Age (day) Value: 9
  misc_feature: MA Experiment 108689 PARAMETER Experiment Name: Zm_Drought_Roots_P Parameter: Organism Value: Zea mays
  misc_feature: MA Experiment 108689 PARAMETER Experiment Name: Zm_Drought_Roots_P Parameter: Plant Line Value: 35A19
  misc_feature: MA Experiment 108689 PARAMETER Experiment Name: Zm_Drought_Roots_P Parameter: Timepoint (hr) Value: 24
  misc_feature: MA Experiment 108689 PARAMETER Experiment Name: Zm_Drought_Roots_P Parameter: Tissue Value: Roots
  misc_feature: MA Experiment 108689 PARAMETER Experiment Name: Zm_Drought_Roots_P Parameter: Treatment Value: Drought vs. No Drought
  misc_feature: MA Experiment ID: 20000477 Result: Down-regulated in Transcription
  misc_feature: MA Experiment 20000477 PARAMETER Experiment Name: Zm_5mM_SA_P Parameter: Age (day) Value: 10
  misc_feature: MA Experiment 20000477 PARAMETER Experiment Name: Zm_5mM_SA_P Parameter: Organism Value: Zea mays
  misc_feature: MA Experiment 20000477 PARAMETER Experiment Name: Zm_5mM_SA_P Parameter: Plant Line Value: 35A19
  misc_feature: MA Experiment 20000477 PARAMETER Experiment Name: Zm_5mM_SA_P Parameter: Timepoint (hr) Value: 48
  misc_feature: MA Experiment 20000477 PARAMETER Experiment Name: Zm_5mM_SA_P Parameter: Tissue Value: Aerial
  misc_feature: MA Experiment 20000477 PARAMETER Experiment Name: Zm_5mM_SA_P Parameter: Treatment Value: 5mM SA vs. No Treatment
  misc_feature: MA Experiment ID: 20000478 Result: Down-regulated in Transcription
  misc_feature: MA Experiment 20000478 PARAMETER Experiment Name: Zm_5mM_SA_P Parameter: Age (day) Value: 11
  misc_feature: MA Experiment 20000478 PARAMETER Experiment Name: Zm_5mM_SA_P Parameter: Organism Value: Zea mays
  misc_feature: MA Experiment 20000478 PARAMETER Experiment Name: Zm_5mM_SA_P Parameter: Plant Line Value: 35A19
  misc_feature: MA Experiment 20000478 PARAMETER Experiment Name: Zm_5mM_SA_P Parameter: Timepoint (hr) Value: 72
  misc_feature: MA Experiment 20000478 PARAMETER Experiment Name: Zm_5mM_SA_P Parameter: Tissue Value: Aerial
  misc_feature: MA Experiment 20000478 PARAMETER Experiment Name: Zm_5mM_SA_P Parameter: Treatment Value: 5mM SA vs. No Treatment
  misc_feature: MA Experiment ID: 20000479 Result: Down-regulated in Transcription
  misc_feature: MA Experiment 20000479 PARAMETER Experiment Name: Zm_Drought_P Parameter: Age (day) Value: 10
  misc_feature: MA Experiment 20000479 PARAMETER Experiment Name: Zm_Drought_P Parameter: Organism Value: Zea mays
  misc_feature: MA Experiment 20000479 PARAMETER Experiment Name: Zm_Drought_P Parameter: Plant Line Value: 35A19
  misc_feature: MA Experiment 20000479 PARAMETER Experiment Name: Zm_Drought_P Parameter: Timepoint (hr) Value: 48
  misc_feature: MA Experiment 20000479 PARAMETER Experiment Name: Zm_Drought_P Parameter: Tissue Value: Aerial
  misc_feature: MA Experiment 20000479 PARAMETER Experiment Name: Zm_Drought_P Parameter: Treatment Value: Drought vs. No Drought
  misc_feature: MA Experiment ID: 20000487 Result: Down-regulated in Transcription
  misc_feature: MA Experiment 20000487 PARAMETER Experiment Name: Zm_50mM_NH4NO3_L_to_H_P Parameter: Organism Value: Zea mays
  misc_feature: MA Experiment 20000487 PARAMETER Experiment Name: Zm_50mM_NH4NO3_L_to_H_P Parameter: Timepoint (hr) Value: 4
  misc_feature: MA Experiment 20000487 PARAMETER Experiment Name: Zm_50mM_NH4NO3_L_to_H_P Parameter: Tissue Value: Leaves
  misc_feature: MA Experiment 20000487 PARAMETER Experiment Name: Zm_50mM_NH4NO3_L_to_H_P Parameter: Treatment Value: 50mM NH4NO3 vs. 100mM Mannitol
  misc_feature: MA Experiment ID: 20000492 Result: Up-regulated in Transcription
  misc_feature: MA Experiment 20000492 PARAMETER Experiment Name: Zm_Hybrid_Seed_Dev_P Parameter: DAP Value: 12
  misc_feature: MA Experiment 20000492 PARAMETER Experiment Name: Zm_Hybrid_Seed_Dev_P Parameter: Organism Value: Zea mays
  misc_feature: MA Experiment 20000492 PARAMETER Experiment Name: Zm_Hybrid_Seed_Dev_P Parameter: Plant Line Value: 35A19
  misc_feature: MA Experiment 20000492 PARAMETER Experiment Name: Zm_Hybrid_Seed_Dev_P Parameter: Tissue Value: Fert Kernel vs. Unfert Floret
  misc_feature: MA Experiment ID: 20000535 Result: Up-regulated in Transcription
  misc_feature: MA Experiment 20000535 PARAMETER Experiment Name: Zm_Hybrid_Seed_Dev_P Parameter: DAP Value: 30 vs. 12
  misc_feature: MA Experiment 20000535 PARAMETER Experiment Name: Zm_Hybrid_Seed_Dev_P Parameter: Organism Value: Zea mays
  misc_feature: MA Experiment 20000535 PARAMETER Experiment Name: Zm_Hybrid_Seed_Dev_P Parameter: Plant Line Value: 35A19
  misc_feature: MA Experiment 20000535 PARAMETER Experiment Name: Zm_Hybrid_Seed_Dev_P Parameter: Tissue Value: Embryo vs. Unfert Floret
  misc_feature: MA Experiment ID: 20000632 Result: Down-regulated in Transcription
  misc_feature: MA Experiment 20000632 PARAMETER Experiment Name: Zm_Herbicide-Treatments_P Parameter: Timepoint (hr) Value: 4
  misc_feature: MA Experiment 20000632 PARAMETER Experiment Name: Zm_Herbicide-Treatments_P Parameter: Tissue Value: Aerial
  misc_feature: MA Experiment 20000632 PARAMETER Experiment Name: Zm_Herbicide-Treatments_P Parameter: Treatment Value: Glean vs. No Treatment
agcccctctcccgcagccgcagtcccagtcccacgcgcattccgccccgcggctcccgagagagagagatggccaggcacgccaagacggactccgacgtgacgagcctggcggcgtccacgccgccgcggtccccgcgcggccgcccggcctactacgtgctcagccccgccgcctcccacccggacgtccacctgggcgcctccggcggcgtggcggggaccaccccggcggagtcgccgctccactaccacttccaccaccaccgccaccactcgagcggcggcgccggtgtcggcgtgggcggcacgcaccactcccgggagtcctcgacggggcggctgctcttctccgaccagctccgctccggcggcgacgtcgccgcggtggtgagcgtcccctggcgccggctcgggaacggcagcggcgcgggcagcgtcggggacgaggacgacgacggcgcgtccctgcgcggcgggtcgttcgcggagtcgccgtggcggtgctacgcgctcggcgcggtcgcgttcgtcgccgtgatcgccttcttcctgatcgtgctgtggggcgccagcaggtcgtacaagccccacgtcgtcgtcaagagggtggtgttcgagtcgtaccacatccagggcggcacggaccggacgggcgtccctacngaagatgatgtcggtcaacgcgacggtgcggntgcgcttccgcaaccgcggcaccttcttcagcctgcacgtcacggccacgccgttcctcctcttctacggcgacctcaccgtcgcctccggagagatggcggagttctaccagccgcggaagagcgggcggacggtgacggtgtccgtggtggggaagcaggtgccgctctacggcgcgggcgccagcctgcacagcaagcccaacaacgggcgcctcggccctgcggtggtgcccgtcaggctcggcttcgtgctgcgttgtggttgcggacgaactgtgtaatcgattcctacgaaccgttctaatgtaacggcggcgtcgacaagatcacagatcgtgggcgcagcttggct

SEQ ID NO: 18171 - protein, 333 aa, Zea mays subsp. mays
  peptide (1)..(333): Ceres Seq. ID no. 12416672
  misc_feature (33)..(222): Homolog of NCBI NO: 34904260 NR Description: P0452F10.18 [Oryza sativa (japonica
  misc_feature (19)..(151): Homolog of NCBI NO: 5777621 NR Description: CAA30379.1 protein [Oryza sativa]
  misc_feature (100)..(222): Homolog of NCBI NO: 5777621 NR Description: CAA30379.1 protein [Oryza sativa]
  misc_feature (26)..(151): Homolog of NCBI NO: 38345517 NR Description: OSJNBa0039K24.20 [Oryza sativa (japonica
  misc_feature (26)..(96): Homolog of NCBI NO: 28416677 NR Description: At5g42860 [Arabidopsis thaliana]
  misc_feature (139)..(222): Homolog of NCBI NO: 28416677 NR Description: At5g42860 [Arabidopsis thaliana]
  misc_feature (100)..(222): Homolog of NCBI NO: 38345517 NR Description: OSJNBa0039K24.20 [Oryza sativa (japonica
  misc_feature (26)..(96): Homolog of NCBI NO: 15239097 NR Description: putative protein; protein id: At5g42860.1
  misc_feature (139)..(222): Homolog of NCBI NO: 15239097 NR Description: putative protein; protein id: At5g42860.1
  misc_feature (26)..(222): Homolog of NCBI NO: 18401556 NR Description: expressed protein
  misc_feature (221)..(221): Xaa is any aa, unknown or other
  misc_feature (232)..(232): Xaa is any aa, unknown or other
PLSRSRSPSPTRIPPRGSREREMARHAKTDSDVTSLAASTPPRSPRGRPAYYVLSPAASHPDVHLGASGGVAGTTPAESPLHYHFHHHRHHSSGGAGVGVGGTHHSRESSTGRLLFSDQLRSGGDVAAVVSVPWRRLGNGSGAGSVGDEDDDGASLRGGSFAESPWRCYALGAVAFVAVIAFFLIVLWGASRSYKPHVVVKRVVFESYHIQGGTDRTGVPXEDDVGQRDGAXALPQPRHLLQPARHGHAVPPLLRRPHRRLRRDGGVLPAAEERADGDGVRGGEAGAALRRGRQPAQQAQQRAPRPCGGARQARLRAALWLRTNCVIDSYEPF

SEQ ID NO: 18172 - protein, 311 aa, Zea mays subsp. mays
  peptide (1)..(311): Ceres Seq. ID no. 12416673
  misc_feature (11)..(200): Homolog of NCBI NO: 34904260 NR Description: P0452F10.18 [Oryza sativa (japonica
  misc_feature (1)..(129): Homolog of NCBI NO: 5777621 NR Description: CAA30379.1 protein [Oryza sativa]
  misc_feature (78)..(200): Homolog of NCBI NO: 5777621 NR Description: CAA30379.1 protein [Oryza sativa]
  misc_feature (4)..(129): Homolog of NCBI NO: 38345517 NR Description: OSJNBa0039K24.20 [Oryza sativa (japonica
  misc_feature (4)..(74): Homolog of NCBI NO: 28416677 NR Description: At5g42860 [Arabidopsis thaliana]
  misc_feature (117)..(200): Homolog of NCBI NO: 28416677 NR Description: At5g42860 [Arabidopsis thaliana]
  misc_feature (78)..(200): Homolog of NCBI NO: 38345517 NR Description: OSJNBa0039K24.20 [Oryza sativa (japonica
  misc_feature (4)..(74): Homolog of NCBI NO: 15239097 NR Description: putative protein; protein id: At5g42860.1
  misc_feature (117)..(200): Homolog of NCBI NO: 15239097 NR Description: putative protein; protein id: At5g42860.1
  misc_feature (4)..(200): Homolog of NCBI NO: 18401556 NR Description: expressed protein
  misc_feature (199)..(199): Xaa is any aa, unknown or other
  misc_feature (210)..(210): Xaa is any aa, unknown or other
MARHAKTDSDVTSLAASTPPRSPRGRPAYYVLSPAASHPDVHLGASGGVAGTTPAESPLHYHFHHHRHHSSGGAGVGVGGTHHSRESSTGRLLFSDQLRSGGDVAAVVSVPWRRLGNGSGAGSVGDEDDDGASLRGGSFAESPWRCYALGAVAFVAVIAFFLIVLWGASRSYKPHVVVKRVVFESYHIQGGTDRTGVPXEDDVGQRDGAXALPQPRHLLQPARHGHAVPPLLRRPHRRLRRDGGVLPAAEERADGDGVRGGEAGAALRRGRQPAQQAQQRAPRPCGGARQARLRAALWLRTNCVIDSYEPF

SEQ ID NO: 18173 - protein, 223 aa, Zea mays subsp. mays
  peptide (1)..(223): Ceres Seq. ID no. 12416674
  misc_feature (222)..(222): Xaa is any aa, unknown or other
APLPQPQSQSHAHSAPRLPRERDGQARQDGLRRDEPGGVHAAAVPARPPGLLRAQPRRLPPGRPPGRLRRRGGDHPGGVAAPLPLPPPPPPLERRRRCRRGRHAPLPGVLDGAAALLRPAPLRRRRRRGGERPLAPARERQRRGQRRGRGRRRRVPARRVVRGVAVAVLRARRGRVRRRDRLLPDRAVGRQQVVQAPRRRQEGGVRVVPHPGRHGPDGRPYXR

SEQ ID NO: 18174 - DNA, 1000 bp, Zea mays subsp. mays
  misc_feature (1)..(1000): Ceres Seq. ID no. 12362563
  misc_feature: MA Experiment ID: 108515 Result: Up-regulated in Transcription
  misc_feature: MA Experiment 108515 PARAMETER Experiment Name: Zm_2mM_SA_P Parameter: Age (day) Value: 8
  misc_feature: MA Experiment 108515 PARAMETER Experiment Name: Zm_2mM_SA_P Parameter: Organism Value: Zea mays
  misc_feature: MA Experiment 108515 PARAMETER Experiment Name: Zm_2mM_SA_P Parameter: Plant Line Value: 35A19
  misc_feature: MA Experiment 108515 PARAMETER Experiment Name: Zm_2mM_SA_P Parameter: Timepoint (hr) Value: 12
  misc_feature: MA Experiment 108515 PARAMETER Experiment Name: Zm_2mM_SA_P Parameter: Tissue Value: Aerial
  misc_feature: MA Experiment 108515 PARAMETER Experiment Name: Zm_2mM_SA_P Parameter: Treatment Value: 2mM SA vs. No Treatment
  misc_feature: MA Experiment ID: 108526 Result: Up-regulated in Transcription
  misc_feature: MA Experiment 108526 PARAMETER Experiment Name: Zm_5mM_NO_P Parameter: Age (day) Value: 8
  misc_feature: MA Experiment 108526 PARAMETER Experiment Name: Zm_5mM_NO_P Parameter: Organism Value: Zea mays
  misc_feature: MA Experiment 108526 PARAMETER Experiment Name: Zm_5mM_NO_P Parameter: Plant Line Value: 35A19
  misc_feature: MA Experiment 108526 PARAMETER Experiment Name: Zm_5mM_NO_P Parameter: Timepoint (hr) Value: 1
  misc_feature: MA Experiment 108526 PARAMETER Experiment Name: Zm_5mM_NO_P Parameter: Tissue Value: Aerial
  misc_feature: MA Experiment 108526 PARAMETER Experiment Name: Zm_5mM_NO_P Parameter: Treatment Value: 5mM NO vs. No Treatment
  misc_feature: MA Experiment ID: 108527 Result: Up-regulated in Transcription
  misc_feature: MA Experiment 108527 PARAMETER Experiment Name: Zm_5mM_NO_P Parameter: Age (day) Value: 8
  misc_feature: MA Experiment 108527 PARAMETER Experiment Name: Zm_5mM_NO_P Parameter: Organism Value: Zea mays
  misc_feature: MA Experiment 108527 PARAMETER Experiment Name: Zm_5mM_NO_P Parameter: Plant Line Value: 35A19
  misc_feature: MA Experiment 108527 PARAMETER Experiment Name: Zm_5mM_NO_P Parameter: Timepoint (hr) Value: 6
  misc_feature: MA Experiment 108527 PARAMETER Experiment Name: Zm_5mM_NO_P Parameter: Tissue Value: Aerial
  misc_feature: MA Experiment 108527 PARAMETER Experiment Name: Zm_5mM_NO_P Parameter: Treatment Value: 5mM NO vs. No Treatment
  misc_feature: MA Experiment ID: 108528 Result: Down-regulated in Transcription
  misc_feature: MA Experiment 108528 PARAMETER Experiment Name: Zm_Imbibed_Seeds_P Parameter: Age (day) Value: 5 vs. 2
  misc_feature: MA Experiment 108528 PARAMETER Experiment Name: Zm_Imbibed_Seeds_P Parameter: Organism Value: Zea mays
  misc_feature: MA Experiment 108528 PARAMETER Experiment Name: Zm_Imbibed_Seeds_P Parameter: Plant Line Value: 35A19
  misc_feature: MA Experiment 108528 PARAMETER Experiment Name: Zm_Imbibed_Seeds_P Parameter: Tissue Value: Aerial vs. Embryo
  misc_feature: MA Experiment ID: 108530 Result: Down-regulated in Transcription
  misc_feature: MA Experiment 108530 PARAMETER Experiment Name: Zm_Imbibed_Seeds_P Parameter: Age (day) Value: 6 vs. 2
  misc_feature: MA Experiment 108530 PARAMETER Experiment Name: Zm_Imbibed_Seeds_P Parameter: Organism Value: Zea mays
  misc_feature: MA Experiment 108530 PARAMETER Experiment Name: Zm_Imbibed_Seeds_P Parameter: Plant Line Value: 35A19
  misc_feature: MA Experiment 108530 PARAMETER Experiment Name: Zm_Imbibed_Seeds_P Parameter: Tissue Value: Aerial vs. Embryo
  misc_feature: MA Experiment ID: 108543 Result: Down-regulated in Transcription
  misc_feature: MA Experiment ID: 108545 Result: Down-regulated in Transcription
  misc_feature: MA Experiment 108545 PARAMETER Experiment Name: Zm_Imbibed_Seeds_P Parameter: Age (day) Value: 3 vs. 2
  misc_feature: MA Experiment 108545 PARAMETER Experiment Name: Zm_Imbibed_Seeds_P Parameter: Organism Value: Zea mays
  misc_feature: MA Experiment 108545 PARAMETER Experiment Name: Zm_Imbibed_Seeds_P Parameter: Plant Line Value: 35A19
  misc_feature: MA Experiment 108545 PARAMETER Experiment Name: Zm_Imbibed_Seeds_P Parameter: Tissue Value: Aerial vs. Embryo
  misc_feature: MA Experiment ID: 108546 Result: Up-regulated in Transcription
  misc_feature: MA Experiment 108546 PARAMETER Experiment Name: Zm_Imbibed_Seeds_P Parameter: Age (day) Value: 3 vs. 2
  misc_feature: MA Experiment 108546 PARAMETER Experiment Name: Zm_Imbibed_Seeds_P Parameter: Organism Value: Zea mays
  misc_feature: MA Experiment 108546 PARAMETER Experiment Name: Zm_Imbibed_Seeds_P Parameter: Plant Line Value: 35A19
  misc_feature: MA Experiment 108546 PARAMETER Experiment Name: Zm_Imbibed_Seeds_P Parameter: Tissue Value: Roots vs. Embryo
  misc_feature: MA Experiment ID: 108547 Result: Down-regulated in Transcription
  misc_feature: MA Experiment 108547 PARAMETER Experiment Name: Zm_Imbibed_Seeds_P Parameter: Age (day) Value: 4 vs. 2
  misc_feature: MA Experiment 108547 PARAMETER Experiment Name: Zm_Imbibed_Seeds_P Parameter: Organism Value: Zea mays
  misc_feature: MA Experiment 108547 PARAMETER Experiment Name: Zm_Imbibed_Seeds_P Parameter: Plant Line Value: 35A19
  misc_feature: MA Experiment 108547 PARAMETER Experiment Name: Zm_Imbibed_Seeds_P Parameter: Tissue Value: Aerial vs. Embryo
  misc_feature: MA Experiment ID: 20000477 Result: Up-regulated in Transcription
  misc_feature: MA Experiment 20000477 PARAMETER Experiment Name: Zm_5mM_SA_P Parameter: Age (day) Value: 10
  misc_feature: MA Experiment 20000477 PARAMETER Experiment Name: Zm_5mM_SA_P Parameter: Organism Value: Zea mays
  misc_feature: MA Experiment 20000477 PARAMETER Experiment Name: Zm_5mM_SA_P Parameter: Plant Line Value: 35A19
  misc_feature: MA Experiment 20000477 PARAMETER Experiment Name: Zm_5mM_SA_P Parameter: Timepoint (hr) Value: 48
  misc_feature: MA Experiment 20000477 PARAMETER Experiment Name: Zm_5mM_SA_P Parameter: Tissue Value: Aerial
  misc_feature: MA Experiment 20000477 PARAMETER Experiment Name: Zm_5mM_SA_P Parameter: Treatment Value: 5mM SA vs. No Treatment
  misc_feature: MA Experiment ID: 20000478 Result: Up-regulated in Transcription
  misc_feature: MA Experiment 20000478 PARAMETER Experiment Name: Zm_5mM_SA_P Parameter: Age (day) Value: 11
  misc_feature: MA Experiment 20000478 PARAMETER Experiment Name: Zm_5mM_SA_P Parameter: Organism Value: Zea mays
  misc_feature: MA Experiment 20000478 PARAMETER Experiment Name: Zm_5mM_SA_P Parameter: Plant Line Value: 35A19
  misc_feature: MA Experiment 20000478 PARAMETER Experiment Name: Zm_5mM_SA_P Parameter: Timepoint (hr) Value: 72
  misc_feature: MA Experiment 20000478 PARAMETER Experiment Name: Zm_5mM_SA_P Parameter: Tissue Value: Aerial
  misc_feature: MA Experiment 20000478 PARAMETER Experiment Name: Zm_5mM_SA_P Parameter: Treatment Value: 5mM SA vs. No Treatment
  misc_feature: MA Experiment ID: 20000535 Result: Down-regulated in Transcription
  misc_feature: MA Experiment 20000535 PARAMETER Experiment Name: Zm_Hybrid_Seed_Dev_P Parameter: DAP Value: 30 vs. 12
  misc_feature: MA Experiment 20000535 PARAMETER Experiment Name: Zm_Hybrid_Seed_Dev_P Parameter: Organism Value: Zea mays
  misc_feature: MA Experiment 20000535 PARAMETER Experiment Name: Zm_Hybrid_Seed_Dev_P Parameter: Plant Line Value: 35A19
  misc_feature: MA Experiment 20000535 PARAMETER Experiment Name: Zm_Hybrid_Seed_Dev_P Parameter: Tissue Value: Embryo vs. Unfert Floret
  misc_feature: MA Experiment ID: 20000626 Result: Up-regulated in Transcription
  misc_feature: MA Experiment 20000626 PARAMETER Experiment Name: Zm_Herbicide-Treatments_P Parameter: Timepoint (hr) Value: 12
  misc_feature: MA Experiment 20000626 PARAMETER Experiment Name: Zm_Herbicide-Treatments_P Parameter: Tissue Value: Aerial
  misc_feature: MA Experiment 20000626 PARAMETER Experiment Name: Zm_Herbicide-Treatments_P Parameter: Treatment Value: Roundup vs. No Treatment
  misc_feature: MA Experiment ID: 20000627 Result: Up-regulated in Transcription
  misc_feature: MA Experiment 20000627 PARAMETER Experiment Name: Zm_Herbicide-Treatments_P Parameter: Timepoint (hr) Value: 12
  misc_feature: MA Experiment 20000627 PARAMETER Experiment Name: Zm_Herbicide-Treatments_P Parameter: Tissue Value: Aerial
  misc_feature: MA Experiment 20000627 PARAMETER Experiment Name: Zm_Herbicide-Treatments_P Parameter: Treatment Value: Finale vs. No Treatment
atagcaaaactcgtgctgacacaacacacaagcacaaattgtgaagtgcgtgacgccgcgaggggttaagtcagcaagcaagcaggcagatagccatggcagtcgcaagcgccgagaacacgtcgtcgctgctcccgctcgacggccgcgtagcgctggtcactggcggctcccgcggcattggccgcgaggtgtcctcccaactcgccaccctgggcgcgcgcgtcgtggtcaactacgcgtccaattccgccagggcagacgagctcgtcgcggagctcgcctcccgcggccaccaggccgtggccgtccgcgccgacgtgtcggacccggacgccgtgcacgcgctcttcgaccgcgccgaggaggcgttcgggtccccgccgcacatcgtcgtctgctgcgcgggcctcctcaatgccaagtacccggcgctcgcggacaccgccgtcgacgacttcgacgccatgttcgcggtgaacgtgcgcgggacgttcctcgtgtgccgcgaggcggcgaaccgcgtcccagccaacagcggcggccgcatcgtgacgttctcgtcgtccatcgttggcacgctcctgccgggatacgcggcgtacacggcgaccaacgccgccgtggaggcgatgacgaagatcctggccaaggaggtggcggcgaagggggtgaccgcgaacgtggtcgcgccggggcccgtgcgcaccgagctgttcttggccgggaaggacgaagcgttcctgcggagggtggagcagcagtccatgggccgcatcgccgagacgacggacgtggcgccggtggtggcgttcctggccagcgacgccgcggcttgggtcaacggccaggtcatcagggtcaacggcggttttgtctaataagggtccaaatgcgccagatgttcagatatagtggtatctgccatacgcaagtttaaaaaaaaacgcaaaaatgtgagtggcgtgtgtgtgttttaataaaaaaaatcaagttatgc

SEQ ID NO: 18175 - protein, 261 aa, Zea mays subsp. mays
  peptide (1)..(261): Ceres Seq. ID no. 12362564
  misc_feature (10)..(244): Homolog of NCBI NO: 30686710 NR Description: short-chain dehydrogenase/reductase family
  misc_feature (13)..(261): Homolog of NCBI NO: 1711355 NR Description: SHORT-CHAIN TYPE DEHYDROGENASE/REDUCTASE
  misc_feature (13)..(261): Homolog of NCBI NO: 18087667 NR Description: putative dehydrogenase [Oryza sativa]
  misc_feature (13)..(261): Homolog of NCBI NO: 15229203 NR Description: putative short-chain type dehydrogenase/reductase
  misc_feature (10)..(261): Homolog of NCBI NO: 9758903 NR Description: Brn1-like protein [Arabidopsis thaliana]
  misc_feature (2)..(261): Homolog of NCBI NO: 34393370 NR Description: putative short-chain dehydrogenase/reductase
  misc_feature (1)..(261): Homolog of NCBI NO: 34395019 NR Description: putative short-chain dehydrogenase/reductase
  misc_feature (9)..(261): Homolog of NCBI NO: 15235621 NR Description: short-chain alcohol dehydrogenase like protein
  misc_feature (4)..(259): Homolog of NCBI NO: 34395018 NR Description: putative short-chain dehydrogenase/reductase
  misc_feature (6)..(260): Homolog of NCBI NO: 37534988 NR Description: putative short-chain alcohol dehydrogenase
MAVASAENTSSLLPLDGRVALVTGGSRGIGREVSSQLATLGARVVVNYASNSARADELVAELASRGHQAVAVRADVSDPDAVHALFDRAEEAFGSPPHIVVCCAGLLNAKYPALADTAVDDFDAMFAVNVRGTFLVCREAANRVPANSGGRIVTFSSSIVGTLLPGYAAYTATNAAVEAMTKILAKEVAAKGVTANVVAPGPVRTELFLAGKDEAFLRRVEQQSMGRIAETTDVAPVVAFLASDAAAWVNGQVIRVNGGFV

SEQ ID NO: 18176 - protein, 137 aa, Zea mays subsp. mays
  peptide (1)..(137): Ceres Seq. ID no. 12362565
  misc_feature (1)..(120): Homolog of NCBI NO: 30686710 NR Description: short-chain dehydrogenase/reductase family
  misc_feature (1)..(137): Homolog of NCBI NO: 1711355 NR Description: SHORT-CHAIN TYPE DEHYDROGENASE/REDUCTASE
  misc_feature (1)..(137): Homolog of NCBI NO: 18087667 NR Description: putative dehydrogenase [Oryza sativa]
  misc_feature (1)..(137): Homolog of NCBI NO: 15229203 NR Description: putative short-chain type dehydrogenase/reductase
  misc_feature (1)..(137): Homolog of NCBI NO: 9758903 NR Description: Brn1-like protein [Arabidopsis thaliana]
  misc_feature (1)..(137): Homolog of NCBI NO: 34393370 NR Description: putative short-chain dehydrogenase/reductase
  misc_feature (1)..(137): Homolog of NCBI NO: 34395019 NR Description: putative short-chain dehydrogenase/reductase
  misc_feature (1)..(137): Homolog of NCBI NO: 15235621 NR Description: short-chain alcohol dehydrogenase like protein
  misc_feature (1)..(135): Homolog of NCBI NO: 34395018 NR Description: putative short-chain dehydrogenase/reductase
  misc_feature (1)..(136): Homolog of NCBI NO: 37534988 NR Description: putative short-chain alcohol dehydrogenase
MFAVNVRGTFLVCREAANRVPANSGGRIVTFSSSIVGTLLPGYAAYTATNAAVEAMTKILAKEVAAKGVTANVVAPGPVRTELFLAGKDEAFLRRVEQQSMGRIAETTDVAPVVAFLASDAAAWVNGQVIRVNGGFV

SEQ ID NO: 18177 - DNA, 965 bp, Zea mays subsp. mays
  misc_feature (1)..(965): Ceres Seq. ID no. 12391896
  misc_feature: MA Experiment ID: 108528 Result: Up-regulated in Transcription
  misc_feature: MA Experiment 108528 PARAMETER Experiment Name: Zm_Imbibed_Seeds_P Parameter: Age (day) Value: 5 vs. 2
  misc_feature: MA Experiment 108528 PARAMETER Experiment Name: Zm_Imbibed_Seeds_P Parameter: Organism Value: Zea mays
  misc_feature: MA Experiment 108528 PARAMETER Experiment Name: Zm_Imbibed_Seeds_P Parameter: Plant Line Value: 35A19
  misc_feature: MA Experiment 108528 PARAMETER Experiment Name: Zm_Imbibed_Seeds_P Parameter: Tissue Value: Aerial vs. Embryo
  misc_feature: MA Experiment ID: 108529 Result: Down-regulated in Transcription
  misc_feature: MA Experiment 108529 PARAMETER Experiment Name: Zm_Imbibed_Seeds_P Parameter: Age (day) Value: 5 vs. 2
  misc_feature: MA Experiment 108529 PARAMETER Experiment Name: Zm_Imbibed_Seeds_P Parameter: Organism Value: Zea mays
  misc_feature: MA Experiment 108529 PARAMETER Experiment Name: Zm_Imbibed_Seeds_P Parameter: Plant Line Value: 35A19
  misc_feature: MA Experiment 108529 PARAMETER Experiment Name: Zm_Imbibed_Seeds_P Parameter: Tissue Value: Roots vs. Embryo
  misc_feature: MA Experiment ID: 108530 Result: Up-regulated in Transcription
  misc_feature: MA Experiment 108530 PARAMETER Experiment Name: Zm_Imbibed_Seeds_P Parameter: Age (day) Value: 6 vs. 2
  misc_feature: MA Experiment 108530 PARAMETER Experiment Name: Zm_Imbibed_Seeds_P Parameter: Organism Value: Zea mays
  misc_feature: MA Experiment 108530 PARAMETER Experiment Name: Zm_Imbibed_Seeds_P Parameter: Plant Line Value: 35A19
  misc_feature: MA Experiment 108530 PARAMETER Experiment Name: Zm_Imbibed_Seeds_P Parameter: Tissue Value: Aerial vs. Embryo
  misc_feature: MA Experiment ID: 108536 Result: Down-regulated in Transcription
  misc_feature: MA Experiment 108536 PARAMETER Experiment Name: Zm_Meristem_P Parameter: Age (day) Value: 8
  misc_feature: MA Experiment 108536 PARAMETER Experiment Name: Zm_Meristem_P Parameter: Organism Value: Zea mays
  misc_feature: MA Experiment 108536 PARAMETER Experiment Name: Zm_Meristem_P Parameter: Plant Line Value: 35A19
  misc_feature: MA Experiment 108536 PARAMETER Experiment Name: Zm_Meristem_P Parameter: Tissue Value: Shoot Meristem vs. Above Shoot Meristem
  misc_feature: MA Experiment ID: 108543 Result: Up-regulated in Transcription
  misc_feature: MA Experiment ID: 108545 Result: Up-regulated in Transcription
  misc_feature: MA Experiment 108545 PARAMETER Experiment Name: Zm_Imbibed_Seeds_P Parameter: Age (day) Value: 3 vs. 2
  misc_feature: MA Experiment 108545 PARAMETER Experiment Name: Zm_Imbibed_Seeds_P Parameter: Organism Value: Zea mays
  misc_feature: MA Experiment 108545 PARAMETER Experiment Name: Zm_Imbibed_Seeds_P Parameter: Plant Line Value: 35A19
  misc_feature: MA Experiment 108545 PARAMETER Experiment Name: Zm_Imbibed_Seeds_P Parameter: Tissue Value: Aerial vs. Embryo
  misc_feature: MA Experiment ID: 108546 Result: Down-regulated in Transcription
  misc_feature: MA Experiment 108546 PARAMETER Experiment Name: Zm_Imbibed_Seeds_P Parameter: Age (day) Value: 3 vs. 2
  misc_feature: MA Experiment 108546 PARAMETER Experiment Name: Zm_Imbibed_Seeds_P Parameter: Organism Value: Zea mays
  misc_feature: MA Experiment 108546 PARAMETER Experiment Name: Zm_Imbibed_Seeds_P Parameter: Plant Line Value: 35A19
  misc_feature: MA Experiment 108546 PARAMETER Experiment Name: Zm_Imbibed_Seeds_P Parameter: Tissue Value: Roots vs. Embryo
  misc_feature: MA Experiment ID: 108547 Result: Up-regulated in Transcription
  misc_feature: MA Experiment 108547 PARAMETER Experiment Name: Zm_Imbibed_Seeds_P Parameter: Age (day) Value: 4 vs. 2
  misc_feature: MA Experiment 108547 PARAMETER Experiment Name: Zm_Imbibed_Seeds_P Parameter: Organism Value: Zea mays
  misc_feature: MA Experiment 108547 PARAMETER Experiment Name: Zm_Imbibed_Seeds_P Parameter: Plant Line Value: 35A19
  misc_feature: MA Experiment 108547 PARAMETER Experiment Name: Zm_Imbibed_Seeds_P Parameter: Tissue Value: Aerial vs. Embryo
  misc_feature: MA Experiment ID: 20000626 Result: Down-regulated in Transcription
  misc_feature: MA Experiment 20000626 PARAMETER Experiment Name: Zm_Herbicide-Treatments_P Parameter: Timepoint (hr) Value: 12
  misc_feature: MA Experiment 20000626 PARAMETER Experiment Name: Zm_Herbicide-Treatments_P Parameter: Tissue Value: Aerial
  misc_feature: MA Experiment 20000626 PARAMETER Experiment Name: Zm_Herbicide-Treatments_P Parameter: Treatment Value: Roundup vs. No Treatment
atccacaatatgatccctggcctctcatcctccgaaaactccactccttcgtcatccatgcgtcccctccccgccgcggccatggccaccgcgacgctgcccctccgcctcctcccctccaaaacgctgactctctccactctcccctccctgcgccgctccctctccgtcgccgctttggagccccggcgctggcgcctccgagccgccgccgaggaggcgcctgaggccgtggaggttgagttcgtggagcccgagacggaggctgaggagaaacccgcggtaccggagcccatcgaggctcagctggccgccgcgggggccgggaaggacgcggacatcttcgctgttgtcatgattggttcaagacagtacatagtgatgccgggcaggtatatatacacacagagactgaaaggtgccaatgtcaatgatcagatcatattaaacaaggtgctactggtgtcaactagagaaaaagcttacattgggatgccagtggtgaccaatgctgctgttcacgcagtggttgaagaacagggacgggatgataaagttatagtgttcaagtacaagaagaagaagaagtaccagaggaaacttggtcacagacagccaaacacaaggttaagaatcacaggcataagtggatacgaagagtaccctgctgacccaatacttgaccctgctgcagctttaaattaaactgtaagttatgtagttacaaaacggctggtagtagagtagcatgctagttttcttgtttctttctttttttacttctctgtcttgaaaaaggaacacttttcatcacaattttccttgtttttgtgtgttccaaatgctgccagtcaaccaactgtaccatgagctatcttgttcttgttcttttttcacatcgtgtatgctactagccagttgtattgcacgaccggtcctaaagaagaggtttctttctttttgtt

SEQ ID NO: 18178 - protein, 234 aa, Zea mays subsp. mays
  peptide (1)..(234): Ceres Seq. ID no. 12391897
  misc_feature (114)..(210): Pfam Name: Ribosomal prokaryotic L21 protein Pfam Description: Ribosomal prokaryotic L21 protein
  misc_feature (114)..(215): Homolog of NCBI NO: 23121321 NR Description: hypothetical protein [Desulfitobacterium
  misc_feature (115)..(215): Homolog of NCBI NO: 5712722 NR Description: unknown [Pseudomonas sp. BG33R]
  misc_feature (114)..(215): Homolog of NCBI NO: 28868025 NR Description: ribosomal protein L21
  misc_feature (114)..(216): Homolog of NCBI NO: 16803582 NR Description: ribosomal protein L21 [Listeria monocytogenes
  misc_feature (114)..(216): Homolog of NCBI NO: 16800645 NR Description: ribosomal protein L21 [Listeria innocua]
  misc_feature (114)..(215): Homolog of NCBI NO: 15894539 NR Description: Ribosomal protein L21 [Clostridium
  misc_feature (72)..(220): Homolog of NCBI NO: 25407696 NR Description: hypothetical protein AT4g30930 [imported] -
  misc_feature (72)..(220): Homolog of NCBI NO: 18417696 NR Description: WRKY family transcription factor
  misc_feature (49)..(226): Homolog of NCBI NO: 132776 NR Description: 50S RIBOSOMAL PROTEIN L21, CHLOROPLAST PRECURSOR
  misc_feature (17)..(225): Homolog of NCBI NO: 15219695 NR Description: 50S ribosomal protein L21 chloroplast precursor
IHNMIPGLSSSENSTPSSSMRPLPAAAMATATLPLRLLPSKTLTLSTLPSLRRSLSVAALEPRRWRLRAAAEEAPEAVEVEFVEPETEAEEKPAVPEPIEAQLAAAGAGKDADIFAVVMIGSRQYIVMPGRYIYTQRLKGANVNDQIILNKVLLVSTREKAYIGMPVVTNAAVHAVVEEQGRDDKVIVFKYKKKKKYQRKLGHRQPNTRLRITGISGYEEYPADPILDPAAALN

SEQ ID NO: 18179 - protein, 231 aa, Zea mays subsp. mays
  peptide (1)..(231): Ceres Seq. ID no. 12391898
  misc_feature (111)..(207): Pfam Name: Ribosomal prokaryotic L21 protein Pfam Description: Ribosomal prokaryotic L21 protein
  misc_feature (111)..(212): Homolog of NCBI NO: 23121321 NR Description: hypothetical protein [Desulfitobacterium
  misc_feature (112)..(212): Homolog of NCBI NO: 5712722 NR Description: unknown [Pseudomonas sp. BG33R]
  misc_feature (111)..(212): Homolog of NCBI NO: 28868025 NR Description: ribosomal protein L21
  misc_feature (111)..(213): Homolog of NCBI NO: 16803582 NR Description: ribosomal protein L21 [Listeria monocytogenes
  misc_feature (111)..(213): Homolog of NCBI NO: 16800645 NR Description: ribosomal protein L21 [Listeria innocua]
  misc_feature (111)..(212): Homolog of NCBI NO: 15894539 NR Description: Ribosomal protein L21 [Clostridium
  misc_feature (69)..(217): Homolog of NCBI NO: 25407696 NR Description: hypothetical protein AT4g30930 [imported] -
  misc_feature (69)..(217): Homolog of NCBI NO: 18417696 NR Description: WRKY family transcription factor
  misc_feature (46)..(223): Homolog of NCBI NO: 132776 NR Description: 50S RIBOSOMAL PROTEIN L21, CHLOROPLAST PRECURSOR
  misc_feature (14)..(222): Homolog of NCBI NO: 15219695 NR Description: 50S ribosomal protein L21 chloroplast precursor
MIPGLSSSENSTPSSSMRPLPAAAMATATLPLRLLPSKTLTLSTLPSLRRSLSVAALEPRRWRLRAAAEEAPEAVEVEFVEPETEAEEKPAVPEPIEAQLAAAGAGKDADIFAVVMIGSRQYIVMPGRYIYTQRLKGANVNDQIILNKVLLVSTREKAYIGMPVVTNAAVHAVVEEQGRDDKVIVFKYKKKKKYQRKLGHRQPNTRLRITGISGYEEYPADPILDPAAALN

SEQ ID NO: 18180 - protein, 215 aa, Zea mays subsp. mays
  peptide (1)..(215): Ceres Seq. ID no. 12391899
  misc_feature (95)..(191): Pfam Name: Ribosomal prokaryotic L21 protein Pfam Description: Ribosomal prokaryotic L21 protein
  misc_feature (95)..(196): Homolog of NCBI NO: 23121321 NR Description: hypothetical protein [Desulfitobacterium
  misc_feature (96)..(196): Homolog of NCBI NO: 5712722 NR Description: unknown [Pseudomonas sp. BG33R]
  misc_feature (95)..(196): Homolog of NCBI NO: 28868025 NR Description: ribosomal protein L21
  misc_feature (95)..(197): Homolog of NCBI NO: 16803582 NR Description: ribosomal protein L21 [Listeria monocytogenes
  misc_feature (95)..(197): Homolog of NCBI NO: 16800645 NR Description: ribosomal protein L21 [Listeria innocua]
  misc_feature (95)..(196): Homolog of NCBI NO: 15894539 NR Description: Ribosomal protein L21 [Clostridium
  misc_feature (53)..(201): Homolog of NCBI NO: 25407696 NR Description: hypothetical protein AT4g30930 [imported] -
  misc_feature (53)..(201): Homolog of NCBI NO: 18417696 NR Description: WRKY family transcription factor
  misc_feature (30)..(207): Homolog of NCBI NO: 132776 NR Description: 50S RIBOSOMAL PROTEIN L21, CHLOROPLAST PRECURSOR
  misc_feature (1)..(206): Homolog of NCBI NO: 15219695 NR Description: 50S ribosomal protein L21 chloroplast precursor
MRPLPAAAMATATLPLRLLPSKTLTLSTLPSLRRSLSVAALEPRRWRLRAAAEEAPEAVEVEFVEPETEAEEKPAVPEPIEAQLAAAGAGKDADIFAVVMIGSRQYIVMPGRYIYTQRLKGANVNDQIILNKVLLVSTREKAYIGMPVVTNAAVHAVVEEQGRDDKVIVFKYKKKKKYQRKLGHRQPNTRLRITGISGYEEYPADPILDPAAALN

SEQ ID NO: 18181 - DNA, 802 bp, Zea mays subsp. mays
  misc_feature (1)..(802): Ceres Seq. ID no. 12416233
  misc_feature: MA Experiment ID: 108543 Result: Up-regulated in Transcription
acaaggtgatgagcccattcctgactcagcgcaccaagagcaagatcgtcttctgcagccccggcaagtcggcggagaccctcttcaggtacatcgccccggagcaagtccccgtccagttcggcggcctgtacaaggaggacgacaccgagttctccacctccgacgccgtcaccgagctcaccgtgaaaccgtcctccaaggagaccgtcgagatcccagccaccgagaactccaccgtggtgtgggagctccgcgtgctggggtgggaggtgagctacggcgccgagttcacccccgacgcggagggcggctacaccgtcatcgtgcagaagacgcggaaggtctccgcccacgaggagcccatcatgaagggcagcttcaaggccacggagcccggcaagctggtgctgggcgtgaacaacccggcgtccaggaagaagaagctgctgtgccggttcaaggtgaggagcgccnccgcctgatgagggtcgttggtctgggtcccagcaggtacagcctgccagctgcttgaccnccagcccgacatgtataattcgatcgatcgccaaccaggtccataccgccnccatttgaatgaacatgctgcattgcattacatgataggagagagagagagagagagagaggncaataaagagtttctgcttcctagctaggcccgttccgtgtcctggtcgttctttgattatttgttggcttgctgttcttttttttccttggggggagggtcgcgtttgnatgtgtttattncttgaatgaaaacaaaagtgagcttgtt

SEQ ID NO: 18182 - protein, 177 aa, Zea mays subsp. mays
  peptide (1)..(177): Ceres Seq. ID no. 12416234
  misc_feature (159)..(159): Xaa is any aa, unknown or other
QGDEPIPDSAHQEQDRLLQPRQVGGDPLQVHRPGASPRPVRRPVQGGRHRVLHLRRRHRAHRETVLQGDRRDPSHRELHRGVGAPRAGVGGELRRRVHPRRGGRLHRHRAEDAEGLRPRGAHHEGQLQGHGARQAGAGREQPGVQEEEAAVPVQGEERXRLMRVVGLGPSRYSLPAA

SEQ ID NO: 18183 - protein, 160 aa, Zea mays subsp. mays
  peptide (1)..(160): Ceres Seq. ID no. 12416235
  misc_feature (1)..(56): Pfam Name: CRAL/TRIO domain Pfam Description: CRAL/TRIO domain
  misc_feature (1)..(156): Homolog of NCBI NO: 15218382 NR Description: cytosolic factor, putative
  misc_feature (1)..(72): Homolog of NCBI NO: 25407487 NR Description: hypothetical protein AT4g09160 [imported] -
  misc_feature (76)..(156): Homolog of NCBI NO: 25407487 NR Description: hypothetical protein AT4g09160 [imported] -
  misc_feature (2)..(157): Homolog of NCBI NO: 18397616 NR Description: expressed protein
  misc_feature (2)..(157): Homolog of NCBI NO: 14334978 NR Description: unknown protein [Arabidopsis thaliana]
  misc_feature (2)..(156): Homolog of NCBI NO: 15218383 NR Description: cytosolic factor, putative
  misc_feature (2)..(156): Homolog of NCBI NO: 15081614 NR Description: At1g72160/T9N14_8 [Arabidopsis thaliana]
  misc_feature (1)..(156): Homolog of NCBI NO: 30680992 NR Description: expressed protein [Arabidopsis thaliana]
  misc_feature (1)..(154): Homolog of NCBI NO: 8894548 NR Description: hypothetical protein [Cicer arietinum]
  misc_feature (1)..(157): Homolog of NCBI NO: 34907288 NR Description: contains ESTs
  misc_feature (159)..(159): Xaa is any aa, unknown or other
KVMSPFLTQRTKSKIVFCSPGKSAETLFRYIAPEQVPVQFGGLYKEDDTEFSTSDAVTELTVKPSSKETVEIPATENSTVVWELRVLGWEVSYGAEFTPDAEGGYTVIVQKTRKVSAHEEPIMKGSFKATEPGKLVLGVNNPASRKKKLLCRFKVRSAXA

SEQ ID NO: 18184 - protein, 158 aa, Zea mays subsp. mays
  peptide (1)..(158): Ceres Seq. ID no. 12416236
  misc_feature (1)..(54): Pfam Name: CRAL/TRIO domain Pfam Description: CRAL/TRIO domain
  misc_feature (1)..(154): Homolog of NCBI NO: 15218382 NR Description: cytosolic factor, putative
  misc_feature (1)..(70): Homolog of NCBI NO: 25407487 NR Description: hypothetical protein AT4g09160 [imported] -
  misc_feature (74)..(154): Homolog of NCBI NO: 25407487 NR Description: hypothetical protein AT4g09160 [imported] -
  misc_feature (1)..(155): Homolog of NCBI NO: 18397616 NR Description: expressed protein
  misc_feature (1)..(155): Homolog of NCBI NO: 14334978 NR Description: unknown protein [Arabidopsis thaliana]
  misc_feature (1)..(154): Homolog of NCBI NO: 15218383 NR Description: cytosolic factor, putative
  misc_feature (1)..(154): Homolog of NCBI NO: 15081614 NR Description: At1g72160/T9N14_8 [Arabidopsis thaliana]
  misc_feature (1)..(154): Homolog of NCBI NO: 30680992 NR Description: expressed protein [Arabidopsis thaliana]
  misc_feature (1)..(152): Homolog of NCBI NO: 8894548 NR Description: hypothetical protein [Cicer arietinum]
  misc_feature (1)..(155): Homolog of NCBI NO: 34907288 NR Description: contains ESTs
  misc_feature (157)..(157): Xaa is any aa, unknown or other
MSPFLTQRTKSKIVFCSPGKSAETLFRYIAPEQVPVQFGGLYKEDDTEFSTSDAVTELTVKPSSKETVEIPATENSTVVWELRVLGWEVSYGAEFTPDAEGGYTVIVQKTRKVSAHEEPIMKGSFKATEPGKLVLGVNNPASRKKKLLCRFKVRSAXA

SEQ ID NO: 18185 - DNA, 968 bp, Zea mays subsp. mays
  misc_feature (1)..(968): Ceres Seq. ID no. 12377743
  misc_feature: MA Experiment ID: 108515 Result: Up-regulated in Transcription
  misc_feature: MA Experiment 108515 PARAMETER Experiment Name: Zm_2mM_SA_P Parameter: Age (day) Value: 8
  misc_feature: MA Experiment 108515 PARAMETER Experiment Name: Zm_2mM_SA_P Parameter: Organism Value: Zea mays
  misc_feature: MA Experiment 108515 PARAMETER Experiment Name: Zm_2mM_SA_P Parameter: Plant Line Value: 35A19
  misc_feature: MA Experiment 108515 PARAMETER Experiment Name: Zm_2mM_SA_P Parameter: Timepoint (hr) Value: 12
  misc_feature: MA Experiment 108515 PARAMETER Experiment Name: Zm_2mM_SA_P Parameter: Tissue Value: Aerial
  misc_feature: MA Experiment 108515 PARAMETER Experiment Name: Zm_2mM_SA_P Parameter: Treatment Value: 2mM SA vs. No Treatment
  misc_feature: MA Experiment ID: 20000630 Result: Up-regulated in Transcription
  misc_feature: MA Experiment 20000630 PARAMETER Experiment Name: Zm_Herbicide-Treatments_P Parameter: Timepoint (hr) Value: 4
  misc_feature: MA Experiment 20000630 PARAMETER Experiment Name: Zm_Herbicide-Treatments_P Parameter: Tissue Value: Aerial
  misc_feature: MA Experiment 20000630 PARAMETER Experiment Name: Zm_Herbicide-Treatments_P Parameter: Treatment Value: Roundup vs. No Treatment
gagactcgatcgagagctaatgcaagaaaagaaagaggtgcgagcaagagggatgaacggcgccggcaatggtgagccctcccttgtagttgtagcggaggaagggccgccgaacgatggcaacggcgccggggttcacgcacccaacttcggcgcgaatgaagcggacacgctgctggtggtggcgacactgatcacagcgctgacgtaccagctgggcaccaacatcccgggcgggtactggcaggacgatctcaaggggcacgacggcctcgcggggcacgtcgccggagacccgatcatgcgtgacaagcaccggcggcggtactggctgttcatggcggcgagctgggtggggttcggcacctcgatgctgctcacggtggggttcatcacgggggtgcccgcgaggtcgcgcttcgtccggttcgcgttcctgctggcctactccagcctcgtgctcacgttcgtgacgtcgcagccgcgcacgtcgctcttctgggacctcatcatntgggctgtcgtcatggcgctgctcgccatcgccaccaagtacctgcgcctcgacaggctccccagatgggcgcgtaccctgtgccctgctcctccatccgngttntgctgctcacgttcgtgactcgtgagcgagctcaccatggacgatcgacctcgtcatntgggtcgccgtcatggcatcgacgcatcgtcgccatcgtcaccaagtaccagcacgtcgacagacctccccggctgggtgcacnccgtctatcttcagtaccagcttgctagtagcaacaatgtgtgtgttttcaaaaaaaaggaagaatgtgtttttatctttgtttaattttggccgtaatgtcttgtttagtggctgatgttcttgttctctgctactgtgtgcgtcctcattagttgatctgaatctgatgttaaatgtatcgctgttcagtnngtgctgttcttgt

SEQ ID NO: 18186 - protein, 211 aa, Zea mays subsp. mays
  peptide (1)..(211): Ceres Seq. ID no. 12377744
  misc_feature (72)..(181): Homolog of NCBI NO: 34902874 NR Description: unnamed protein product [Oryza sativa (japonica
  misc_feature (14)..(194): Homolog of NCBI NO: 34902868 NR Description: unnamed protein product [Oryza sativa (japonica
  misc_feature (171)..(171): Xaa is any aa, unknown or other
  misc_feature (205)..(205): Xaa is any aa, unknown or other
  misc_feature (206)..(206): Xaa is any aa, unknown or other
RLDRELMQEKKEVRARGMNGAGNGEPSLVVVAEEGPPNDGNGAGVHAPNFGANEADTLLVVATLITALTYQLGTNIPGGYWQDDLKGHDGLAGHVAGDPIMRDKHRRRYWLFMAASWVGFGTSMLLTVGFITGVPARSRFVRFAFLLAYSSLVLTFVTSQPRTSLFWDLIXWAVVMALLAIATKYLRLDRLPRWARTLCPAPPSXXCCSRS

SEQ ID NO: 18187 - protein, 205 aa, Zea mays subsp. mays
  peptide (1)..(205): Ceres Seq. ID no. 12377745
  misc_feature (66)..(175): Homolog of NCBI NO: 34902874 NR Description: unnamed protein product [Oryza sativa (japonica
  misc_feature (8)..(188): Homolog of NCBI NO: 34902868 NR Description: unnamed protein product [Oryza sativa (japonica
  misc_feature (165)..(165): Xaa is any aa, unknown or other
  misc_feature (199)..(199): Xaa is any aa, unknown or other
  misc_feature (200)..(200): Xaa is any aa, unknown or other
MQEKKEVRARGMNGAGNGEPSLVVVAEEGPPNDGNGAGVHAPNFGANEADTLLVVATLITALTYQLGTNIPGGYWQDDLKGHDGLAGHVAGDPIMRDKHRRRYWLFMAASWVGFGTSMLLTVGFITGVPARSRFVRFAFLLAYSSLVLTFVTSQPRTSLFWDLIXWAVVMALLAIATKYLRLDRLPRWARTLCPAPPSXXCCSRS

SEQ ID NO: 18188 - protein, 194 aa, Zea mays subsp. mays
  peptide (1)..(194): Ceres Seq. ID no. 12377746
  misc_feature (55)..(164): Homolog of NCBI NO: 34902874 NR Description: unnamed protein product [Oryza sativa (japonica
  misc_feature (1)..(177): Homolog of NCBI NO: 34902868 NR Description: unnamed protein product [Oryza sativa (japonica
  misc_feature (154)..(154): Xaa is any aa, unknown or other
  misc_feature (188)..(188): Xaa is any aa, unknown or other
  misc_feature (189)..(189): Xaa is any aa, unknown or other
MNGAGNGEPSLVVVAEEGPPNDGNGAGVHAPNFGANEADTLLVVATLITALTYQLGTNIPGGYWQDDLKGHDGLAGHVAGDPIMRDKHRRRYWLFMAASWVGFGTSMLLTVGFITGVPARSRFVRFAFLLAYSSLVLTFVTSQPRTSLFWDLIXWAVVMALLAIATKYLRLDRLPRWARTLCPAPPSXXCCSRS

SEQ ID NO: 18189 - DNA, 764 bp, Zea mays subsp. mays
  misc_feature (1)..(764): Ceres Seq. ID no. 12383783
  misc_feature: MA Experiment ID: 108687 Result: Down-regulated in Transcription
  misc_feature: MA Experiment 108687 PARAMETER Experiment Name: Zm_Embryos-Flowers__P Parameter: Tissue Value: Embryo vs. Aerial+
cttctagagctacttgcggtcgattggttcaaagttaatgaacgctttgattcagttgccttacatcccaaaagccttgtgcaatcagaagctgcaaagaaacttcctttcatattggttataaatttgcaggtgccagcgaaaccaaattataacttggttatgtactacgctgcagagagaccagtgaacaaagattctttgttgggtagattcattgatggaactgatgcataccgagatgccagatttaaacttataccaagcattgttgagggttattggatggttaagcgtgctgtaggaacaaaagcttgccttctgggtaaagcagtaacgtgcaattatcttcgccaggataactttctggagatagatgttgacatcggttcatcatctgttgcccggagcattattggtctagtattgggatatgtcacaagcatagttgttgatcttgctattcttattgaggccaaggaagagaaagagctccccgagtacattctgggcactgttcgtctgaaccgtgtgaatcccgacagtgctgtatcaatctaattacgtttctagccgatctgtgcaaatttactcttatcctcttttattctgagagaaacagcgtggcattttgaaaatgtgaaatagcattactatttgctgatccccattcgagggtaacatatgtaaattggcatgaggcatgactacgtgacgcctttcgtaaatagaataaatcaatggttatgtaatattaatatccc

SEQ ID NO: 18190 - protein, 186 aa, Zea mays subsp. mays
  peptide (1)..(186): Ceres Seq. ID no. 12383784
  misc_feature (1)..(186): Homolog of NCBI NO: 15226386 NR Description: unknown protein; protein id: At2g28320.1
  misc_feature (1)..(184): Homolog of NCBI NO: 30694123 NR Description: expressed protein [Arabidopsis thaliana]
  misc_feature (1)..(184): Homolog of NCBI NO: 26451069 NR Description: unknown protein [Arabidopsis thaliana]
  misc_feature (1)..(184): Homolog of NCBI NO: 11358377 NR Description: hypothetical protein T5N23.160 - Arabidopsis
  misc_feature (1)..(183): Homolog of NCBI NO: 21592409 NR Description: unknown [Arabidopsis thaliana]
  misc_feature (1)..(184): Homolog of NCBI NO: 22327599 NR Description: putative protein
  misc_feature (1)..(184): Homolog of NCBI NO: 37534986 NR Description: unknown protein [Oryza sativa (japonica
  misc_feature (1)..(186): Homolog of NCBI NO: 37535414 NR Description: unknown protein [Oryza sativa (japonica
  misc_feature (1)..(185): Homolog of NCBI NO: 18421431 NR Description: putative protein
  misc_feature (1)..(185): Homolog of NCBI NO: 8978350 NR Description: emb|CAB77600.1~gene_id:K3D20.2~similar to unknown
LLELLAVDWFKVNERFDSVALHPKSLVQSEAAKKLPFILVINLQVPAKPNYNLVMYYAAERPVNKDSLLGRFIDGTDAYRDARFKLIPSIVEGYWMVKRAVGTKACLLGKAVTCNYLRQDNFLEIDVDIGSSSVARSIIGLVLGYVTSIVVDLAILIEAKEEKELPEYILGTVRLNRVNPDSAVSI

SEQ ID NO: 18191 - protein, 132 aa, Zea mays subsp. mays
  peptide (1)..(132): Ceres Seq. ID no. 12383785
  misc_feature (1)..(132): Homolog of NCBI NO: 15226386 NR Description: unknown protein; protein id: At2g28320.1
  misc_feature (1)..(130): Homolog of NCBI NO: 30694123 NR Description: expressed protein [Arabidopsis thaliana]
  misc_feature (1)..(130): Homolog of NCBI NO: 26451069 NR Description: unknown protein [Arabidopsis thaliana]
  misc_feature (1)..(130): Homolog of NCBI NO: 11358377 NR Description: hypothetical protein T5N23.160 - Arabidopsis
  misc_feature (1)..(129): Homolog of NCBI NO: 21592409 NR Description: unknown [Arabidopsis thaliana]
  misc_feature (1)..(130): Homolog of NCBI NO: 22327599 NR Description: putative protein
  misc_feature (1)..(130): Homolog of NCBI NO: 37534986 NR Description: unknown protein [Oryza sativa (japonica
  misc_feature (1)..(132): Homolog of NCBI NO: 37535414 NR Description: unknown protein [Oryza sativa (japonica
  misc_feature (1)..(131): Homolog of NCBI NO: 18421431 NR Description: putative protein
  misc_feature (1)..(131): Homolog of NCBI NO: 8978350 NR Description: emb|CAB77600.1~gene_id:K3D20.2~similar to unknown
MYYAAERPVNKDSLLGRFIDGTDAYRDARFKLIPSIVEGYWMVKRAVGTKACLLGKAVTCNYLRQDNFLEIDVDIGSSSVARSIIGLVLGYVTSIVVDLAILIEAKEEKELPEYILGTVRLNRVNPDSAVSI

SEQ ID NO: 18192 - DNA, 502 bp, Zea mays subsp. mays
  misc_feature (1)..(502): Ceres Seq. ID no. 1683503
  misc_feature: MA Experiment ID: 108527 Result: Down-regulated in Transcription
  misc_feature: MA Experiment 108527 PARAMETER Experiment Name: Zm_5mM_NO_P Parameter: Age (day) Value: 8
  misc_feature: MA Experiment 108527 PARAMETER Experiment Name: Zm_5mM_NO_P Parameter: Organism Value: Zea mays
  misc_feature: MA Experiment 108527 PARAMETER Experiment Name: Zm_5mM_NO_P Parameter: Plant Line Value: 35A19
  misc_feature: MA Experiment 108527 PARAMETER Experiment Name: Zm_5mM_NO_P Parameter: Timepoint (hr) Value: 6
  misc_feature: MA Experiment 108527 PARAMETER Experiment Name: Zm_5mM_NO_P Parameter: Tissue Value: Aerial
  misc_feature: MA Experiment 108527 PARAMETER Experiment Name: Zm_5mM_NO_P Parameter: Treatment Value: 5mM NO vs. No Treatment
  misc_feature: MA Experiment ID: 108529 Result: Up-regulated in Transcription
  misc_feature: MA Experiment 108529 PARAMETER Experiment Name: Zm_Imbibed_Seeds_P Parameter: Age (day) Value: 5 vs. 2
  misc_feature: MA Experiment 108529 PARAMETER Experiment Name: Zm_Imbibed_Seeds_P Parameter: Organism Value: Zea mays
  misc_feature: MA Experiment 108529 PARAMETER Experiment Name: Zm_Imbibed_Seeds_P Parameter: Plant Line Value: 35A19
  misc_feature: MA Experiment 108529 PARAMETER Experiment Name: Zm_Imbibed_Seeds_P Parameter: Tissue Value: Roots vs. Embryo
  misc_feature: MA Experiment ID: 108530 Result: Up-regulated in Transcription
  misc_feature: MA Experiment 108530 PARAMETER Experiment Name: Zm_Imbibed_Seeds_P Parameter: Age (day) Value: 6 vs. 2
  misc_feature: MA Experiment 108530 PARAMETER Experiment Name: Zm_Imbibed_Seeds_P Parameter: Organism Value: Zea mays
  misc_feature: MA Experiment 108530 PARAMETER Experiment Name: Zm_Imbibed_Seeds_P Parameter: Plant Line Value: 35A19
  misc_feature: MA Experiment 108530 PARAMETER Experiment Name: Zm_Imbibed_Seeds_P Parameter: Tissue Value: Aerial vs. Embryo
  misc_feature: MA Experiment ID: 108546 Result: Up-regulated in Transcription
  misc_feature: MA Experiment 108546 PARAMETER Experiment Name: Zm_Imbibed_Seeds_P Parameter: Age (day) Value: 3 vs. 2
  misc_feature: MA Experiment 108546 PARAMETER Experiment Name: Zm_Imbibed_Seeds_P Parameter: Organism Value: Zea mays
  misc_feature: MA Experiment 108546 PARAMETER Experiment Name: Zm_Imbibed_Seeds_P Parameter: Plant Line Value: 35A19
  misc_feature: MA Experiment 108546 PARAMETER Experiment Name: Zm_Imbibed_Seeds_P Parameter: Tissue Value: Roots vs. Embryo
  misc_feature: MA Experiment ID: 20000629 Result: Up-regulated in Transcription
  misc_feature: MA Experiment 20000629 PARAMETER Experiment Name: Zm_Herbicide-Treatments_P Parameter: Timepoint (hr) Value: 12
  misc_feature: MA Experiment 20000629 PARAMETER Experiment Name: Zm_Herbicide-Treatments_P Parameter: Tissue Value: Aerial
  misc_feature: MA Experiment 20000629 PARAMETER Experiment Name: Zm_Herbicide-Treatments_P Parameter: Treatment Value: Trimec vs. No Treatment
aggcccagagaaggctcgcgcagaacagagaggctgcccggaagagtcgcctgcggaagaaggcctacatccagcagctagagacaagccgcatgaagctgtcgcagctagagctggagcttcaacgggcgcggcagcagcagggtgcatatgcgaatagtggaagcatgggagactcggctctcggctacagatgcccgatagatccaggcgttgctgggttcgagatcgactacagccactgggtggacgagcagaagaggcacacaacggagctgacgtcggcgctccagggccagcagacgtcggagctggagctccgcctgctggtggagacggggctcagcaactacgagcgcctgttcaggatcaaggcggcggcggccaacgcggacgtgttctacgtcatgtcgggcttgtggaagacccccgccgagaggttcttcctctggatcggcgggttccggccgtcggaagtcctcaagatcctgagcccgcagct

SEQ ID NO: 18193 - protein, 166 aa, Zea mays subsp. mays
  peptide (1)..(166): Ceres Seq. ID no. 1683504
  misc_feature (2)..(54): Pfam Name: bZIP transcription factor Pfam Description: bZIP transcription factor
  misc_feature (2)..(165): Homolog of NCBI NO: 7488719 NR Description: transcription factor STGA1 - soybean
  misc_feature (2)..(165): Homolog of NCBI NO: 1076664 NR Description: transcription factor D11 - potato
  misc_feature (2)..(165): Homolog of NCBI NO: 15148922 NR Description: TGA-type basic leucine zipper protein TGA1.1
  misc_feature (2)..(165): Homolog of NCBI NO: 15238046 NR Description: bZIP transcription factor, OBF4; protein id:
  misc_feature (2)..(165): Homolog of NCBI NO: 1076422 NR Description: transcription factor OBF4 - Arabidopsis thaliana
  misc_feature (2)..(165): Homolog of NCBI NO: 13195752 NR Description: mas-binding factor MBF1 [Solanum tuberosum]
  misc_feature (2)..(165): Homolog of NCBI NO: 21592661 NR Description: DNA binding protein TGA1a homolog [Arabidopsis
  misc_feature (2)..(165): Homolog of NCBI NO: 15238367 NR Description: bZIP transcription factor, TGA1
  misc_feature (2)..(165): Homolog of NCBI NO: 320563 NR Description: transcription factor tga1 - Arabidopsis thaliana
  misc_feature (3)..(165): Homolog of NCBI NO: 39545747 NR Description: OSJNBb0034I13.13 [Oryza sativa (japonica
AQRRLAQNREAARKSRLRKKAYIQQLETSRMKLSQLELELQRARQQQGAYANSGSMGDSALGYRCPIDPGVAGFEIDYSHWVDEQKRHTTELTSALQGQQTSELELRLLVETGLSNYERLFRIKAAAANADVFYVMSGLWKTPAERFFLWIGGFRPSEVLKILSPQ

SEQ ID NO: 18194 - protein, 136 aa, Zea mays subsp. mays
  peptide (1)..(136): Ceres Seq. ID no. 1683505
  misc_feature (1)..(135): Homolog of NCBI NO: 7488719 NR Description: transcription factor STGA1 - soybean
  misc_feature (1)..(135): Homolog of NCBI NO: 1076664 NR Description: transcription factor D11 - potato
  misc_feature (1)..(135): Homolog of NCBI NO: 15148922 NR Description: TGA-type basic leucine zipper protein TGA1.1
  misc_feature (1)..(135): Homolog of NCBI NO: 15238046 NR Description: bZIP transcription factor, OBF4; protein id:
  misc_feature (1)..(135): Homolog of NCBI NO: 1076422 NR Description: transcription factor OBF4 - Arabidopsis thaliana
  misc_feature (1)..(135): Homolog of NCBI NO: 13195752 NR Description: mas-binding factor MBF1 [Solanum tuberosum]
  misc_feature (1)..(135): Homolog of NCBI NO: 15238367 NR Description: bZIP transcription factor, TGA1
  misc_feature (1)..(135): Homolog of NCBI NO: 21592661 NR Description: DNA binding protein TGA1a homolog [Arabidopsis
  misc_feature (1)..(135): Homolog of NCBI NO: 320563 NR Description: transcription factor tga1 - Arabidopsis thaliana
  misc_feature (1)..(135): Homolog of NCBI NO: 39545747 NR Description: OSJNBb0034I13.13 [Oryza sativa (japonica
MKLSQLELELQRARQQQGAYANSGSMGDSALGYRCPIDPGVAGFEIDYSHWVDEQKRHTTELTSALQGQQTSELELRLLVETGLSNYERLFRIKAAAANADVFYVMSGLWKTPAERFFLWIGGFRPSEVLKILSPQ

SEQ ID NO: 18195 - protein, 111 aa, Zea mays subsp. mays
  peptide (1)..(111): Ceres Seq. ID no. 1683506
  misc_feature (1)..(110): Homolog of NCBI NO: 7488719 NR Description: transcription factor STGA1 - soybean
  misc_feature (1)..(110): Homolog of NCBI NO: 1076664 NR Description: transcription factor D11 - potato
  misc_feature (1)..(110): Homolog of NCBI NO: 15148922 NR Description: TGA-type basic leucine zipper protein TGA1.1
  misc_feature (1)..(110): Homolog of NCBI NO: 15238046 NR Description: bZIP transcription factor, OBF4; protein id:
  misc_feature (1)..(110): Homolog of NCBI NO: 1076422 NR Description: transcription factor OBF4 - Arabidopsis thaliana
  misc_feature (1)..(110): Homolog of NCBI NO: 13195752 NR Description: mas-binding factor MBF1 [Solanum tuberosum]
  misc_feature (1)..(110): Homolog of NCBI NO: 21592661 NR Description: DNA binding protein TGA1a homolog [Arabidopsis
  misc_feature (1)..(110): Homolog of NCBI NO: 15238367 NR Description: bZIP transcription factor, TGA1
  misc_feature (1)..(110): Homolog of NCBI NO: 320563 NR Description: transcription factor tga1 - Arabidopsis thaliana
  misc_feature (1)..(110): Homolog of NCBI NO: 39545747 NR Description: OSJNBb0034I13.13 [Oryza sativa (japonica
MGDSALGYRCPIDPGVAGFEIDYSHWVDEQKRHTTELTSALQGQQTSELELRLLVETGLSNYERLFRIKAAAANADVFYVMSGLWKTPAERFFLWIGGFRPSEVLKILSPQ

SEQ ID NO: 18196 - DNA, 1087 bp, Zea mays subsp. mays
  misc_feature (1)..(1087): Ceres Seq. ID no. 12416462
  misc_feature: MA Experiment ID: 108528 Result: Down-regulated in Transcription
  misc_feature: MA Experiment 108528 PARAMETER Experiment Name: Zm_Imbibed_Seeds_P Parameter: Age (day) Value: 5 vs. 2
  misc_feature: MA Experiment 108528 PARAMETER Experiment Name: Zm_Imbibed_Seeds_P Parameter: Organism Value: Zea mays
  misc_feature: MA Experiment 108528 PARAMETER Experiment Name: Zm_Imbibed_Seeds_P Parameter: Plant Line Value: 35A19
  misc_feature: MA Experiment 108528 PARAMETER Experiment Name: Zm_Imbibed_Seeds_P Parameter: Tissue Value: Aerial vs. Embryo
  misc_feature: MA Experiment ID: 108530 Result: Down-regulated in Transcription
  misc_feature: MA Experiment 108530 PARAMETER Experiment Name: Zm_Imbibed_Seeds_P Parameter: Age (day) Value: 6 vs. 2
  misc_feature: MA Experiment 108530 PARAMETER Experiment Name: Zm_Imbibed_Seeds_P Parameter: Organism Value: Zea mays
  misc_feature: MA Experiment 108530 PARAMETER Experiment Name: Zm_Imbibed_Seeds_P Parameter: Plant Line Value: 35A19
  misc_feature: MA Experiment 108530 PARAMETER Experiment Name: Zm_Imbibed_Seeds_P Parameter: Tissue Value: Aerial vs. Embryo
  misc_feature: MA Experiment ID: 108534 Result: Down-regulated in Transcription
  misc_feature: MA Experiment 108534 PARAMETER Experiment Name: Zm_4deg_Cold_P Parameter: Age (hr) Value: 8
  misc_feature: MA Experiment 108534 PARAMETER Experiment Name: Zm_4deg_Cold_P Parameter: Organism Value: Zea mays
  misc_feature: MA Experiment 108534 PARAMETER Experiment Name: Zm_4deg_Cold_P Parameter: Plant Line Value: 35A19
  misc_feature: MA Experiment 108534 PARAMETER Experiment Name: Zm_4deg_Cold_P Parameter: Temperature (deg C) Value: 4 vs. 22
  misc_feature: MA Experiment 108534 PARAMETER Experiment Name: Zm_4deg_Cold_P Parameter: Timepoint (hr) Value: 6
  misc_feature: MA Experiment 108534 PARAMETER Experiment Name: Zm_4deg_Cold_P Parameter: Tissue Value: Aerial
  misc_feature: MA Experiment ID: 108597 Result: Down-regulated in Transcription
  misc_feature: MA Experiment 108597 PARAMETER Experiment Name: Zm_100uM_ABA_P Parameter: Age (day) Value: 9
  misc_feature: MA Experiment 108597 PARAMETER Experiment Name: Zm_100uM_ABA_P Parameter: Organism Value: Zea mays
  misc_feature: MA Experiment 108597 PARAMETER Experiment Name: Zm_100uM_ABA_P Parameter: Plant Line Value: 35A19
  misc_feature: MA Experiment 108597 PARAMETER Experiment Name: Zm_100uM_ABA_P Parameter: Timepoint (hr) Value: 24
  misc_feature: MA Experiment 108597 PARAMETER Experiment Name: Zm_100uM_ABA_P Parameter: Tissue Value: Aerial
  misc_feature: MA Experiment 108597 PARAMETER Experiment Name: Zm_100uM_ABA_P Parameter: Treatment Value: 100uM ABA vs. No Treatment
  misc_feature: MA Experiment ID: 108689 Result: Down-regulated in Transcription
  misc_feature: MA Experiment 108689 PARAMETER Experiment Name: Zm_Drought_Roots_P Parameter: Age (day) Value: 9
  misc_feature: MA Experiment 108689 PARAMETER Experiment Name: Zm_Drought_Roots_P Parameter: Organism Value: Zea mays
  misc_feature: MA Experiment 108689 PARAMETER Experiment Name: Zm_Drought_Roots_P Parameter: Plant Line Value: 35A19
  misc_feature: MA Experiment 108689 PARAMETER Experiment Name: Zm_Drought_Roots_P Parameter: Timepoint (hr) Value: 24
  misc_feature: MA Experiment 108689 PARAMETER Experiment Name: Zm_Drought_Roots_P Parameter: Tissue Value: Roots
  misc_feature: MA Experiment 108689 PARAMETER Experiment Name: Zm_Drought_Roots_P Parameter: Treatment Value: Drought vs. No Drought
  misc_feature: MA Experiment ID: 20000535 Result: Down-regulated in Transcription
  misc_feature: MA Experiment 20000535 PARAMETER Experiment Name: Zm_Hybrid_Seed_Dev_P Parameter: DAP Value: 30 vs. 12
  misc_feature: MA Experiment 20000535 PARAMETER Experiment Name: Zm_Hybrid_Seed_Dev_P Parameter: Organism Value: Zea mays
  misc_feature: MA Experiment 20000535 PARAMETER Experiment Name: Zm_Hybrid_Seed_Dev_P Parameter: Plant Line Value: 35A19
  misc_feature: MA Experiment 20000535 PARAMETER Experiment Name: Zm_Hybrid_Seed_Dev_P Parameter: Tissue Value: Embryo vs. Unfert Floret
gcacgagaccattacctagaacatcctaatcgaaaaagttccttcggttgctaacatctctagccgagacatttgacattttgacttgaacaatctgctcatctaccactccggcactcccacgccgggccgcgcggatcgcatcgagtttgagtggagtaggcggcgggcagcgaatcagcgatgaaggtgcagtgcgacgtgtgcgcggccgaggcggcctccgtcttctgctgcgccgacgaggccgcgctgtgcgacgcgtgcgacgaccgcgtccaccgcgccaacaagctcgcggggaagcaccgccgcttctccctcctccacccctgttcgtcctctgcgcagaagccgccgctctgcgacatctgccaggagcggagaggcttcttgttctgcaaggaggacagggcgatcctgtgccgggagtgcgacgcgccggtgcacagcgcgaacgacatgacgaggcggcacagccggttcctgctcaccggcgtgcgcctctcgtcagcgccggtggactctgctgacccatcagaaggggaggaggaggaggagcaggagaacagcagcaggcccggcaacggcgagtcctgcagcggcggcgccggcgccggcgcgaccacggcgaccgccagcgacgggagcagcatctccgagtacctgaccaagaccctgcccgggtggcacgtcgaggacttcctcgttgacgacgcgtacgccagcgacgtcggcgcctgctcagacggcctttatcagggacaagatggacagatcagcggggtgctgcaagaagcttacatgccgtggacggggcgggagctggtgccctctgacgtcgcagacgagcgggacaactgggagcggtgggtgccgcagatgcacgcggagttcgccggcgacagcaagcggcccagagcgtcgccttcgcctccctgttcgtactggtgaaaagctcgccgttattagtagagttgatttgtactgggtaccgtaggaacgaagagaaagatgagccaaaaaatcatggaacggaccggtgtttctctgttggattattattgggtcgatttcgatcgagctc

SEQ ID NO: 18197 - protein, 256 aa, Zea mays subsp. mays
  peptide (1)..(256): Ceres Seq. ID no. 12416463
  misc_feature (1)..(47): Pfam Name: B-box zinc finger Pfam Description: B-box zinc finger
  misc_feature (1)..(138): Homolog of NCBI NO: 15222289 NR Description: CONSTANS B-box zinc finger family protein
  misc_feature (1)..(226): Homolog of NCBI NO: 22329252 NR Description: CONSTANS B-box zinc finger family protein
  misc_feature (1)..(226): Homolog of NCBI NO: 26452767 NR Description: putative zinc finger protein [Arabidopsis
  misc_feature (142)..(175): Homolog of NCBI NO: 7485796 NR Description: hypothetical protein F19H22.170 - Arabidopsis
  misc_feature (1)..(119): Homolog of NCBI NO: 17433085 NR Description: Zinc finger protein constans-like 7
  misc_feature (1)..(183): Homolog of NCBI NO: 3618310 NR Description: zinc finger protein [Oryza sativa (japonica
  misc_feature (1)..(119): Homolog of NCBI NO: 18412037 NR Description: CONSTANS B-box zinc finger family protein
  misc_feature (1)..(157): Homolog of NCBI NO: 7485796 NR Description: hypothetical protein F19H22.170 - Arabidopsis
  misc_feature (1)..(182): Homolog of NCBI NO: 3618312 NR Description: zinc finger protein [Oryza sativa (japonica
  misc_feature (1)..(256): Homolog of NCBI NO: 38344979 NR Description: OSJNBa0011L07.9 [Oryza sativa (japonica
MKVQCDVCAAEAASVFCCADEAALCDACDDRVHRANKLAGKHRRFSLLHPCSSSAQKPPLCDICQERRGFLFCKEDRAILCRECDAPVHSANDMTRRHSRFLLTGVRLSSAPVDSADPSEGEEEEEQENSSRPGNGESCSGGAGAGATTATASDGSSISEYLTKTLPGWHVEDFLVDDAYASDVGACSDGLYQGQDGQISGVLQEAYMPWTGRELVPSDVADERDNWERWVPQMHAEFAGDSKRPRASPSPPCSYW

SEQ ID NO: 18198 - protein, 163 aa, Zea mays subsp. mays
  peptide (1)..(163): Ceres Seq. ID no. 12416464
  misc_feature (1)..(26): Homolog of NCBI NO: 18412037 NR Description: CONSTANS B-box zinc finger family protein
  misc_feature (1)..(26): Homolog of NCBI NO: 17433085 NR Description: Zinc finger protein constans-like 7
  misc_feature (1)..(90): Homolog of NCBI NO: 3618310 NR Description: zinc finger protein [Oryza sativa (japonica
  misc_feature (1)..(45): Homolog of NCBI NO: 15222289 NR Description: CONSTANS B-box zinc finger family protein
  misc_feature (1)..(133): Homolog of NCBI NO: 22329252 NR Description: CONSTANS B-box zinc finger family protein
  misc_feature (1)..(133): Homolog of NCBI NO: 26452767 NR Description: putative zinc finger protein [Arabidopsis
  misc_feature (49)..(82): Homolog of NCBI NO: 7485796 NR Description: hypothetical protein F19H22.170 - Arabidopsis
  misc_feature (1)..(64): Homolog of NCBI NO: 7485796 NR Description: hypothetical protein F19H22.170 - Arabidopsis
  misc_feature (1)..(89): Homolog of NCBI NO: 3618312 NR Description: zinc finger protein [Oryza sativa (japonica
  misc_feature (1)..(163): Homolog of NCBI NO: 38344979 NR Description: OSJNBa0011L07.9 [Oryza sativa (japonica
MTRRHSRFLLTGVRLSSAPVDSADPSEGEEEEEQENSSRPGNGESCSGGAGAGATTATASDGSSISEYLTKTLPGWHVEDFLVDDAYASDVGACSDGLYQGQDGQISGVLQEAYMPWTGRELVPSDVADERDNWERWVPQMHAEFAGDSKRPRASPSPPCSYW

SEQ ID NO: 18199 - DNA, 711 bp, Zea mays subsp. mays
  misc_feature (1)..(711): Ceres Seq. ID no. 12354862
  misc_feature: MA Experiment ID: 108527 Result: Down-regulated in Transcription
  misc_feature: MA Experiment 108527 PARAMETER Experiment Name: Zm_5mM_NO_P Parameter: Age (day) Value: 8
  misc_feature: MA Experiment 108527 PARAMETER Experiment Name: Zm_5mM_NO_P Parameter: Organism Value: Zea mays
  misc_feature: MA Experiment 108527 PARAMETER Experiment Name: Zm_5mM_NO_P Parameter: Plant Line Value: 35A19
  misc_feature: MA Experiment 108527 PARAMETER Experiment Name: Zm_5mM_NO_P Parameter: Timepoint (hr) Value: 6
  misc_feature: MA Experiment 108527 PARAMETER Experiment Name: Zm_5mM_NO_P Parameter: Tissue Value: Aerial
  misc_feature: MA Experiment 108527 PARAMETER Experiment Name: Zm_5mM_NO_P Parameter: Treatment Value: 5mM NO vs. No Treatment
  misc_feature: MA Experiment ID: 108535 Result: Up-regulated in Transcription
  misc_feature: MA Experiment 108535 PARAMETER Experiment Name: Zm_Meristem_P Parameter: Age (day) Value: 8
  misc_feature: MA Experiment 108535 PARAMETER Experiment Name: Zm_Meristem_P Parameter: Organism Value: Zea mays
  misc_feature: MA Experiment 108535 PARAMETER Experiment Name: Zm_Meristem_P Parameter: Plant Line Value: 35A19
  misc_feature: MA Experiment 108535 PARAMETER Experiment Name: Zm_Meristem_P Parameter: Tissue Value: Root Meristem vs. Above Root Meristem
tcatttctacgacctcttggccatttggagttggacctaccagaggccccagaaaaagccccacgtcctcctgcacaagctgttgacccattctcaaaatttgggccgaaggcagagatattgcatatattccgtgccccagagaagaggccacccaaggaactctcgctcgcattcacgggtctcacgcttctgccttttatcggattcttgattgggctcgtgcgtcttggagtgaacgtgaagaacttcccgtccttgccgggaccggccgcatttgcctcagttttccatgctggaataggagcagtcttgctgctctacgttctcttctggctcaagttggaccttttcacaactctgaagtaccttggcttcctcggcatcttcctcgtgtttgtgggccataggaccctgtcctacctttcctcggcgtcagcaaaacagaagacggcatgagtggacagtgcaagcagagctttcccgatcatcaattcgttttttgaggtggccattccaggccactgggtgtctttgcttggtactctgaccgcaccctagtttttctttagctaacatgcattttgagggaggactcggtttatttcagttggctttgacgaatactgatactaggacaagtaacaggacctcacatcacagtttctgaatagaatggatgtttaatcatagcatttatatgatcattcg

SEQ ID NO: 18200 - protein, 152 aa, Zea mays subsp. mays
  peptide (1)..(152): Ceres Seq. ID no. 12354863
  misc_feature (28)..(142): Homolog of NCBI NO: 19922486 NR Description: CG6370-PA [Drosophila melanogaster]
  misc_feature (32)..(140): Homolog of NCBI NO: 34996495 NR Description: ribophorin II [Mus musculus]
  misc_feature (32)..(140): Homolog of NCBI NO: 14714733 NR Description: Similar to ribophorin II [Mus musculus]
  misc_feature (34)..(140): Homolog of NCBI NO: 4730802 NR Description: dJ343K2.2.2 (ribophorin II (PUTATIVE partial
  misc_feature (8)..(150): Homolog of NCBI NO: 17508279 NR Description: Ribophorin II (31.1 kD) [Caenorhabditis elegans]
  misc_feature (10)..(152): Homolog of NCBI NO: 29841329 NR Description: similar to GenBank Accession Number AK004968
  misc_feature (9)..(151): Homolog of NCBI NO: 39598219 NR Description: Hypothetical protein CBG14887 [Caenorhabditis
  misc_feature (1)..(124): Homolog of NCBI NO: 7486600 NR Description: hypothetical protein F7J7.90 - Arabidopsis
  misc_feature (1)..(152): Homolog of NCBI NO: 22328844 NR Description: putative protein
  misc_feature (1)..(152): Homolog of NCBI NO: 34906860 NR Description: P0470A12.7 [Oryza sativa (japonica
SFLRPLGHLELDLPEAPEKAPRPPAQAVDPFSKFGPKAEILHIFRAPEKRPPKELSLAFTGLTLLPFIGFLIGLVRLGVNVKNFPSLPGPAAFASVFHAGIGAVLLLYVLFWLKLDLFTTLKYLGFLGIFLVFVGHRTLSYLSSASAKQKTA

SEQ ID NO: 18201 - DNA, 917 bp, Zea mays subsp. mays
  misc_feature (1)..(917): Ceres Seq. ID no. 12416389
  misc_feature: MA Experiment ID: 108535 Result: Down-regulated in Transcription
  misc_feature: MA Experiment 108535 PARAMETER Experiment Name: Zm_Meristem_P Parameter: Age (day) Value: 8
  misc_feature: MA Experiment 108535 PARAMETER Experiment Name: Zm_Meristem_P Parameter: Organism Value: Zea mays
  misc_feature: MA Experiment 108535 PARAMETER Experiment Name: Zm_Meristem_P Parameter: Plant Line Value: 35A19
  misc_feature: MA Experiment 108535 PARAMETER Experiment Name: Zm_Meristem_P Parameter: Tissue Value: Root Meristem vs. Above Root Meristem
gaaagggacttctcctacgtgttcgatatgcttgttgctctgggcattcacgcagccaacgaggatgacctccttgacaactgctacttactggagtgctctgcaggccttgatttatacgatgacctcgaacagaagtacgacagcctcattttatggcctgtgcatgagaggaagctcttgtttgatatcacgaatgctgttcttggggacatgatcacctccgtgatgaacggctgctcgaagggactgatggcgaggtgctcgcctggatggaatcgggaagagtttgctgagctcgtgtggcaaagggtggtgcagctccggcaagagatagagttcaaccaggaagccctgctgttgagcgtagagtgggctggctctgaagatggcgccagtctagtcgggcgcgatatcgggaatatgttgcaagatgatctcgtacaggaaattatagctgactttctgggggcaactaaatccgccaagctccgtggctagaattgccagtgtttgcatccgaggccattgcaagcatatgcatatggattggtcgctggtgaactctagtggacgatgagccttcgatgaattgcttaaggaggggactgtaattcaaggaattcncctcatggctactgaagacatgagctaagatggcttaggtgatggtggggcatcaaacaagcagtgtcgaagtttgacctagttgtgtcatgctcgtcagctcatcaccattggccccgaactcagcaatagcgtacaactggatgatttcccccctctgaactttgaaaatattttttttcattaggttatcataatgctggaatatagatgcacaattttggtgtaaaataatctctggcggattttagtttgtttatcatgggatgcaataaggacagtgtcagttg

SEQ ID NO: 18202 - protein, 166 aa, Zea mays subsp. mays
  peptide (1)..(166): Ceres Seq. ID no. 12416390
  misc_feature (1)..(156): Homolog of NCBI NO: 34897354 NR Description: hypothetical protein [Oryza sativa]
  misc_feature (1)..(154): Homolog of NCBI NO: 29124124 NR Description: hypothetical protein [Oryza sativa (japonica
ERDFSYVFDMLVALGIHAANEDDLLDNCYLLECSAGLDLYDDLEQKYDSLILWPVHERKLLFDITNAVLGDMITSVMNGCSKGLMARCSPGWNREEFAELVWQRVVQLRQEIEFNQEALLLSVEWAGSEDGASLVGRDIGNMLQDDLVQEIIADFLGATKSAKLRG

SEQ ID NO: 18203 - protein, 157 aa, Zea mays subsp. mays
  peptide (1)..(157): Ceres Seq. ID no. 12416391
  misc_feature (1)..(147): Homolog of NCBI NO: 34897354 NR Description: hypothetical protein [Oryza sativa]
  misc_feature (1)..(145): Homolog of NCBI NO: 29124124 NR Description: hypothetical protein [Oryza sativa (japonica
MLVALGIHAANEDDLLDNCYLLECSAGLDLYDDLEQKYDSLILWPVHERKLLFDITNAVLGDMITSVMNGCSKGLMARCSPGWNREEFAELVWQRVVQLRQEIEFNQEALLLSVEWAGSEDGASLVGRDIGNMLQDDLVQEIIADFLGATKSAKLRG

SEQ ID NO: 18204 - protein, 95 aa, Zea mays subsp. mays
  peptide (1)..(95): Ceres Seq. ID no. 12416392
  misc_feature (1)..(85): Homolog of NCBI NO: 34897354 NR Description: hypothetical protein [Oryza sativa]
  misc_feature (1)..(83): Homolog of NCBI NO: 29124124 NR Description: hypothetical protein [Oryza sativa (japonica
MITSVMNGCSKGLMARCSPGWNREEFAELVWQRVVQLRQEIEFNQEALLLSVEWAGSEDGASLVGRDIGNMLQDDLVQEIIADFLGATKSAKLRG

SEQ ID NO: 18205 - DNA, 1421 bp, Zea mays subsp. mays
  misc_feature (1)..(1421): Ceres Seq. ID no. 12391904
  misc_feature: MA Experiment ID: 108543 Result: Up-regulated in Transcription
  misc_feature: MA Experiment ID: 108687 Result: Down-regulated in Transcription
  misc_feature: MA Experiment 108687 PARAMETER Experiment Name: Zm_Embryos-Flowers__P Parameter: Tissue Value: Embryo vs. Aerial+
  misc_feature: MA Experiment ID: 20000492 Result: Up-regulated in Transcription
  misc_feature: MA Experiment 20000492 PARAMETER Experiment Name: Zm_Hybrid_Seed_Dev_P Parameter: DAP Value: 12
  misc_feature: MA Experiment 20000492 PARAMETER Experiment Name: Zm_Hybrid_Seed_Dev_P Parameter: Organism Value: Zea mays
  misc_feature: MA Experiment 20000492 PARAMETER Experiment Name: Zm_Hybrid_Seed_Dev_P Parameter: Plant Line Value: 35A19
  misc_feature: MA Experiment 20000492 PARAMETER Experiment Name: Zm_Hybrid_Seed_Dev_P Parameter: Tissue Value: Fert Kernel vs. Unfert Floret
  misc_feature: MA Experiment ID: 20000534 Result: Up-regulated in Transcription
  misc_feature: MA Experiment 20000534 PARAMETER Experiment Name: Zm_Hybrid_Pollen_P Parameter: Age (day) Value: 8
  misc_feature: MA Experiment 20000534 PARAMETER Experiment Name: Zm_Hybrid_Pollen_P Parameter: Organism Value: Zea mays
  misc_feature: MA Experiment 20000534 PARAMETER Experiment Name: Zm_Hybrid_Pollen_P Parameter: Plant Line Value: 35A19
  misc_feature: MA Experiment 20000534 PARAMETER Experiment Name: Zm_Hybrid_Pollen_P Parameter: Tissue Value: Pollen vs. Aerial
atgactactccaagcgcgcaattaaccctcactaaagggaacaaaagctggagctccaccgcggtggcggccgctctagaactagtggatcccccgggctgcaggaattcgcacgagaccattacctagaacatcctaatcgaaaaccttttgccgatccagttgtgccgatcggtattttcccgcgtccaccaaaacccgttgccgccgtttttttcgtcgccgccacggaccaggatcgaccggtgccgatgaagccagcggaggacgcggatgcgccggcgccggagacggcggcagcgcagacggtctggtacgaccccatgacttcgccgcaggcgccggcgccgcagcagcaaccggcgatagaggctgcgatgcggggggcctcgccgtcggtgagctccaacgcgcgggcctctcagggtgtacgccgacggcatctatgatctcttccacttcggccatgcgcgcgcgctcgaacaggccaagaagtcatttcccaacacctacttgctggtaggttgctgcagcgacgagatcacccacatgtacaaaggaaagaccgtcatgaccgaggacgagcgctacgaatcgcttcggcattgcaagtgggtcgacgaggtcataccggacgctccatgggtgatcaaccaggagttcatcgacaagcacgacatcgactacgtcgctcacgacgcgctcccatacgctgacacgagtggagctgccaatgatgtctatgaatttgtgaaagccatcgggaagttcaaggagacgaagcgcaccgagggcatctcgacgtcggacatcatcatgaggatcttgaaggactacaaccagtacatcatgcggaacctcacccgcgggtacagccgcaaagatctcggcgtcagctatgtcaaggagaagcagctgagagtcaacatggggatcagcaagctacgggagaaggtgaaggagcaccaggagaagttccacagcgcggcgaagatcgctgggaccaaccctgtggagtggatggagaacgcggaccgctggatcgttggcttccttgagaagttcgaggaaggctgccacatgatggaaactgccattaaaggtcggattcaggaggggttgaagcggcaaggcaggtcggagtcaaacctttctggagaggagttcgaatcgtagttctgtgatctcctccaaatgaaactagacaaaaggagaactggagatcatttcccagtctgtgtaacagtatgagattggttaattagcatgttattgtaggatgccatggatcattgtttagttgtacctggagatcatgtagttttgaagaacaatcgtgtttctgtatgcgatcagttgctccttcattgagcatatctgcatatggcacctgctaggaagtaggaactgctgttcatttg

SEQ ID NO: 18206 - protein, 208 aa, Zea mays subsp. mays
  peptide (1)..(208): Ceres Seq. ID no. 12391905
  misc_feature (1)..(200): Homolog of NCBI NO: 30683147 NR Description: cholinephosphate cytidylyltransferase
  misc_feature (1)..(205): Homolog of NCBI NO: 15225218 NR Description: putative phospholipid cytidylyltransferase
  misc_feature (1)..(198): Homolog of NCBI NO: 7488485 NR Description: probable choline-phosphate cytidylyltransferase
  misc_feature (1)..(205): Homolog of NCBI NO: 7488483 NR Description: probable choline-phosphate cytidylyltransferase
  misc_feature (1)..(194): Homolog of NCBI NO: 7488484 NR Description: probable choline-phosphate cytidylyltransferase
  misc_feature (1)..(198): Homolog of NCBI NO: 7488446 NR Description: choline-phosphate cytidylyltransferase (EC
  misc_feature (22)..(208): Homolog of NCBI NO: 34905274 NR Description: putative choline-phosphate cytidylyltransferase
  misc_feature (1)..(200): Homolog of NCBI NO: 21668498 NR Description: CTP:phosphorylcholine cytidylyltransferase
  misc_feature (1)..(194): Homolog of NCBI NO: 7488791 NR Description: choline-phosphate cytidylyltransferase (EC
  misc_feature (1)..(194): Homolog of NCBI NO: 37537166 NR Description: putative cholinephosphate cytidylyltransferase
MYKGKTVMTEDERYESLRHCKWVDEVIPDAPWVINQEFIDKHDIDYVAHDALPYADTSGAANDVYEFVKAIGKFKETKRTEGISTSDIIMRILKDYNQYIMRNLTRGYSRKDLGVSYVKEKQLRVNMGISKLREKVKEHQEKFHSAAKIAGTNPVEWMENADRWIVGFLEKFEEGCHMMETAIKGRIQEGLKRQGRSESNLSGEEFES

SEQ ID NO: 18207 - protein, 201 aa, Zea mays subsp. mays
  peptide (1)..(201): Ceres Seq. ID no. 12391906
  misc_feature (1)..(193): Homolog of NCBI NO: 30683147 NR Description: cholinephosphate cytidylyltransferase
  misc_feature (1)..(198): Homolog of NCBI NO: 15225218 NR Description: putative phospholipid cytidylyltransferase
  misc_feature (1)..(191): Homolog of NCBI NO: 7488485 NR Description: probable choline-phosphate cytidylyltransferase
  misc_feature (1)..(198): Homolog of NCBI NO: 7488483 NR Description: probable choline-phosphate cytidylyltransferase
  misc_feature (1)..(187): Homolog of NCBI NO: 7488484 NR Description: probable choline-phosphate cytidylyltransferase
  misc_feature (1)..(191): Homolog of NCBI NO: 7488446 NR Description: choline-phosphate cytidylyltransferase (EC
  misc_feature (15)..(201): Homolog of NCBI NO: 34905274 NR Description: putative choline-phosphate cytidylyltransferase
  misc_feature (1)..(193): Homolog of NCBI NO: 21668498 NR Description: CTP:phosphorylcholine cytidylyltransferase
  misc_feature (1)..(187): Homolog of NCBI NO: 7488791 NR Description: choline-phosphate cytidylyltransferase (EC
  misc_feature (1)..(187): Homolog of NCBI NO: 37537166 NR Description: putative cholinephosphate cytidylyltransferase
MTEDERYESLRHCKWVDEVIPDAPWVINQEFIDKHDIDYVAHDALPYADTSGAANDVYEFVKAIGKFKETKRTEGISTSDIIMRILKDYNQYIMRNLTRGYSRKDLGVSYVKEKQLRVNMGISKLREKVKEHQEKFHSAAKIAGTNPVEWMENADRWIVGFLEKFEEGCHMMETAIKGRIQEGLKRQGRSESNLSGEEFES

SEQ ID NO: 18208 - protein, 119 aa, Zea mays subsp. mays
  peptide (1)..(119): Ceres Seq. ID no. 12391907
  misc_feature (1)..(111): Homolog of NCBI NO: 30683147 NR Description: cholinephosphate cytidylyltransferase
  misc_feature (1)..(116): Homolog of NCBI NO: 15225218 NR Description: putative phospholipid cytidylyltransferase
  misc_feature (1)..(109): Homolog of NCBI NO: 7488485 NR Description: probable choline-phosphate cytidylyltransferase
  misc_feature (1)..(116): Homolog of NCBI NO: 7488483 NR Description: probable choline-phosphate cytidylyltransferase
  misc_feature (1)..(105): Homolog of NCBI NO: 7488484 NR Description: probable choline-phosphate cytidylyltransferase
  misc_feature (1)..(109): Homolog of NCBI NO: 7488446 NR Description: choline-phosphate cytidylyltransferase (EC
  misc_feature (1)..(119): Homolog of NCBI NO: 34905274 NR Description: putative choline-phosphate cytidylyltransferase
  misc_feature (1)..(111): Homolog of NCBI NO: 21668498 NR Description: CTP:phosphorylcholine cytidylyltransferase
  misc_feature (1)..(105): Homolog of NCBI NO: 7488791 NR Description: choline-phosphate cytidylyltransferase (EC
  misc_feature (1)..(105): Homolog of NCBI NO: 37537166 NR Description: putative cholinephosphate cytidylyltransferase
MRILKDYNQYIMRNLTRGYSRKDLGVSYVKEKQLRVNMGISKLREKVKEHQEKFHSAAKIAGTNPVEWMENADRWIVGFLEKFEEGCHMMETAIKGRIQEGLKRQGRSESNLSGEEFES

SEQ ID NO: 18209 - DNA, 1081 bp, Zea mays subsp. mays
  misc_feature (1)..(1081): Ceres Seq. ID no. 12391425
  misc_feature: MA Experiment ID: 108529 Result: Up-regulated in Transcription
  misc_feature: MA Experiment 108529 PARAMETER Experiment Name: Zm_Imbibed_Seeds_P Parameter: Age (day) Value: 5 vs. 2
  misc_feature: MA Experiment 108529 PARAMETER Experiment Name: Zm_Imbibed_Seeds_P Parameter: Organism Value: Zea mays
  misc_feature: MA Experiment 108529 PARAMETER Experiment Name: Zm_Imbibed_Seeds_P Parameter: Plant Line Value: 35A19
  misc_feature: MA Experiment 108529 PARAMETER Experiment Name: Zm_Imbibed_Seeds_P Parameter: Tissue Value: Roots vs. Embryo
  misc_feature: MA Experiment ID: 108546 Result: Up-regulated in Transcription
  misc_feature: MA Experiment 108546 PARAMETER Experiment Name: Zm_Imbibed_Seeds_P Parameter: Age (day) Value: 3 vs. 2
  misc_feature: MA Experiment 108546 PARAMETER Experiment Name: Zm_Imbibed_Seeds_P Parameter: Organism Value: Zea mays
  misc_feature: MA Experiment 108546 PARAMETER Experiment Name: Zm_Imbibed_Seeds_P Parameter: Plant Line Value: 35A19
  misc_feature: MA Experiment 108546 PARAMETER Experiment Name: Zm_Imbibed_Seeds_P Parameter: Tissue Value: Roots vs. Embryo
  misc_feature: MA Experiment ID: 108559 Result: Down-regulated in Transcription
  misc_feature: MA Experiment 108559 PARAMETER Experiment Name: Zm_5mM_NO_P Parameter: Age (day) Value: 8
  misc_feature: MA Experiment 108559 PARAMETER Experiment Name: Zm_5mM_NO_P Parameter: Organism Value: Zea mays
  misc_feature: MA Experiment 108559 PARAMETER Experiment Name: Zm_5mM_NO_P Parameter: Plant Line Value: 35A19
  misc_feature: MA Experiment 108559 PARAMETER Experiment Name: Zm_5mM_NO_P Parameter: Timepoint (hr) Value: 12
  misc_feature: MA Experiment 108559 PARAMETER Experiment Name: Zm_5mM_NO_P Parameter: Tissue Value: Aerial
  misc_feature: MA Experiment 108559 PARAMETER Experiment Name: Zm_5mM_NO_P Parameter: Treatment Value: 5mM NO vs. No Treatment
  misc_feature: MA Experiment ID: 108689 Result: Down-regulated in Transcription
  misc_feature: MA Experiment 108689 PARAMETER Experiment Name: Zm_Drought_Roots_P Parameter: Age (day) Value: 9
  misc_feature: MA Experiment 108689 PARAMETER Experiment Name: Zm_Drought_Roots_P Parameter: Organism Value: Zea mays
  misc_feature: MA Experiment 108689 PARAMETER Experiment Name: Zm_Drought_Roots_P Parameter: Plant Line Value: 35A19
  misc_feature: MA Experiment 108689 PARAMETER Experiment Name: Zm_Drought_Roots_P Parameter: Timepoint (hr) Value: 24
  misc_feature: MA Experiment 108689 PARAMETER Experiment Name: Zm_Drought_Roots_P Parameter: Tissue Value: Roots
  misc_feature: MA Experiment 108689 PARAMETER Experiment Name: Zm_Drought_Roots_P Parameter: Treatment Value: Drought vs. No Drought
  misc_feature: MA Experiment ID: 20000477 Result: Down-regulated in Transcription
  misc_feature: MA Experiment 20000477 PARAMETER Experiment Name: Zm_5mM_SA_P Parameter: Age (day) Value: 10
  misc_feature: MA Experiment 20000477 PARAMETER Experiment Name: Zm_5mM_SA_P Parameter: Organism Value: Zea mays
  misc_feature: MA Experiment 20000477 PARAMETER Experiment Name: Zm_5mM_SA_P Parameter: Plant Line Value: 35A19
  misc_feature: MA Experiment 20000477 PARAMETER Experiment Name: Zm_5mM_SA_P Parameter: Timepoint (hr) Value: 48
  misc_feature: MA Experiment 20000477 PARAMETER Experiment Name: Zm_5mM_SA_P Parameter: Tissue Value: Aerial
  misc_feature: MA Experiment 20000477 PARAMETER Experiment Name: Zm_5mM_SA_P Parameter: Treatment Value: 5mM SA vs. No Treatment
  misc_feature: MA Experiment ID: 20000478 Result: Down-regulated in Transcription
  misc_feature: MA Experiment 20000478 PARAMETER Experiment Name: Zm_5mM_SA_P Parameter: Age (day) Value: 11
  misc_feature: MA Experiment 20000478 PARAMETER Experiment Name: Zm_5mM_SA_P Parameter: Organism Value: Zea mays
  misc_feature: MA Experiment 20000478 PARAMETER Experiment Name: Zm_5mM_SA_P Parameter: Plant Line Value: 35A19
  misc_feature: MA Experiment 20000478 PARAMETER Experiment Name: Zm_5mM_SA_P Parameter: Timepoint (hr) Value: 72
  misc_feature: MA Experiment 20000478 PARAMETER Experiment Name: Zm_5mM_SA_P Parameter: Tissue Value: Aerial
  misc_feature: MA Experiment 20000478 PARAMETER Experiment Name: Zm_5mM_SA_P Parameter: Treatment Value: 5mM SA vs. No Treatment
  misc_feature: MA Experiment ID: 20000479 Result: Down-regulated in Transcription
  misc_feature: MA Experiment 20000479 PARAMETER Experiment Name: Zm_Drought_P Parameter: Age (day) Value: 10
  misc_feature: MA Experiment 20000479 PARAMETER Experiment Name: Zm_Drought_P Parameter: Organism Value: Zea mays
  misc_feature: MA Experiment 20000479 PARAMETER Experiment Name: Zm_Drought_P Parameter: Plant Line Value: 35A19
  misc_feature: MA Experiment 20000479 PARAMETER Experiment Name: Zm_Drought_P Parameter: Timepoint (hr) Value: 48
  misc_feature: MA Experiment 20000479 PARAMETER Experiment Name: Zm_Drought_P Parameter: Tissue Value: Aerial
  misc_feature: MA Experiment 20000479 PARAMETER Experiment Name: Zm_Drought_P Parameter: Treatment Value: Drought vs. No Drought
  misc_feature: MA Experiment ID: 20000480 Result: Down-regulated in Transcription
  misc_feature: MA Experiment 20000480 PARAMETER Experiment Name: Zm_Drought_P Parameter: Age (day) Value: 11
  misc_feature: MA Experiment 20000480 PARAMETER Experiment Name: Zm_Drought_P Parameter: Organism Value: Zea mays
  misc_feature: MA Experiment 20000480 PARAMETER Experiment Name: Zm_Drought_P Parameter: Plant Line Value: 35A19
  misc_feature: MA Experiment 20000480 PARAMETER Experiment Name: Zm_Drought_P Parameter: Timepoint (hr) Value: 72
  misc_feature: MA Experiment 20000480 PARAMETER Experiment Name: Zm_Drought_P Parameter: Tissue Value: Aerial
  misc_feature: MA Experiment 20000480 PARAMETER Experiment Name: Zm_Drought_P Parameter: Treatment Value: Drought vs. No Drought
agacaataatggccgcctccgacaagtaggacctgatgaggatttcagcggcggcgctcctgctggcgctggccgcggcaggcagcgtctgctcggcgcagcagctccgtcgcaactactacgcgagcgtgtgcccaaacgtggagtccatcgtgcgcgacgcggtggcgaagaagtaccgggagacgttcatcacggtgggcgcgacggtgcacctcttcttccacgactgcttcgtggagggctgcgacgcctccgtggtggtggcgtccacgccaaacgccaccgcggagaaggaccaccccatcaacctgtccctggcgggcgatggcttcgacaccgtgatccgggccaaggccgccgtggacgccgtgccgcggtgccggaacagggtgtcctgcgccgacatcctggccatggccacccgggacgccatcgcgctggccggcgggcccgcgtacgcggtggagctgggccgcctggacgggctgtcctccacggcgaccagcgtgaacgggaagctggcgccgccgtcgtttggcctggaccagctcaccgcgctgttcgcgcgcaacgggctctcgcaggccgacatggtggcgctatcggcggggcacacggtggggttcgcgcactgcggaaccttctccgggcgggtccgcgcggcggacccgacgctgaaccggagcctggcggagaagctggcggcgtggtgccccgacggcgtggacccgcgggtggcggtgaccatggacgtggtcacgcccagggtgttcgacaaccagtacttccggaacctgcagagcgggatgggcctcctggcgtcggaccaggtgctgtacacggaccccaggtctaggcccaccgctcgacgcgttggcccggagtaaagtggcctttgaacgggcctttgtggaggggatcacgaagatgggccggatcggggtcaagacgggtgcccaagggaacatccgacgtaactgcgcagtgctcaattgaccgacctgatgatgtttgttgccctgcgcttgtactatctatgaacaaatttgccgtgtgtttatatatgaacaaattttcc

SEQ ID NO: 18210 - protein, 285 aa, Zea mays subsp. mays
  peptide (1)..(285): Ceres Seq. ID no. 12391426
  misc_feature (80)..(211): Pfam Name: Neurotransmitter-gated ion-channel transmembrane region Pfam Description: Neurotransmitter-gated ion-channel
  misc_feature (73)..(285): Homolog of NCBI NO: 22959520 NR Description: hypothetical protein [Rhodobacter sphaeroides]
DNNGRLRQVGPDEDFSGGAPAGAGRGRQRLLGAAAPSQLLRERVPKRGVHRARRGGEEVPGDVHHGGRDGAPLLPRLLRGGLRRLRGGGVHAKRHRGEGPPHQPVPGGRWLRHRDPGQGRRGRRAAVPEQGVLRRHPGHGHPGRHRAGRRARVRGGAGPPGRAVLHGDQREREAGAAVVWPGPAHRAVRAQRALAGRHGGAIGGAHGGVRALRNLLRAGPRGGPDAEPEPGGEAGGVVPRRRGPAGGGDHGRGHAQGVRQPVLPEPAERDGPPGVGPGAVHGPQV

SEQ ID NO: 18211 - protein, 284 aa, Zea mays subsp. mays
  peptide (1)..(284): Ceres Seq. ID no. 12391427
  misc_feature (40)..(276): Pfam Name: Peroxidase Pfam Description: Peroxidase
  misc_feature (8)..(277): Homolog of NCBI NO: 17979440 NR Description: putative peroxidase [Arabidopsis thaliana]
  misc_feature (8)..(277): Homolog of NCBI NO: 21554605 NR Description: peroxidase, prxr2 [Arabidopsis thaliana]
  misc_feature (8)..(277): Homolog of NCBI NO: 15235600 NR Description: peroxidase, putative
  misc_feature (8)..(277): Homolog of NCBI NO: 15235597 NR Description: peroxidase, putative
  misc_feature (23)..(277): Homolog of NCBI NO: 13992528 NR Description: peroxidase2 [Medicago sativa]
  misc_feature (23)..(277): Homolog of NCBI NO: 2117624 NR Description: peroxidase (EC 1.11.1.7) 2 precursor - alfalfa
  misc_feature (21)..(277): Homolog of NCBI NO: 14485511 NR Description: putative peroxidase [Solanum tuberosum]
  misc_feature (23)..(277): Homolog of NCBI NO: 28629828 NR Description: peroxidase 1 [Artemisia annua]
  misc_feature (3)..(277): Homolog of NCBI NO: 17027274 NR Description: putative peroxidase [Oryza sativa (japonica
  misc_feature (2)..(276): Homolog of NCBI NO: 34915320 NR Description: putative peroxidase [Oryza sativa (japonica
MRISAAALLLALAAAGSVCSAQQLRRNYYASVCPNVESIVRDAVAKKYRETFITVGATVHLFFHDCFVEGCDASVVVASTPNATAEKDHPINLSLAGDGFDTVIRAKAAVDAVPRCRNRVSCADILAMATRDAIALAGGPAYAVELGRLDGLSSTATSVNGKLAPPSFGLDQLTALFARNGLSQADMVALSAGHTVGFAHCGTFSGRVRAADPTLNRSLAEKLAAWCPDGVDPRVAVTMDVVTPRVFDNQYFRNLQSGMGLLASDQVLYTDPRSRPTARRVGPE

SEQ ID NO: 18212 - protein, 157 aa, Zea mays subsp. mays
  peptide (1)..(157): Ceres Seq. ID no. 12391428
  misc_feature (1)..(149): Pfam Name: Peroxidase Pfam Description: Peroxidase
  misc_feature (1)..(150): Homolog of NCBI NO: 17979440 NR Description: putative peroxidase [Arabidopsis thaliana]
  misc_feature (1)..(150): Homolog of NCBI NO: 21554605 NR Description: peroxidase, prxr2 [Arabidopsis thaliana]
  misc_feature (1)..(150): Homolog of NCBI NO: 15235600 NR Description: peroxidase, putative
  misc_feature (1)..(150): Homolog of NCBI NO: 15235597 NR Description: peroxidase, putative
  misc_feature (1)..(150): Homolog of NCBI NO: 13992528 NR Description: peroxidase2 [Medicago sativa]
  misc_feature (1)..(150): Homolog of NCBI NO: 2117624 NR Description: peroxidase (EC 1.11.1.7) 2 precursor - alfalfa
  misc_feature (1)..(150): Homolog of NCBI NO: 14485511 NR Description: putative peroxidase [Solanum tuberosum]
  misc_feature (1)..(150): Homolog of NCBI NO: 28629828 NR Description: peroxidase 1 [Artemisia annua]
  misc_feature (1)..(150): Homolog of NCBI NO: 17027274 NR Description: putative peroxidase [Oryza sativa (japonica
  misc_feature (1)..(149): Homolog of NCBI NO: 34915320 NR Description: putative peroxidase [Oryza sativa (japonica
MATRDAIALAGGPAYAVELGRLDGLSSTATSVNGKLAPPSFGLDQLTALFARNGLSQADMVALSAGHTVGFAHCGTFSGRVRAADPTLNRSLAEKLAAWCPDGVDPRVAVTMDVVTPRVFDNQYFRNLQSGMGLLASDQVLYTDPRSRPTARRVGPE

SEQ ID NO: 18213 - DNA, 1071 bp, Zea mays subsp. mays; identical to SEQ ID NO: 16479
  misc_feature (1)..(1071): Ceres Seq. ID no. 12406460
  misc_feature: MA Experiment ID: 108528 Result: Up-regulated in Transcription
  misc_feature: MA Experiment 108528 PARAMETER Experiment Name: Zm_Imbibed_Seeds_P Parameter: Age (day) Value: 5 vs. 2
  misc_feature: MA Experiment 108528 PARAMETER Experiment Name: Zm_Imbibed_Seeds_P Parameter: Organism Value: Zea mays
  misc_feature: MA Experiment 108528 PARAMETER Experiment Name: Zm_Imbibed_Seeds_P Parameter: Plant Line Value: 35A19
  misc_feature: MA Experiment 108528 PARAMETER Experiment Name: Zm_Imbibed_Seeds_P Parameter: Tissue Value: Aerial vs. Embryo
  misc_feature: MA Experiment ID: 108529 Result: Down-regulated in Transcription
  misc_feature: MA Experiment 108529 PARAMETER Experiment Name: Zm_Imbibed_Seeds_P Parameter: Age (day) Value: 5 vs. 2
  misc_feature: MA Experiment 108529 PARAMETER Experiment Name: Zm_Imbibed_Seeds_P Parameter: Organism Value: Zea mays
  misc_feature: MA Experiment 108529 PARAMETER Experiment Name: Zm_Imbibed_Seeds_P Parameter: Plant Line Value: 35A19
  misc_feature: MA Experiment 108529 PARAMETER Experiment Name: Zm_Imbibed_Seeds_P Parameter: Tissue Value: Roots vs. Embryo
  misc_feature: MA Experiment ID: 108530 Result: Up-regulated in Transcription
  misc_feature: MA Experiment 108530 PARAMETER Experiment Name: Zm_Imbibed_Seeds_P Parameter: Age (day) Value: 6 vs. 2
  misc_feature: MA Experiment 108530 PARAMETER Experiment Name: Zm_Imbibed_Seeds_P Parameter: Organism Value: Zea mays
  misc_feature: MA Experiment 108530 PARAMETER Experiment Name: Zm_Imbibed_Seeds_P Parameter: Plant Line Value: 35A19
  misc_feature: MA Experiment 108530 PARAMETER Experiment Name: Zm_Imbibed_Seeds_P Parameter: Tissue Value: Aerial vs. Embryo
  misc_feature: MA Experiment ID: 108536 Result: Down-regulated in Transcription
  misc_feature: MA Experiment 108536 PARAMETER Experiment Name: Zm_Meristem_P Parameter: Age (day) Value: 8
  misc_feature: MA Experiment 108536 PARAMETER Experiment Name: Zm_Meristem_P Parameter: Organism Value: Zea mays
  misc_feature: MA Experiment 108536 PARAMETER Experiment Name: Zm_Meristem_P Parameter: Plant Line Value: 35A19
  misc_feature: MA Experiment 108536 PARAMETER Experiment Name: Zm_Meristem_P Parameter: Tissue Value: Shoot Meristem vs. Above Shoot Meristem
  misc_feature: MA Experiment ID: 108544 Result: Down-regulated in Transcription
  misc_feature: MA Experiment ID: 108545 Result: Up-regulated in Transcription
  misc_feature: MA Experiment 108545 PARAMETER Experiment Name: Zm_Imbibed_Seeds_P Parameter: Age (day) Value: 3 vs. 2
  misc_feature: MA Experiment 108545 PARAMETER Experiment Name: Zm_Imbibed_Seeds_P Parameter: Organism Value: Zea mays
  misc_feature: MA Experiment 108545 PARAMETER Experiment Name: Zm_Imbibed_Seeds_P Parameter: Plant Line Value: 35A19
  misc_feature: MA Experiment 108545 PARAMETER Experiment Name: Zm_Imbibed_Seeds_P Parameter: Tissue Value: Aerial vs. Embryo
  misc_feature: MA Experiment ID: 108546 Result: Down-regulated in Transcription
  misc_feature: MA Experiment 108546 PARAMETER Experiment Name: Zm_Imbibed_Seeds_P Parameter: Age (day) Value: 3 vs. 2
  misc_feature: MA Experiment 108546 PARAMETER Experiment Name: Zm_Imbibed_Seeds_P Parameter: Organism Value: Zea mays
  misc_feature: MA Experiment 108546 PARAMETER Experiment Name: Zm_Imbibed_Seeds_P Parameter: Plant Line Value: 35A19
  misc_feature: MA Experiment 108546 PARAMETER Experiment Name: Zm_Imbibed_Seeds_P Parameter: Tissue Value: Roots vs. Embryo
  misc_feature: MA Experiment ID: 108547 Result: Up-regulated in Transcription
  misc_feature: MA Experiment 108547 PARAMETER Experiment Name: Zm_Imbibed_Seeds_P Parameter: Age (day) Value: 4 vs. 2
  misc_feature: MA Experiment 108547 PARAMETER Experiment Name: Zm_Imbibed_Seeds_P Parameter: Organism Value: Zea mays
  misc_feature: MA Experiment 108547 PARAMETER Experiment Name: Zm_Imbibed_Seeds_P Parameter: Plant Line Value: 35A19
  misc_feature: MA Experiment 108547 PARAMETER Experiment Name: Zm_Imbibed_Seeds_P Parameter: Tissue Value: Aerial vs. Embryo

SEQ ID NO: 18214 - protein, 238 aa, Zea mays subsp. mays; identical to SEQ ID NO: 16480
  peptide (1)..(238): Ceres Seq. ID no. 12406461
  misc_feature (83)..(214): Homolog of NCBI NO: 25370552 NR Description: DAG protein homolog [imported] - Arabidopsis
  misc_feature (83)..(214): Homolog of NCBI NO: 15226108 NR Description: plastid protein
  misc_feature (20)..(214): Homolog of NCBI NO: 34897972 NR Description: putative plastid protein [Oryza sativa (japonica
  misc_feature (14)..(214): Homolog of NCBI NO: 38344141 NR Description: OSJNBa0041A02.8 [Oryza sativa (japonica
  misc_feature (4)..(223): Homolog of NCBI NO: 27754695 NR Description: putative DAG protein [Arabidopsis thaliana]
  misc_feature (4)..(223): Homolog of NCBI NO: 15230785 NR Description: DAG protein, putative; protein id: At3g06790.1
  misc_feature (77)..(233): Homolog of NCBI NO: 21593052 NR Description: DAG protein, putative [Arabidopsis thaliana]
  misc_feature (77)..(233): Homolog of NCBI NO: 15220382 NR Description: DAG protein, putative
  misc_feature (1)..(233): Homolog of NCBI NO: 6014904 NR Description: DAG PROTEIN, CHLOROPLAST PRECURSOR
  misc_feature (18)..(238): Homolog of NCBI NO: 38636775 NR Description: putative DAG protein [Oryza sativa (japonica
  misc_feature (1)..(233): Homolog of NCBI NO: 6014904 NR Description: DAG PROTEIN, CHLOROPLAST PRECURSOR
  misc_feature (18)..(238): Homolog of NCBI NO: 38636775 NR Description: putative DAG protein [Oryza sativa (japonica
  misc_feature (83)..(214): Homolog of NCBI NO: 25370552 NR Description: DAG protein homolog [imported] - Arabidopsis
  misc_feature (83)..(214): Homolog of NCBI NO: 15226108 NR Description: plastid protein
  misc_feature (20)..(214): Homolog of NCBI NO: 34897972 NR Description: putative plastid protein [Oryza sativa (japonica
  misc_feature (14)..(214): Homolog of NCBI NO: 38344141 NR Description: OSJNBa0041A02.8 [Oryza sativa (japonica
  misc_feature (4)..(223): Homolog of NCBI NO: 27754695 NR Description: putative DAG protein [Arabidopsis thaliana]
  misc_feature (4)..(223): Homolog of NCBI NO: 15230785 NR Description: DAG protein, putative; protein id: At3g06790.1
  misc_feature (77)..(233): Homolog of NCBI NO: 21593052 NR Description: DAG protein, putative [Arabidopsis thaliana]
  misc_feature (77)..(233): Homolog of NCBI NO: 15220382 NR Description: DAG protein, putative

SEQ ID NO: 18215 - protein, 223 aa, Zea mays subsp. mays; identical to SEQ ID NO: 16481
  peptide (1)..(223): Ceres Seq. ID no. 12406462
  misc_feature (68)..(199): Homolog of NCBI NO: 25370552 NR Description: DAG protein homolog [imported] - Arabidopsis
  misc_feature (68)..(199): Homolog of NCBI NO: 15226108 NR Description: plastid protein
  misc_feature (5)..(199): Homolog of NCBI NO: 34897972 NR Description: putative plastid protein [Oryza sativa (japonica
  misc_feature (1)..(199): Homolog of NCBI NO: 38344141 NR Description: OSJNBa0041A02.8 [Oryza sativa (japonica
  misc_feature (1)..(208): Homolog of NCBI NO: 27754695 NR Description: putative DAG protein [Arabidopsis thaliana]
  misc_feature (1)..(208): Homolog of NCBI NO: 15230785 NR Description: DAG protein, putative; protein id: At3g06790.1
  misc_feature (62)..(218): Homolog of NCBI NO: 21593052 NR Description: DAG protein, putative [Arabidopsis thaliana]
  misc_feature (62)..(218): Homolog of NCBI NO: 15220382 NR Description: DAG protein, putative
  misc_feature (1)..(218): Homolog of NCBI NO: 6014904 NR Description: DAG PROTEIN, CHLOROPLAST PRECURSOR
  misc_feature (3)..(223): Homolog of NCBI NO: 38636775 NR Description: putative DAG protein [Oryza sativa (japonica
  misc_feature (68)..(199): Homolog of NCBI NO: 25370552 NR Description: DAG protein homolog [imported] - Arabidopsis
  misc_feature (68)..(199): Homolog of NCBI NO: 15226108 NR Description: plastid protein
  misc_feature (5)..(199): Homolog of NCBI NO: 34897972 NR Description: putative plastid protein [Oryza sativa (japonica
  misc_feature (1)..(199): Homolog of NCBI NO: 38344141 NR Description: OSJNBa0041A02.8 [Oryza sativa (japonica
  misc_feature (1)..(208): Homolog of NCBI NO: 27754695 NR Description: putative DAG protein [Arabidopsis thaliana]
  misc_feature (1)..(208): Homolog of NCBI NO: 15230785 NR Description: DAG protein, putative; protein id: At3g06790.1
  misc_feature (62)..(218): Homolog of NCBI NO: 21593052 NR Description: DAG protein, putative [Arabidopsis thaliana]
  misc_feature (62)..(218): Homolog of NCBI NO: 15220382 NR Description: DAG protein, putative
  misc_feature (1)..(218): Homolog of NCBI NO: 6014904 NR Description: DAG PROTEIN, CHLOROPLAST PRECURSOR
  misc_feature (3)..(223): Homolog of NCBI NO: 38636775 NR Description: putative DAG protein [Oryza sativa (japonica

SEQ ID NO: 18216 - protein, 164 aa, Zea mays subsp. mays; identical to SEQ ID NO: 16482
  peptide (1)..(164): Ceres Seq. ID no. 12406463

SEQ ID NO: 18217 - DNA, 735 bp, Zea mays subsp. mays
  misc_feature (1)..(735): Ceres Seq. ID no. 14305333
  misc_feature: MA Experiment ID: 108522 Result: Up-regulated in Transcription
  misc_feature: MA Experiment 108522 PARAMETER Experiment Name: Zm_42deg_Heat_P Parameter: Age (day) Value: 8
  misc_feature: MA Experiment 108522 PARAMETER Experiment Name: Zm_42deg_Heat_P Parameter: Organism Value: Zea mays
  misc_feature: MA Experiment 108522 PARAMETER Experiment Name: Zm_42deg_Heat_P Parameter: Plant Line Value: 35A19
  misc_feature: MA Experiment 108522 PARAMETER Experiment Name: Zm_42deg_Heat_P Parameter: Temperature (deg C) Value: 42 vs. 22
  misc_feature: MA Experiment 108522 PARAMETER Experiment Name: Zm_42deg_Heat_P Parameter: Timepoint (hr) Value: 1
  misc_feature: MA Experiment 108522 PARAMETER Experiment Name: Zm_42deg_Heat_P Parameter: Tissue Value: Aerial
  misc_feature: MA Experiment ID: 108523 Result: Up-regulated in Transcription
  misc_feature: MA Experiment 108523 PARAMETER Experiment Name: Zm_42deg_Heat_P Parameter: Age (day) Value: 8
  misc_feature: MA Experiment 108523 PARAMETER Experiment Name: Zm_42deg_Heat_P Parameter: Organism Value: Zea mays
  misc_feature: MA Experiment 108523 PARAMETER Experiment Name: Zm_42deg_Heat_P Parameter: Plant Line Value: 35A19
  misc_feature: MA Experiment 108523 PARAMETER Experiment Name: Zm_42deg_Heat_P Parameter: Temperature (deg C) Value: 42 vs. 22
  misc_feature: MA Experiment 108523 PARAMETER Experiment Name: Zm_42deg_Heat_P Parameter: Timepoint (hr) Value: 6
  misc_feature: MA Experiment 108523 PARAMETER Experiment Name: Zm_42deg_Heat_P Parameter: Tissue Value: Aerial
gattacacagaattccctcccaatcggcggcgccacgatgcgcctccgcagccgggcaatctttcccctcgtccgcaccaccgccaccaccacatcggccgcgtcttcgtcgccggcggtgctgagcatcggccacgcgctgcgcgagcgccggctgttcacgggggacgacgtggcggcgtacgcggcgatcagcggtgaccgcaacccggtgcacctcgacgacgccgtcgcccgggagctgagcgggttccagcgaggccgcgtggtgcacggcatgctcgtggcgtccctcttcccttccatcatcgctgccacctggcgctgtgtacgcgagccagacgctcaagtttgcggcgccggtgtacgtcggggatgaggtggttgctcgagtccaggcactcaacatcaggacggcggcggcgacgaacagctgcacggcaagacgatatgtcgtcaagttcgcaaccaaatgcttcatggacgaagaggaaggctctgttgcgattgaaggcgaagcaatggctgtcctgcctacactggagctcagctctcagtcgactagaaactaggagtggcctcaaaccgggtgactagtcacaagttgctgttgcttaatcatacccgacctggtaatccctctcttctggaacactgtgtagaatgcgtgtaaactaaacttagtgtagcctttacattataagcgaggagtgaaataaagctgttgtttatgac

SEQ ID NO: 18218 - protein, 125 aa, Zea mays subsp. mays
  peptide (1)..(125): Ceres Seq. ID no. 14305334
  misc_feature (37)..(105): Pfam Name: MaoC like domain Pfam Description: MaoC like domain
  misc_feature (41)..(103): Homolog of NCBI NO: 22958771 NR Description: hypothetical protein [Rhodobacter sphaeroides]
  misc_feature (41)..(102): Homolog of NCBI NO: 23060433 NR Description: hypothetical protein [Pseudomonas fluorescens
  misc_feature (41)..(106): Homolog of NCBI NO: 23016355 NR Description: hypothetical protein [Magnetospirillum
  misc_feature (41)..(103): Homolog of NCBI NO: 28948376 NR Description: Chain A, (R)-Hydratase From A. Caviae Involved In
  misc_feature (41)..(106): Homolog of NCBI NO: 16124957 NR Description: MaoC family protein [Caulobacter crescentus CB15]
  misc_feature (35)..(103): Homolog of NCBI NO: 18652297 NR Description: enoyl-CoA hydrotase [Aeromonas hydrophila]
  misc_feature (17)..(105): Homolog of NCBI NO: 15239296 NR Description: expressed protein [Arabidopsis thaliana]
  misc_feature (17)..(105): Homolog of NCBI NO: 10177725 NR Description: gene_id:K9B18.4~unknown protein [Arabidopsis
ITQNSLPIGGATMRLRSRAIFPLVRTTATTTSAASSSPAVLSIGHALRERRLFTGDDVAAYAAISGDRNPVHLDDAVARELSGFQRGRVVHGMLVASLFPSIIAATWRCVREPDAQVCGAGVRRG

SEQ ID NO: 18219 - protein, 113 aa, Zea mays subsp. mays
  peptide (1)..(113): Ceres Seq. ID no. 14305335
  misc_feature (25)..(93): Pfam Name: MaoC like domain Pfam Description: MaoC like domain
  misc_feature (29)..(91): Homolog of NCBI NO: 22958771 NR Description: hypothetical protein [Rhodobacter sphaeroides]
  misc_feature (29)..(90): Homolog of NCBI NO: 23060433 NR Description: hypothetical protein [Pseudomonas fluorescens
  misc_feature (29)..(94): Homolog of NCBI NO: 23016355 NR Description: hypothetical protein [Magnetospirillum
  misc_feature (29)..(91): Homolog of NCBI NO: 28948376 NR Description: Chain A, (R)-Hydratase From A. Caviae Involved In
  misc_feature (29)..(94): Homolog of NCBI NO: 16124957 NR Description: MaoC family protein [Caulobacter crescentus CB15]
  misc_feature (23)..(91): Homolog of NCBI NO: 18652297 NR Description: enoyl-CoA hydrotase [Aeromonas hydrophila]
  misc_feature (5)..(93): Homolog of NCBI NO: 15239296 NR Description: expressed protein [Arabidopsis thaliana]
  misc_feature (5)..(93): Homolog of NCBI NO: 10177725 NR Description: gene_id:K9B18.4~unknown protein [Arabidopsis
MRLRSRAIFPLVRTTATTTSAASSSPAVLSIGHALRERRLFTGDDVAAYAAISGDRNPVHLDDAVARELSGFQRGRVVHGMLVASLFPSIIAATWRCVREPDAQVCGAGVRRG

SEQ ID NO: 18220 - protein, 73 aa, Zea mays subsp. mays
  peptide (1)..(73): Ceres Seq. ID no. 14305336
MRWLLESRHSTSGRRRRRTAARQDDMSSSSQPNASWTKRKALLRLKAKQWLSCLHWSSALSRLETRSGLKPGD

SEQ ID NO: 18221 - DNA, 802 bp, Zea mays subsp. mays
  misc_feature (1)..(802): Ceres Seq. ID no. 12381404
  misc_feature: MA Experiment ID: 108504 Result: Up-regulated in Transcription
  misc_feature: MA Experiment 108504 PARAMETER Experiment Name: Zm_Drought_P Parameter: Age (day) Value: 8
  misc_feature: MA Experiment 108504 PARAMETER Experiment Name: Zm_Drought_P Parameter: Organism Value: Zea mays
  misc_feature: MA Experiment 108504 PARAMETER Experiment Name: Zm_Drought_P Parameter: Plant Line Value: 35A19
  misc_feature: MA Experiment 108504 PARAMETER Experiment Name: Zm_Drought_P Parameter: Timepoint (hr) Value: 12
  misc_feature: MA Experiment 108504 PARAMETER Experiment Name: Zm_Drought_P Parameter: Tissue Value: Aerial
  misc_feature: MA Experiment 108504 PARAMETER Experiment Name: Zm_Drought_P Parameter: Treatment Value: Drought vs. No Drought
  misc_feature: MA Experiment ID: 108523 Result: Up-regulated in Transcription
  misc_feature: MA Experiment 108523 PARAMETER Experiment Name: Zm_42deg_Heat_P Parameter: Age (day) Value: 8
  misc_feature: MA Experiment 108523 PARAMETER Experiment Name: Zm_42deg_Heat_P Parameter: Organism Value: Zea mays
  misc_feature: MA Experiment 108523 PARAMETER Experiment Name: Zm_42deg_Heat_P Parameter: Plant Line Value: 35A19
  misc_feature: MA Experiment 108523 PARAMETER Experiment Name: Zm_42deg_Heat_P Parameter: Temperature (deg C) Value: 42 vs. 22
  misc_feature: MA Experiment 108523 PARAMETER Experiment Name: Zm_42deg_Heat_P Parameter: Timepoint (hr) Value: 6
  misc_feature: MA Experiment 108523 PARAMETER Experiment Name: Zm_42deg_Heat_P Parameter: Tissue Value: Aerial
  misc_feature: MA Experiment ID: 108529 Result: Up-regulated in Transcription
  misc_feature: MA Experiment 108529 PARAMETER Experiment Name: Zm_Imbibed_Seeds_P Parameter: Age (day) Value: 5 vs. 2
  misc_feature: MA Experiment 108529 PARAMETER Experiment Name: Zm_Imbibed_Seeds_P Parameter: Organism Value: Zea mays
  misc_feature: MA Experiment 108529 PARAMETER Experiment Name: Zm_Imbibed_Seeds_P Parameter: Plant Line Value: 35A19
  misc_feature: MA Experiment 108529 PARAMETER Experiment Name: Zm_Imbibed_Seeds_P Parameter: Tissue Value: Roots vs. Embryo
  misc_feature: MA Experiment ID: 108556 Result: Up-regulated in Transcription
  misc_feature: MA Experiment 108556 PARAMETER Experiment Name: Zm_Drought_P Parameter: Age (day) Value: 9
  misc_feature: MA Experiment 108556 PARAMETER Experiment Name: Zm_Drought_P Parameter: Organism Value: Zea mays
  misc_feature: MA Experiment 108556 PARAMETER Experiment Name: Zm_Drought_P Parameter: Plant Line Value: 35A19
  misc_feature: MA Experiment 108556 PARAMETER Experiment Name: Zm_Drought_P Parameter: Timepoint (hr) Value: 24
  misc_feature: MA Experiment 108556 PARAMETER Experiment Name: Zm_Drought_P Parameter: Tissue Value: Aerial
  misc_feature: MA Experiment 108556 PARAMETER Experiment Name: Zm_Drought_P Parameter: Treatment Value: Drought vs. No Drought
  misc_feature: MA Experiment ID: 108597 Result: Up-regulated in Transcription
  misc_feature: MA Experiment 108597 PARAMETER Experiment Name: Zm_100uM_ABA_P Parameter: Age (day) Value: 9
  misc_feature: MA Experiment 108597 PARAMETER Experiment Name: Zm_100uM_ABA_P Parameter: Organism Value: Zea mays
  misc_feature: MA Experiment 108597 PARAMETER Experiment Name: Zm_100uM_ABA_P Parameter: Plant Line Value: 35A19
  misc_feature: MA Experiment 108597 PARAMETER Experiment Name: Zm_100uM_ABA_P Parameter: Timepoint (hr) Value: 24
  misc_feature: MA Experiment 108597 PARAMETER Experiment Name: Zm_100uM_ABA_P Parameter: Tissue Value: Aerial
  misc_feature: MA Experiment 108597 PARAMETER Experiment Name: Zm_100uM_ABA_P Parameter: Treatment Value: 100uM ABA vs. No Treatment
  misc_feature: MA Experiment ID: 20000480 Result: Up-regulated in Transcription
  misc_feature: MA Experiment 20000480 PARAMETER Experiment Name: Zm_Drought_P Parameter: Age (day) Value: 11
  misc_feature: MA Experiment 20000480 PARAMETER Experiment Name: Zm_Drought_P Parameter: Organism Value: Zea mays
  misc_feature: MA Experiment 20000480 PARAMETER Experiment Name: Zm_Drought_P Parameter: Plant Line Value: 35A19
  misc_feature: MA Experiment 20000480 PARAMETER Experiment Name: Zm_Drought_P Parameter: Timepoint (hr) Value: 72
  misc_feature: MA Experiment 20000480 PARAMETER Experiment Name: Zm_Drought_P Parameter: Tissue Value: Aerial
  misc_feature: MA Experiment 20000480 PARAMETER Experiment Name: Zm_Drought_P Parameter: Treatment Value: Drought vs. No Drought
  misc_feature: MA Experiment ID: 20000534 Result: Down-regulated in Transcription
  misc_feature: MA Experiment 20000534 PARAMETER Experiment Name: Zm_Hybrid_Pollen_P Parameter: Age (day) Value: 8
  misc_feature: MA Experiment 20000534 PARAMETER Experiment Name: Zm_Hybrid_Pollen_P Parameter: Organism Value: Zea mays
  misc_feature: MA Experiment 20000534 PARAMETER Experiment Name: Zm_Hybrid_Pollen_P Parameter: Plant Line Value: 35A19
  misc_feature: MA Experiment 20000534 PARAMETER Experiment Name: Zm_Hybrid_Pollen_P Parameter: Tissue Value: Pollen vs. Aerial
  misc_feature: MA Experiment ID: 20000535 Result: Down-regulated in Transcription
  misc_feature: MA Experiment 20000535 PARAMETER Experiment Name: Zm_Hybrid_Seed_Dev_P Parameter: DAP Value: 30 vs. 12
  misc_feature: MA Experiment 20000535 PARAMETER Experiment Name: Zm_Hybrid_Seed_Dev_P Parameter: Organism Value: Zea mays
  misc_feature: MA Experiment 20000535 PARAMETER Experiment Name: Zm_Hybrid_Seed_Dev_P Parameter: Plant Line Value: 35A19
  misc_feature: MA Experiment 20000535 PARAMETER Experiment Name: Zm_Hybrid_Seed_Dev_P Parameter: Tissue Value: Embryo vs. Unfert Floret
tctctacggggtaggctctgtccttcttacatggatgaagatatattctggaagatttactttaggttgcttgagtcaaacataaatgagcataattctgaggaagatatccggagcgtgccaaattctgtacatcacaacaatgagatagagtctgattctccacctcacgtctgtgagatagaaagtgtgaaaagcaaccaagaagggtaccaatcttcggatggtcgtgctttccccaagacaagatctgagcgaagcattgaccaatgggtatttgcaaagtcaaaatctgaggaaagcatggatcagtggtctgaaataccttcagatgtggaatccttcagagaaggtaaaaggtacctcagtagcgaggagctgagtgacgttgatagtgccaacgttgttgtcatggacaaatacatggattcagtcctctctgaccggaggaaccttccctacgctagctcctcggtgcgccgggattcagtcagacgaaaacctgcttcgtccgccgattacagccgccgacctccgcagccaactccacctgcatcgctgtcaaagaaggaatcgtgggatgtcattgaagattcggagttcgatatacttgacagttagtaattgagatctttgcgatctcaaggctgtttatccttctattttcttccatgtttccccacacttcacctcgtttgtaaatgtggacgtgcaggtggcgtcagtgatagtgggaaaggactaatgttctttttaccaatatattataacagtgtgtgcatataaatcttctgagctcgcc

SEQ ID NO: 18222 - protein, 206 aa, Zea mays subsp. mays
  peptide (1)..(206): Ceres Seq. ID no. 12381405
  misc_feature (1)..(165): Homolog of NCBI NO: 34898448 NR Description: hypothetical protein [Oryza sativa (japonica
SLRGRLCPSYMDEDIFWKIYFRLLESNINEHNSEEDIRSVPNSVHHNNEIESDSPPHVCEIESVKSNQEGYQSSDGRAFPKTRSERSIDQWVFAKSKSEESMDQWSEIPSDVESFREGKRYLSSEELSDVDSANVVVMDKYMDSVLSDRRNLPYASSSVRRDSVRRKPASSADYSRRPPQPTPPASLSKKESWDVIEDSEFDILDS

SEQ ID NO: 18223 - protein, 196 aa, Zea mays subsp. mays
  peptide (1)..(196): Ceres Seq. ID no. 12381406
  misc_feature (1)..(155): Homolog of NCBI NO: 34898448 NR Description: hypothetical protein [Oryza sativa (japonica
MDEDIFWKIYFRLLESNINEHNSEEDIRSVPNSVHHNNEIESDSPPHVCEIESVKSNQEGYQSSDGRAFPKTRSERSIDQWVFAKSKSEESMDQWSEIPSDVESFREGKRYLSSEELSDVDSANVVVMDKYMDSVLSDRRNLPYASSSVRRDSVRRKPASSADYSRRPPQPTPPASLSKKESWDVIEDSEFDILDS

SEQ ID NO: 18224 - protein, 105 aa, Zea mays subsp. mays
  peptide (1)..(105): Ceres Seq. ID no. 12381407
  misc_feature (1)..(64): Homolog of NCBI NO: 34898448 NR Description: hypothetical protein [Oryza sativa (japonica
MDQWSEIPSDVESFREGKRYLSSEELSDVDSANVVVMDKYMDSVLSDRRNLPYASSSVRRDSVRRKPASSADYSRRPPQPTPPASLSKKESWDVIEDSEFDILDS

SEQ ID NO: 18225 - DNA, 1132 bp, Zea mays subsp. mays
  misc_feature (1)..(1132): Ceres Seq. ID no. 12416375
  misc_feature: MA Experiment ID: 108527 Result: Up-regulated in Transcription
  misc_feature: MA Experiment 108527 PARAMETER Experiment Name: Zm_5mM_NO_P Parameter: Age (day) Value: 8
  misc_feature: MA Experiment 108527 PARAMETER Experiment Name: Zm_5mM_NO_P Parameter: Organism Value: Zea mays
  misc_feature: MA Experiment 108527 PARAMETER Experiment Name: Zm_5mM_NO_P Parameter: Plant Line Value: 35A19
  misc_feature: MA Experiment 108527 PARAMETER Experiment Name: Zm_5mM_NO_P Parameter: Timepoint (hr) Value: 6
  misc_feature: MA Experiment 108527 PARAMETER Experiment Name: Zm_5mM_NO_P Parameter: Tissue Value: Aerial
  misc_feature: MA Experiment 108527 PARAMETER Experiment Name: Zm_5mM_NO_P Parameter: Treatment Value: 5mM NO vs. No Treatment
  misc_feature: MA Experiment ID: 108528 Result: Down-regulated in Transcription
  misc_feature: MA Experiment 108528 PARAMETER Experiment Name: Zm_Imbibed_Seeds_P Parameter: Age (day) Value: 5 vs. 2
  misc_feature: MA Experiment 108528 PARAMETER Experiment Name: Zm_Imbibed_Seeds_P Parameter: Organism Value: Zea mays
  misc_feature: MA Experiment 108528 PARAMETER Experiment Name: Zm_Imbibed_Seeds_P Parameter: Plant Line Value: 35A19
  misc_feature: MA Experiment 108528 PARAMETER Experiment Name: Zm_Imbibed_Seeds_P Parameter: Tissue Value: Aerial vs. Embryo
  misc_feature: MA Experiment ID: 108530 Result: Down-regulated in Transcription
  misc_feature: MA Experiment 108530 PARAMETER Experiment Name: Zm_Imbibed_Seeds_P Parameter: Age (day) Value: 6 vs. 2
  misc_feature: MA Experiment 108530 PARAMETER Experiment Name: Zm_Imbibed_Seeds_P Parameter: Organism Value: Zea mays
  misc_feature: MA Experiment 108530 PARAMETER Experiment Name: Zm_Imbibed_Seeds_P Parameter: Plant Line Value: 35A19
  misc_feature: MA Experiment 108530 PARAMETER Experiment Name: Zm_Imbibed_Seeds_P Parameter: Tissue Value: Aerial vs. Embryo
  misc_feature: MA Experiment ID: 108535 Result: Up-regulated in Transcription
  misc_feature: MA Experiment 108535 PARAMETER Experiment Name: Zm_Meristem_P Parameter: Age (day) Value: 8
  misc_feature: MA Experiment 108535 PARAMETER Experiment Name: Zm_Meristem_P Parameter: Organism Value: Zea mays
  misc_feature: MA Experiment 108535 PARAMETER Experiment Name: Zm_Meristem_P Parameter: Plant Line Value: 35A19
  misc_feature: MA Experiment 108535 PARAMETER Experiment Name: Zm_Meristem_P Parameter: Tissue Value: Root Meristem vs. Above Root Meristem
  misc_feature: MA Experiment ID: 108547 Result: Down-regulated in Transcription
  misc_feature: MA Experiment 108547 PARAMETER Experiment Name: Zm_Imbibed_Seeds_P Parameter: Age (day) Value: 4 vs. 2
  misc_feature: MA Experiment 108547 PARAMETER Experiment Name: Zm_Imbibed_Seeds_P Parameter: Organism Value: Zea mays
  misc_feature: MA Experiment 108547 PARAMETER Experiment Name: Zm_Imbibed_Seeds_P Parameter: Plant Line Value: 35A19
  misc_feature: MA Experiment 108547 PARAMETER Experiment Name: Zm_Imbibed_Seeds_P Parameter: Tissue Value: Aerial vs. Embryo
  misc_feature: MA Experiment ID: 108559 Result: Up-regulated in Transcription
  misc_feature: MA Experiment 108559 PARAMETER Experiment Name: Zm_5mM_NO_P Parameter: Age (day) Value: 8
  misc_feature: MA Experiment 108559 PARAMETER Experiment Name: Zm_5mM_NO_P Parameter: Organism Value: Zea mays
  misc_feature: MA Experiment 108559 PARAMETER Experiment Name: Zm_5mM_NO_P Parameter: Plant Line Value: 35A19
  misc_feature: MA Experiment 108559 PARAMETER Experiment Name: Zm_5mM_NO_P Parameter: Timepoint (hr) Value: 12
  misc_feature: MA Experiment 108559 PARAMETER Experiment Name: Zm_5mM_NO_P Parameter: Tissue Value: Aerial
  misc_feature: MA Experiment 108559 PARAMETER Experiment Name: Zm_5mM_NO_P Parameter: Treatment Value: 5mM NO vs. No Treatment
  misc_feature: MA Experiment ID: 108689 Result: Down-regulated in Transcription
  misc_feature: MA Experiment 108689 PARAMETER Experiment Name: Zm_Drought_Roots_P Parameter: Age (day) Value: 9
  misc_feature: MA Experiment 108689 PARAMETER Experiment Name: Zm_Drought_Roots_P Parameter: Organism Value: Zea mays
  misc_feature: MA Experiment 108689 PARAMETER Experiment Name: Zm_Drought_Roots_P Parameter: Plant Line Value: 35A19
  misc_feature: MA Experiment 108689 PARAMETER Experiment Name: Zm_Drought_Roots_P Parameter: Timepoint (hr) Value: 24
  misc_feature: MA Experiment 108689 PARAMETER Experiment Name: Zm_Drought_Roots_P Parameter: Tissue Value: Roots
  misc_feature: MA Experiment 108689 PARAMETER Experiment Name: Zm_Drought_Roots_P Parameter: Treatment Value: Drought vs. No Drought
  misc_feature: MA Experiment ID: 20000478 Result: Up-regulated in Transcription
  misc_feature: MA Experiment 20000478 PARAMETER Experiment Name: Zm_5mM_SA_P Parameter: Age (day) Value: 11
  misc_feature: MA Experiment 20000478 PARAMETER Experiment Name: Zm_5mM_SA_P Parameter: Organism Value: Zea mays
  misc_feature: MA Experiment 20000478 PARAMETER Experiment Name: Zm_5mM_SA_P Parameter: Plant Line Value: 35A19
  misc_feature: MA Experiment 20000478 PARAMETER Experiment Name: Zm_5mM_SA_P Parameter: Timepoint (hr) Value: 72
  misc_feature: MA Experiment 20000478 PARAMETER Experiment Name: Zm_5mM_SA_P Parameter: Tissue Value: Aerial
  misc_feature: MA Experiment 20000478 PARAMETER Experiment Name: Zm_5mM_SA_P Parameter: Treatment Value: 5mM SA vs. No Treatment
  misc_feature: MA Experiment ID: 20000627 Result: Up-regulated in Transcription
  misc_feature: MA Experiment 20000627 PARAMETER Experiment Name: Zm_Herbicide-Treatments_P Parameter: Timepoint (hr) Value: 12
  misc_feature: MA Experiment 20000627 PARAMETER Experiment Name: Zm_Herbicide-Treatments_P Parameter: Tissue Value: Aerial
  misc_feature: MA Experiment 20000627 PARAMETER Experiment Name: Zm_Herbicide-Treatments_P Parameter: Treatment Value: Finale vs. No Treatment
  misc_feature: MA Experiment ID: 20000630 Result: Up-regulated in Transcription
  misc_feature: MA Experiment 20000630 PARAMETER Experiment Name: Zm_Herbicide-Treatments_P Parameter: Timepoint (hr) Value: 4
  misc_feature: MA Experiment 20000630 PARAMETER Experiment Name: Zm_Herbicide-Treatments_P Parameter: Tissue Value: Aerial
  misc_feature: MA Experiment 20000630 PARAMETER Experiment Name: Zm_Herbicide-Treatments_P Parameter: Treatment Value: Roundup vs. No Treatment
caactttcagaacagccaaattaagaagcaaacatattcttctagttcttccgtggtaggacatggcagagagcatggggagagacggtggtgatggtgagctcaagctgctggggctgtgggcgagcccgttcgtagcgagagcgaagctcgcgctccagatcaagggcctaagctacgagtacgtcgaggaggatctcggcaacaagagcgagctgctgctcagctccaacccggtgcacaagacggtgccggtgctgatccacaacgggacgccggtctgcgagtcgacggtcatcgtccagtacatcgacgacgctttcgccggcactggcccgtccctcctccccgctgacccctaccagcgcgcccttgctcgcttctgggccgcctacctcgaagacaagattgtgacgccgtggcggcggtttttcatggtcaaggccgacgaggagaaggccgaggcgatgaggcagacggtcgcagccatggacgcgctggagggaggcctgaaggaatgctcttctgggggtgggggccagagccccttcttcggcggcgacagcgtcggctacgtggacgtccttctgggtggcatggtttcatgggtcaaggcatccgagccgctctccggcgccaagatcatcgacgcagccaggacgccgctcctggccgcgtggatggagcgcttctgcgagctggacgcggccaaggcggtcctgcaggacgtccatgaggttgtcgagtacgccaggacggtgcaggcacgggttgccgctgcgaccgcaagcaatcagtagtggaaacaccgtgaaccccgaacccagtaggcaacgtgatcccatcttctcagttggctcccgttcggctcagtgcgtcacctctgtcctgccctttgcacctgccctatccgcgtgttcgtaagccgtcgtcccaggaaacgtcgtgccatagacgatctcccggactgttgagactaccaacgtgtgtttttgaacaggaacatgtacctgcaattaccgatacgtccatcctcgttgagtcaatggcaacgatgcaagggtctgcatcattttggaattacctgaatctatgaactgggaatgataaggtgggccacatttgatcattt

SEQ ID NO: 18226 - protein, 245 aa, Zea mays subsp. mays
  peptide (1)..(245): Ceres Seq. ID no. 12416376
  misc_feature (95)..(214): Pfam Name: Glutathione S-transferase, C-terminal domain Pfam Description: Glutathione S-transferase, C-terminal domain
  misc_feature (9)..(243): Homolog of NCBI NO: 37536310 NR Description: putative glutathione S-transferase
  misc_feature (9)..(244): Homolog of NCBI NO: 33304612 NR Description: tau class GST protein 3 [Oryza sativa (indica
  misc_feature (9)..(239): Homolog of NCBI NO: 11385535 NR Description: glutathione S-transferase GST 42 [Zea mays]
  misc_feature (9)..(241): Homolog of NCBI NO: 21956482 NR Description: glutathione-S-transferase 28e45 [Triticum
  misc_feature (9)..(243): Homolog of NCBI NO: 21730248 NR Description: Chain A, The Structure Of A Tau Class Glutathione
  misc_feature (10)..(244): Homolog of NCBI NO: 37536334 NR Description: putative glutathione S-transferase
  misc_feature (9)..(244): Homolog of NCBI NO: 22038178 NR Description: glutathione-S-transferase 2 [Aegilops tauschii]
  misc_feature (5)..(244): Homolog of NCBI NO: 37536332 NR Description: putative glutathione S-transferase
  misc_feature (6)..(241): Homolog of NCBI NO: 11385521 NR Description: glutathione S-transferase GST 35 [Zea mays]
  misc_feature (10)..(245): Homolog of NCBI NO: 37536330 NR Description: putative glutathione S-transferase
MAESMGRDGGDGELKLLGLWASPFVARAKLALQIKGLSYEYVEEDLGNKSELLLSSNPVHKTVPVLIHNGTPVCESTVIVQYIDDAFAGTGPSLLPADPYQRALARFWAAYLEDKIVTPWRRFFMVKADEEKAEAMRQTVAAMDALEGGLKECSSGGGGQSPFFGGDSVGYVDVLLGGMVSWVKASEPLSGAKIIDAARTPLLAAWMERFCELDAAKAVLQDVHEVVEYARTVQARVAAATASNQ

SEQ ID NO: 18227 - protein, 241 aa, Zea mays subsp. mays
  peptide (1)..(241): Ceres Seq. ID no. 12416377
  misc_feature (91)..(210): Pfam Name: Glutathione S-transferase, C-terminal domain Pfam Description: Glutathione S-transferase, C-terminal domain
  misc_feature (5)..(239): Homolog of NCBI NO: 37536310 NR Description: putative glutathione S-transferase
  misc_feature (5)..(240): Homolog of NCBI NO: 33304612 NR Description: tau class GST protein 3 [Oryza sativa (indica
  misc_feature (5)..(235): Homolog of NCBI NO: 11385535 NR Description: glutathione S-transferase GST 42 [Zea mays]
  misc_feature (5)..(237): Homolog of NCBI NO: 21956482 NR Description: glutathione-S-transferase 28e45 [Triticum
  misc_feature (5)..(239): Homolog of NCBI NO: 21730248 NR Description: Chain A, The Structure Of A Tau Class Glutathione
  misc_feature (6)..(240): Homolog of NCBI NO: 37536334 NR Description: putative glutathione S-transferase
  misc_feature (5)..(240): Homolog of NCBI NO: 22038178 NR Description: glutathione-S-transferase 2 [Aegilops tauschii]
  misc_feature (1)..(240): Homolog of NCBI NO: 37536332 NR Description: putative glutathione S-transferase
  misc_feature (2)..(237): Homolog of NCBI NO: 11385521 NR Description: glutathione S-transferase GST 35 [Zea mays]
  misc_feature (6)..(241): Homolog of NCBI NO: 37536330 NR Description: putative glutathione S-transferase
MGRDGGDGELKLLGLWASPFVARAKLALQIKGLSYEYVEEDLGNKSELLLSSNPVHKTVPVLIHNGTPVCESTVIVQYIDDAFAGTGPSLLPADPYQRALARFWAAYLEDKIVTPWRRFFMVKADEEKAEAMRQTVAAMDALEGGLKECSSGGGGQSPFFGGDSVGYVDVLLGGMVSWVKASEPLSGAKIIDAARTPLLAAWMERFCELDAAKAVLQDVHEVVEYARTVQARVAAATASNQ

SEQ ID NO: 18228 - DNA, 699 bp, Zea mays subsp. mays
  misc_feature (1)..(699): Ceres Seq. ID no. 12358014
  misc_feature: MA Experiment ID: 108528 Result: Up-regulated in Transcription
  misc_feature: MA Experiment 108528 PARAMETER Experiment Name: Zm_Imbibed_Seeds_P Parameter: Age (day) Value: 5 vs. 2
  misc_feature: MA Experiment 108528 PARAMETER Experiment Name: Zm_Imbibed_Seeds_P Parameter: Organism Value: Zea mays
  misc_feature: MA Experiment 108528 PARAMETER Experiment Name: Zm_Imbibed_Seeds_P Parameter: Plant Line Value: 35A19
  misc_feature: MA Experiment 108528 PARAMETER Experiment Name: Zm_Imbibed_Seeds_P Parameter: Tissue Value: Aerial vs. Embryo
  misc_feature: MA Experiment ID: 108530 Result: Up-regulated in Transcription
  misc_feature: MA Experiment 108530 PARAMETER Experiment Name: Zm_Imbibed_Seeds_P Parameter: Age (day) Value: 6 vs. 2
  misc_feature: MA Experiment 108530 PARAMETER Experiment Name: Zm_Imbibed_Seeds_P Parameter: Organism Value: Zea mays
  misc_feature: MA Experiment 108530 PARAMETER Experiment Name: Zm_Imbibed_Seeds_P Parameter: Plant Line Value: 35A19
  misc_feature: MA Experiment 108530 PARAMETER Experiment Name: Zm_Imbibed_Seeds_P Parameter: Tissue Value: Aerial vs. Embryo
  misc_feature: MA Experiment ID: 108545 Result: Up-regulated in Transcription
  misc_feature: MA Experiment 108545 PARAMETER Experiment Name: Zm_Imbibed_Seeds_P Parameter: Age (day) Value: 3 vs. 2
  misc_feature: MA Experiment 108545 PARAMETER Experiment Name: Zm_Imbibed_Seeds_P Parameter: Organism Value: Zea mays
  misc_feature: MA Experiment 108545 PARAMETER Experiment Name: Zm_Imbibed_Seeds_P Parameter: Plant Line Value: 35A19
  misc_feature: MA Experiment 108545 PARAMETER Experiment Name: Zm_Imbibed_Seeds_P Parameter: Tissue Value: Aerial vs. Embryo
  misc_feature: MA Experiment ID: 108547 Result: Up-regulated in Transcription
  misc_feature: MA Experiment 108547 PARAMETER Experiment Name: Zm_Imbibed_Seeds_P Parameter: Age (day) Value: 4 vs. 2
  misc_feature: MA Experiment 108547 PARAMETER Experiment Name: Zm_Imbibed_Seeds_P Parameter: Organism Value: Zea mays
  misc_feature: MA Experiment 108547 PARAMETER Experiment Name: Zm_Imbibed_Seeds_P Parameter: Plant Line Value: 35A19
  misc_feature: MA Experiment 108547 PARAMETER Experiment Name: Zm_Imbibed_Seeds_P Parameter: Tissue Value: Aerial vs. Embryo
  misc_feature: MA Experiment ID: 20000479 Result: Down-regulated in Transcription
  misc_feature: MA Experiment 20000479 PARAMETER Experiment Name: Zm_Drought_P Parameter: Age (day) Value: 10
  misc_feature: MA Experiment 20000479 PARAMETER Experiment Name: Zm_Drought_P Parameter: Organism Value: Zea mays
  misc_feature: MA Experiment 20000479 PARAMETER Experiment Name: Zm_Drought_P Parameter: Plant Line Value: 35A19
  misc_feature: MA Experiment 20000479 PARAMETER Experiment Name: Zm_Drought_P Parameter: Timepoint (hr) Value: 48
  misc_feature: MA Experiment 20000479 PARAMETER Experiment Name: Zm_Drought_P Parameter: Tissue Value: Aerial
  misc_feature: MA Experiment 20000479 PARAMETER Experiment Name: Zm_Drought_P Parameter: Treatment Value: Drought vs. No Drought
  misc_feature: MA Experiment ID: 20000480 Result: Down-regulated in Transcription
  misc_feature: MA Experiment 20000480 PARAMETER Experiment Name: Zm_Drought_P Parameter: Age (day) Value: 11
  misc_feature: MA Experiment 20000480 PARAMETER Experiment Name: Zm_Drought_P Parameter: Organism Value: Zea mays
  misc_feature: MA Experiment 20000480 PARAMETER Experiment Name: Zm_Drought_P Parameter: Plant Line Value: 35A19
  misc_feature: MA Experiment 20000480 PARAMETER Experiment Name: Zm_Drought_P Parameter: Timepoint (hr) Value: 72
  misc_feature: MA Experiment 20000480 PARAMETER Experiment Name: Zm_Drought_P Parameter: Tissue Value: Aerial
  misc_feature: MA Experiment 20000480 PARAMETER Experiment Name: Zm_Drought_P Parameter: Treatment Value: Drought vs. No Drought
  misc_feature: MA Experiment ID: 20000626 Result: Down-regulated in Transcription
  misc_feature: MA Experiment 20000626 PARAMETER Experiment Name: Zm_Herbicide-Treatments_P Parameter: Timepoint (hr) Value: 12
  misc_feature: MA Experiment 20000626 PARAMETER Experiment Name: Zm_Herbicide-Treatments_P Parameter: Tissue Value: Aerial
  misc_feature: MA Experiment 20000626 PARAMETER Experiment Name: Zm_Herbicide-Treatments_P Parameter: Treatment Value: Roundup vs. No Treatment
aaaaaagtccccattagtaaggcaaaagccgcaaaggcttatccttccgagtctccaccaacgacaatggcgagcgctcccgccggctttgcccccaccgtcgctgcttccacaagcttcggcttcactatcgtggcatgccccttcccctcgcgcacgcatcttccagcggcctcctccgttggggttcgcaatcagcagcgcgcgtccactgccaccgcctgcctgccgccgccgagtacctcccatggcgccgccaccaggctgtacgtcagcggtctttcgttccgcacaaccgaacggagcctccgggacgcgttcgagaagtttggtgaccttacggaagtttgtctcgtgatggatagagtagcgaagcgaccgagaggtttcgctttcctttcttacaccggggaggaggaagccaggggcgccatggaagggatgcacgggaagttcctggatggcagagtgatctttgtcgaggttgcgaaacgaagagttgaagcctgaaggatcgtgcccaaatactgctcaaaaacttgattgttggttccagcaaagtccctggtgagacacacactgatgcaggcaaagtttagatgtgaacagaggaaccgaagaaaccttagcagcattcggtcgtgtagctgccatttcattgttttacaaaacaacattcgtaatttacatatataggtc

SEQ ID NO: 18229 - protein, 169 aa, Zea mays subsp. mays
  peptide (1)..(169): Ceres Seq. ID no. 12358015
  misc_feature (89)..(160): Pfam Name: RNA recognition motif. (a.k.a. RRM, RBD, or RNP domain) Pfam Description: RNA recognition motif. (a.k.a. RRM, RBD, or RNP
  misc_feature (63)..(166): Homolog of NCBI NO: 34906972 NR Description: putative glycine-rich RNA-binding protein 2
  misc_feature (84)..(166): Homolog of NCBI NO: 15239958 NR Description: RRM-containing protein
  misc_feature (57)..(166): Homolog of NCBI NO: 38636774 NR Description: putative RNA recognition motif (RRM)-containing
  misc_feature (86)..(168): Homolog of NCBI NO: 15231311 NR Description: RRM-containing protein; protein id: At3g46020.1
  misc_feature (88)..(163): Homolog of NCBI NO: 28173040 NR Description: hyperosmotic glycine rich protein [Salmo salar]
  misc_feature (67)..(167): Homolog of NCBI NO: 38344030 NR Description: OJ991214_12.1 [Oryza sativa (japonica
  misc_feature (114)..(168): Homolog of NCBI NO: 38346812 NR Description: OSJNBa0088A01.19 [Oryza sativa (japonica
  misc_feature (88)..(166): Homolog of NCBI NO: 18402803 NR Description: expressed protein
  misc_feature (57)..(166): Homolog of NCBI NO: 34898598 NR Description: P0534A03.25 [Oryza sativa (japonica
  misc_feature (78)..(169): Homolog of NCBI NO: 15219486 NR Description: RRM-containing RNA-binding protein, putative
KKVPISKAKAAKAYPSESPPTTMASAPAGFAPTVAASTSFGFTIVACPFPSRTHLPAASSVGVRNQQRASTATACLPPPSTSHGAATRLYVSGLSFRTTERSLRDAFEKFGDLTEVCLVMDRVAKRPRGFAFLSYTGEEEARGAMEGMHGKFLDGRVIFVEVAKRRVEA

SEQ ID NO: 18230 - protein, 147 aa, Zea mays subsp. mays
  peptide (1)..(147): Ceres Seq. ID no. 12358016
  misc_feature (67)..(138): Pfam Name: RNA recognition motif. (a.k.a. RRM, RBD, or RNP domain) Pfam Description: RNA recognition motif. (a.k.a. RRM, RBD, or RNP
  misc_feature (41)..(144): Homolog of NCBI NO: 34906972 NR Description: putative glycine-rich RNA-binding protein 2
  misc_feature (62)..(144): Homolog of NCBI NO: 15239958 NR Description: RRM-containing protein
  misc_feature (35)..(144): Homolog of NCBI NO: 38636774 NR Description: putative RNA recognition motif (RRM)-containing
  misc_feature (64)..(146): Homolog of NCBI NO: 15231311 NR Description: RRM-containing protein; protein id: At3g46020.1
  misc_feature (66)..(141): Homolog of NCBI NO: 28173040 NR Description: hyperosmotic glycine rich protein [Salmo salar]
  misc_feature (45)..(145): Homolog of NCBI NO: 38344030 NR Description: OJ991214_12.1 [Oryza sativa (japonica
  misc_feature (92)..(146): Homolog of NCBI NO: 38346812 NR Description: OSJNBa0088A01.19 [Oryza sativa (japonica
  misc_feature (66)..(144): Homolog of NCBI NO: 18402803 NR Description: expressed protein
  misc_feature (35)..(144): Homolog of NCBI NO: 34898598 NR Description: P0534A03.25 [Oryza sativa (japonica
  misc_feature (56)..(147): Homolog of NCBI NO: 15219486 NR Description: RRM-containing RNA-binding protein, putative
MASAPAGFAPTVAASTSFGFTIVACPFPSRTHLPAASSVGVRNQQRASTATACLPPPSTSHGAATRLYVSGLSFRTTERSLRDAFEKFGDLTEVCLVMDRVAKRPRGFAFLSYTGEEEARGAMEGMHGKFLDGRVIFVEVAKRRVEA

SEQ ID NO: 18231 - protein, 118 aa, Zea mays subsp. mays
  peptide (1)..(118): Ceres Seq. ID no. 12358017
KKSPLVRQKPQRLILPSLHQRQWRALPPALPPPSLLPQASASLSWHAPSPRARIFQRPPPLGFAISSARPLPPPACRRRVPPMAPPPGCTSAVFRSAQPNGASGTRSRSLVTLRKFVS

SEQ ID NO: 18232 - DNA, 1444 bp, Zea mays subsp. mays; identical to SEQ ID NO: 13725
  misc_feature (1)..(1444): Ceres Seq. ID no. 12455051
  misc_feature: MA Experiment ID: 108504 Result: Up-regulated in Transcription
  misc_feature: MA Experiment 108504 PARAMETER Experiment Name: Zm_Drought_P Parameter: Age (day) Value: 8
  misc_feature: MA Experiment 108504 PARAMETER Experiment Name: Zm_Drought_P Parameter: Organism Value: Zea mays
  misc_feature: MA Experiment 108504 PARAMETER Experiment Name: Zm_Drought_P Parameter: Plant Line Value: 35A19
  misc_feature: MA Experiment 108504 PARAMETER Experiment Name: Zm_Drought_P Parameter: Timepoint (hr) Value: 12
  misc_feature: MA Experiment 108504 PARAMETER Experiment Name: Zm_Drought_P Parameter: Tissue Value: Aerial
  misc_feature: MA Experiment 108504 PARAMETER Experiment Name: Zm_Drought_P Parameter: Treatment Value: Drought vs. No Drought
  misc_feature: MA Experiment ID: 108522 Result: Up-regulated in Transcription
  misc_feature: MA Experiment 108522 PARAMETER Experiment Name: Zm_42deg_Heat_P Parameter: Age (day) Value: 8
  misc_feature: MA Experiment 108522 PARAMETER Experiment Name: Zm_42deg_Heat_P Parameter: Organism Value: Zea mays
  misc_feature: MA Experiment 108522 PARAMETER Experiment Name: Zm_42deg_Heat_P Parameter: Plant Line Value: 35A19
  misc_feature: MA Experiment 108522 PARAMETER Experiment Name: Zm_42deg_Heat_P Parameter: Temperature (deg C) Value: 42 vs. 22
  misc_feature: MA Experiment 108522 PARAMETER Experiment Name: Zm_42deg_Heat_P Parameter: Timepoint (hr) Value: 1
  misc_feature: MA Experiment 108522 PARAMETER Experiment Name: Zm_42deg_Heat_P Parameter: Tissue Value: Aerial
  misc_feature: MA Experiment ID: 108523 Result: Up-regulated in Transcription
  misc_feature: MA Experiment 108523 PARAMETER Experiment Name: Zm_42deg_Heat_P Parameter: Age (day) Value: 8
  misc_feature: MA Experiment 108523 PARAMETER Experiment Name: Zm_42deg_Heat_P Parameter: Organism Value: Zea mays
  misc_feature: MA Experiment 108523 PARAMETER Experiment Name: Zm_42deg_Heat_P Parameter: Plant Line Value: 35A19
  misc_feature: MA Experiment 108523 PARAMETER Experiment Name: Zm_42deg_Heat_P Parameter: Temperature (deg C) Value: 42 vs. 22
  misc_feature: MA Experiment 108523 PARAMETER Experiment Name: Zm_42deg_Heat_P Parameter: Timepoint (hr) Value: 6
  misc_feature: MA Experiment 108523 PARAMETER Experiment Name: Zm_42deg_Heat_P Parameter: Tissue Value: Aerial
  misc_feature: MA Experiment ID: 108527 Result: Up-regulated in Transcription
  misc_feature: MA Experiment 108527 PARAMETER Experiment Name: Zm_5mM_NO_P Parameter: Age (day) Value: 8
  misc_feature: MA Experiment 108527 PARAMETER Experiment Name: Zm_5mM_NO_P Parameter: Organism Value: Zea mays
  misc_feature: MA Experiment 108527 PARAMETER Experiment Name: Zm_5mM_NO_P Parameter: Plant Line Value: 35A19
  misc_feature: MA Experiment 108527 PARAMETER Experiment Name: Zm_5mM_NO_P Parameter: Timepoint (hr) Value: 6
  misc_feature: MA Experiment 108527 PARAMETER Experiment Name: Zm_5mM_NO_P Parameter: Tissue Value: Aerial
  misc_feature: MA Experiment 108527 PARAMETER Experiment Name: Zm_5mM_NO_P Parameter: Treatment Value: 5mM NO vs. No Treatment
  misc_feature: MA Experiment ID: 108540 Result: Up-regulated in Transcription
  misc_feature: MA Experiment 108540 PARAMETER Experiment Name: Zm_20percent_PEG_P Parameter: Age (day) Value: 8
  misc_feature: MA Experiment 108540 PARAMETER Experiment Name: Zm_20percent_PEG_P Parameter: Organism Value: Zea mays
  misc_feature: MA Experiment 108540 PARAMETER Experiment Name: Zm_20percent_PEG_P Parameter: Plant Line Value: 35A19
  misc_feature: MA Experiment 108540 PARAMETER Experiment Name: Zm_20percent_PEG_P Parameter: Timepoint (hr) Value: 6
  misc_feature: MA Experiment 108540 PARAMETER Experiment Name: Zm_20percent_PEG_P Parameter: Tissue Value: Aerial
  misc_feature: MA Experiment 108540 PARAMETER Experiment Name: Zm_20percent_PEG_P Parameter: Treatment Value: 20percent PEG vs. No Treatment
  misc_feature: MA Experiment ID: 108556 Result: Up-regulated in Transcription
  misc_feature: MA Experiment 108556 PARAMETER Experiment Name: Zm_Drought_P Parameter: Age (day) Value: 9
  misc_feature: MA Experiment 108556 PARAMETER Experiment Name: Zm_Drought_P Parameter: Organism Value: Zea mays
  misc_feature: MA Experiment 108556 PARAMETER Experiment Name: Zm_Drought_P Parameter: Plant Line Value: 35A19
  misc_feature: MA Experiment 108556 PARAMETER Experiment Name: Zm_Drought_P Parameter: Timepoint (hr) Value: 24
  misc_feature: MA Experiment 108556 PARAMETER Experiment Name: Zm_Drought_P Parameter: Tissue Value: Aerial
  misc_feature: MA Experiment 108556 PARAMETER Experiment Name: Zm_Drought_P Parameter: Treatment Value: Drought vs. No Drought
  misc_feature: MA Experiment ID: 108559 Result: Up-regulated in Transcription
  misc_feature: MA Experiment 108559 PARAMETER Experiment Name: Zm_5mM_NO_P Parameter: Age (day) Value: 8
  misc_feature: MA Experiment 108559 PARAMETER Experiment Name: Zm_5mM_NO_P Parameter: Organism Value: Zea mays
  misc_feature: MA Experiment 108559 PARAMETER Experiment Name: Zm_5mM_NO_P Parameter: Plant Line Value: 35A19
  misc_feature: MA Experiment 108559 PARAMETER Experiment Name: Zm_5mM_NO_P Parameter: Timepoint (hr) Value: 12
  misc_feature: MA Experiment 108559 PARAMETER Experiment Name: Zm_5mM_NO_P Parameter: Tissue Value: Aerial
  misc_feature: MA Experiment 108559 PARAMETER Experiment Name: Zm_5mM_NO_P Parameter: Treatment Value: 5mM NO vs. No Treatment
  misc_feature: MA Experiment ID: 108689 Result: Up-regulated in Transcription
  misc_feature: MA Experiment 108689 PARAMETER Experiment Name: Zm_Drought_Roots_P Parameter: Age (day) Value: 9
  misc_feature: MA Experiment 108689 PARAMETER Experiment Name: Zm_Drought_Roots_P Parameter: Organism Value: Zea mays
  misc_feature: MA Experiment 108689 PARAMETER Experiment Name: Zm_Drought_Roots_P Parameter: Plant Line Value: 35A19
  misc_feature: MA Experiment 108689 PARAMETER Experiment Name: Zm_Drought_Roots_P Parameter: Timepoint (hr) Value: 24
  misc_feature: MA Experiment 108689 PARAMETER Experiment Name: Zm_Drought_Roots_P Parameter: Tissue Value: Roots
  misc_feature: MA Experiment 108689 PARAMETER Experiment Name: Zm_Drought_Roots_P Parameter: Treatment Value: Drought vs. No Drought
  misc_feature: MA Experiment ID: 20000477 Result: Up-regulated in Transcription
  misc_feature: MA Experiment 20000477 PARAMETER Experiment Name: Zm_5mM_SA_P Parameter: Age (day) Value: 10
  misc_feature: MA Experiment 20000477 PARAMETER Experiment Name: Zm_5mM_SA_P Parameter: Organism Value: Zea mays
  misc_feature: MA Experiment 20000477 PARAMETER Experiment Name: Zm_5mM_SA_P Parameter: Plant Line Value: 35A19
  misc_feature: MA Experiment 20000477 PARAMETER Experiment Name: Zm_5mM_SA_P Parameter: Timepoint (hr) Value: 48
  misc_feature: MA Experiment 20000477 PARAMETER Experiment Name: Zm_5mM_SA_P Parameter: Tissue Value: Aerial
  misc_feature: MA Experiment 20000477 PARAMETER Experiment Name: Zm_5mM_SA_P Parameter: Treatment Value: 5mM SA vs. No Treatment
  misc_feature: MA Experiment ID: 20000479 Result: Up-regulated in Transcription
  misc_feature: MA Experiment 20000479 PARAMETER Experiment Name: Zm_Drought_P Parameter: Age (day) Value: 10
  misc_feature: MA Experiment 20000479 PARAMETER Experiment Name: Zm_Drought_P Parameter: Organism Value: Zea mays
  misc_feature: MA Experiment 20000479 PARAMETER Experiment Name: Zm_Drought_P Parameter: Plant Line Value: 35A19
  misc_feature: MA Experiment 20000479 PARAMETER Experiment Name: Zm_Drought_P Parameter: Timepoint (hr) Value: 48
  misc_feature: MA Experiment 20000479 PARAMETER Experiment Name: Zm_Drought_P Parameter: Tissue Value: Aerial
  misc_feature: MA Experiment 20000479 PARAMETER Experiment Name: Zm_Drought_P Parameter: Treatment Value: Drought vs. No Drought
  misc_feature: MA Experiment ID: 20000480 Result: Up-regulated in Transcription
  misc_feature: MA Experiment 20000480 PARAMETER Experiment Name: Zm_Drought_P Parameter: Age (day) Value: 11
  misc_feature: MA Experiment 20000480 PARAMETER Experiment Name: Zm_Drought_P Parameter: Organism Value: Zea mays
  misc_feature: MA Experiment 20000480 PARAMETER Experiment Name: Zm_Drought_P Parameter: Plant Line Value: 35A19
  misc_feature: MA Experiment 20000480 PARAMETER Experiment Name: Zm_Drought_P Parameter: Timepoint (hr) Value: 72
  misc_feature: MA Experiment 20000480 PARAMETER Experiment Name: Zm_Drought_P Parameter: Tissue Value: Aerial
  misc_feature: MA Experiment 20000480 PARAMETER Experiment Name: Zm_Drought_P Parameter: Treatment Value: Drought vs. No Drought
  misc_feature: MA Experiment ID: 20001608 Result: Down-regulated in Transcription
  misc_feature: MA Experiment 20001608 PARAMETER Experiment Name: Zm_50ppm_KNO3_L-to-H_P Parameter: Age (day) Value: 21
  misc_feature: MA Experiment 20001608 PARAMETER Experiment Name: Zm_50ppm_KNO3_L-to-H_P Parameter: Organism Value: Zea mays
  misc_feature: MA Experiment 20001608 PARAMETER Experiment Name: Zm_50ppm_KNO3_L-to-H_P Parameter: Plant Line Value: 35A19
  misc_feature: MA Experiment 20001608 PARAMETER Experiment Name: Zm_50ppm_KNO3_L-to-H_P Parameter: Timepoint (hr) Value: 48
  misc_feature: MA Experiment 20001608 PARAMETER Experiment Name: Zm_50ppm_KNO3_L-to-H_P Parameter: Tissue Value: Shoots
  misc_feature: MA Experiment 20001608 PARAMETER Experiment Name: Zm_50ppm_KNO3_L-to-H_P Parameter: Treatment Value: 50ppm KNO3 vs. 50ppm KCl

SEQ ID NO: 18233 - protein, 423 aa, Zea mays subsp. mays; identical to SEQ ID NO: 13726
  peptide (1)..(423): Ceres Seq. ID no. 12455052

SEQ ID NO: 18234 - protein, 417 aa, Zea mays subsp. mays; identical to SEQ ID NO: 13727
  peptide (1)..(417): Ceres Seq. ID no. 12455053

SEQ ID NO: 18235 - protein, 401 aa, Zea mays subsp. mays; identical to SEQ ID NO: 13728
  peptide (1)..(401): Ceres Seq. ID no. 12455054
  misc_feature (2)..(380): Homolog of NCBI NO: 15223169 NR Description: putative protein kinase; protein id: At1g70520.1
  misc_feature (5)..(393): Homolog of NCBI NO: 10178148 NR Description: receptor-like serine/threonine kinase
  misc_feature (58)..(393): Homolog of NCBI NO: 15242677 NR Description: receptor-like protein kinase; protein id:
  misc_feature (8)..(401): Homolog of NCBI NO: 34913832 NR Description: putative protein kinase [Oryza sativa (japonica group)] >gi|20161899|dbj|BAB90811.1| putative protein kinase
  misc_feature (49)..(365): Homolog of NCBI NO: 15223170 NR Description: putative protein kinase; protein id: At1g70530.1
  misc_feature (53)..(365): Homolog of NCBI NO: 2465925 NR Description: receptor-like serine/threonine kinase
  misc_feature (53)..(365): Homolog of NCBI NO: 8778283 NR Description: F14D16.24 [Arabidopsis thaliana]
  misc_feature (1)..(375): Homolog of NCBI NO: 34393282 NR Description: putative serine/threonine kinase receptor
  misc_feature (5)..(401): Homolog of NCBI NO: 15233389 NR Description: serine/threonine kinase-like protein; protein id:
  misc_feature (5)..(397): Homolog of NCBI NO: 38345599 NR Description: OSJNBa0093O08.1 [Oryza sativa (japonica

SEQ ID NO: 18236 - DNA, 2211 bp, Zea mays subsp. mays; identical to SEQ ID NO: 13777
  misc_feature (1)..(2211): Ceres Seq. ID no. 12550712
  misc_feature: MA Experiment ID: 108535 Result: Up-regulated in Transcription
  misc_feature: MA Experiment 108535 PARAMETER Experiment Name: Zm_Meristem_P Parameter: Age (day) Value: 8
  misc_feature: MA Experiment 108535 PARAMETER Experiment Name: Zm_Meristem_P Parameter: Organism Value: Zea mays
  misc_feature: MA Experiment 108535 PARAMETER Experiment Name: Zm_Meristem_P Parameter: Plant Line Value: 35A19
  misc_feature: MA Experiment 108535 PARAMETER Experiment Name: Zm_Meristem_P Parameter: Tissue Value: Root Meristem vs. Above Root Meristem
  misc_feature: MA Experiment ID: 108544 Result: Down-regulated in Transcription
  misc_feature: MA Experiment ID: 20000487 Result: Up-regulated in Transcription
  misc_feature: MA Experiment 20000487 PARAMETER Experiment Name: Zm_50mM_NH4NO3_L_to_H_P Parameter: Organism Value: Zea mays
  misc_feature: MA Experiment 20000487 PARAMETER Experiment Name: Zm_50mM_NH4NO3_L_to_H_P Parameter: Timepoint (hr) Value: 4
  misc_feature: MA Experiment 20000487 PARAMETER Experiment Name: Zm_50mM_NH4NO3_L_to_H_P Parameter: Tissue Value: Leaves
  misc_feature: MA Experiment 20000487 PARAMETER Experiment Name: Zm_50mM_NH4NO3_L_to_H_P Parameter: Treatment Value: 50mM NH4NO3 vs. 100mM Mannitol
  misc_feature: MA Experiment ID: 20000535 Result: Up-regulated in Transcription
  misc_feature: MA Experiment 20000535 PARAMETER Experiment Name: Zm_Hybrid_Seed_Dev_P Parameter: DAP Value: 30 vs. 12
  misc_feature: MA Experiment 20000535 PARAMETER Experiment Name: Zm_Hybrid_Seed_Dev_P Parameter: Organism Value: Zea mays
  misc_feature: MA Experiment 20000535 PARAMETER Experiment Name: Zm_Hybrid_Seed_Dev_P Parameter: Plant Line Value: 35A19
  misc_feature: MA Experiment 20000535 PARAMETER Experiment Name: Zm_Hybrid_Seed_Dev_P Parameter: Tissue Value: Embryo vs. Unfert Floret

SEQ ID NO: 18237 - protein, 544 aa, Zea mays subsp. mays; identical to SEQ ID NO: 13778
  peptide (1)..(544): Ceres Seq. ID no. 12550713
  misc_feature (33)..(173): Pfam Name: TCP-1/cpn60 chaperonin family Pfam Description: TCP-1/cpn60 chaperonin family
  misc_feature (3)..(542): Homolog of NCBI NO: 15240317 NR Description: chaperonin gamma chain - like protein; protein At5g26360.1 [Arabidopsis thaliana] >gi|27754225|gb|AAO22566.1|
  misc_feature (152)..(542): Homolog of NCBI NO: 7441904 NR Description: probable chaperonin-containing TCP-1 complex
  misc_feature (31)..(173): Homolog of NCBI NO: 7441904 NR Description: probable chaperonin-containing TCP-1 complex
  misc_feature (3)..(538): Homolog of NCBI NO: 28881229 NR Description: probable chaperonin of the TCP1 ring complex
  misc_feature (4)..(539): Homolog of NCBI NO: 631730 NR Description: matricin - mouse >gi|347839|gb|AAA19749.1|
  misc_feature (4)..(531): Homolog of NCBI NO: 40018616 NR Description: chaperonin containing TCP1, subunit 3 (gamma) norvegicus] >gi|38969850|gb|AAH63178.1| Chaperonin containing
  misc_feature (3)..(543): Homolog of NCBI NO: 17066724 NR Description: CCT chaperonin gamma subunit [Physarum
  misc_feature (4)..(531): Homolog of NCBI NO: 6753320 NR Description: chaperonin subunit 3 (gamma) [Mus musculus]
  misc_feature (6)..(543): Homolog of NCBI NO: 1079280 NR Description: chaperonin containing TCP-1 complex gamma chain -
  misc_feature (6)..(543): Homolog of NCBI NO: 39850250 NR Description: Unknown (protein for MGC:76259) [Silurana
  misc_feature (295)..(295): Xaa is any aa, unknown or other

SEQ ID NO: 18238 - protein, 499 aa, Zea mays subsp. mays; identical to SEQ ID NO: 13779
  peptide (1)..(499): Ceres Seq. ID no. 12550714
  misc_feature (1)..(128): Pfam Name: TCP-1/cpn60 chaperonin family Pfam Description: TCP-1/cpn60 chaperonin family
  misc_feature (1)..(497): Homolog of NCBI NO: 15240317 NR Description: chaperonin gamma chain - like protein; protein At5g26360.1 [Arabidopsis thaliana] >gi|27754225|gb|AAO22566.1|
  misc_feature (107)..(497): Homolog of NCBI NO: 7441904 NR Description: probable chaperonin-containing TCP-1 complex
  misc_feature (1)..(128): Homolog of NCBI NO: 7441904 NR Description: probable chaperonin-containing TCP-1 complex
  misc_feature (1)..(493): Homolog of NCBI NO: 28881229 NR Description: probable chaperonin of the TCP1 ring complex
  misc_feature (1)..(494): Homolog of NCBI NO: 631730 NR Description: matricin - mouse >gi|347839|gb|AAA19749.1|
  misc_feature (1)..(486): Homolog of NCBI NO: 40018616 NR Description: chaperonin containing TCP1, subunit 3 (gamma) norvegicus] >gi|38969850|gb|AAH63178.1| Chaperonin containing
  misc_feature (1)..(498): Homolog of NCBI NO: 17066724 NR Description: CCT chaperonin gamma subunit [Physarum
  misc_feature (1)..(486): Homolog of NCBI NO: 6753320 NR Description: chaperonin subunit 3 (gamma) [Mus musculus]
  misc_feature (1)..(498): Homolog of NCBI NO: 1079280 NR Description: chaperonin containing TCP-1 complex gamma chain -
  misc_feature (1)..(498): Homolog of NCBI NO: 39850250 NR Description: Unknown (protein for MGC:76259) [Silurana
  misc_feature (250)..(250): Xaa is any aa, unknown or other

SEQ ID NO: 18239 - protein, 496 aa, Zea mays subsp. mays; identical to SEQ ID NO: 13780
  peptide (1)..(496): Ceres Seq. ID no. 12550715
  misc_feature (1)..(125): Pfam Name: TCP-1/cpn60 chaperonin family Pfam Description: TCP-1/cpn60 chaperonin family
  misc_feature (1)..(494): Homolog of NCBI NO: 15240317 NR Description: chaperonin gamma chain - like protein; protein At5g26360.1 [Arabidopsis thaliana] >gi|27754225|gb|AAO22566.1|
  misc_feature (104)..(494): Homolog of NCBI NO: 7441904 NR Description: probable chaperonin-containing TCP-1 complex
  misc_feature (1)..(125): Homolog of NCBI NO: 7441904 NR Description: probable chaperonin-containing TCP-1 complex
  misc_feature (1)..(490): Homolog of NCBI NO: 28881229 NR Description: probable chaperonin of the TCP1 ring complex
  misc_feature (1)..(491): Homolog of NCBI NO: 631730 NR Description: matricin - mouse >gi|347839|gb|AAA19749.1|
  misc_feature (1)..(483): Homolog of NCBI NO: 40018616 NR Description: chaperonin containing TCP1, subunit 3 (gamma) norvegicus] >gi|38969850|gb|AAH63178.1| Chaperonin containing
  misc_feature (1)..(495): Homolog of NCBI NO: 17066724 NR Description: CCT chaperonin gamma subunit [Physarum
  misc_feature (1)..(483): Homolog of NCBI NO: 6753320 NR Description: chaperonin subunit 3 (gamma) [Mus musculus]
  misc_feature (1)..(495): Homolog of NCBI NO: 1079280 NR Description: chaperonin containing TCP-1 complex gamma chain -
  misc_feature (1)..(495): Homolog of NCBI NO: 39850250 NR Description: Unknown (protein for MGC:76259) [Silurana
  misc_feature (247)..(247): Xaa is any aa, unknown or other

SEQ ID NO: 18240 - DNA, 2889 bp, Zea mays subsp. mays
  misc_feature (1)..(2889): Ceres Seq. ID no. 12435287
  misc_feature: MA Experiment ID: 108534 Result: Up-regulated in Transcription
  misc_feature: MA Experiment 108534 PARAMETER Experiment Name: Zm_4deg_Cold_P Parameter: Age (hr) Value: 8
  misc_feature: MA Experiment 108534 PARAMETER Experiment Name: Zm_4deg_Cold_P Parameter: Organism Value: Zea mays
  misc_feature: MA Experiment 108534 PARAMETER Experiment Name: Zm_4deg_Cold_P Parameter: Plant Line Value: 35A19
  misc_feature: MA Experiment 108534 PARAMETER Experiment Name: Zm_4deg_Cold_P Parameter: Temperature (deg C) Value: 4 vs. 22
  misc_feature: MA Experiment 108534 PARAMETER Experiment Name: Zm_4deg_Cold_P Parameter: Timepoint (hr) Value: 6
  misc_feature: MA Experiment 108534 PARAMETER Experiment Name: Zm_4deg_Cold_P Parameter: Tissue Value: Aerial
  misc_feature: MA Experiment ID: 108535 Result: Down-regulated in Transcription
  misc_feature: MA Experiment 108535 PARAMETER Experiment Name: Zm_Meristem_P Parameter: Age (day) Value: 8
  misc_feature: MA Experiment 108535 PARAMETER Experiment Name: Zm_Meristem_P Parameter: Organism Value: Zea mays
  misc_feature: MA Experiment 108535 PARAMETER Experiment Name: Zm_Meristem_P Parameter: Plant Line Value: 35A19
  misc_feature: MA Experiment 108535 PARAMETER Experiment Name: Zm_Meristem_P Parameter: Tissue Value: Root Meristem vs. Above Root Meristem
gcacgagaccattacctagaacatcctaatcgaaaagcgattaatcaactccgccacgaccaacacgtacgtaaccagcggcggttcggcagcatgcggcgacgacggtgtccgctcctcgccgccgtcctcttcctcctccccctcttccaccgccaccacgccgccagcggcaccgacacggacacggtcacgctggccgcgccgctcatggggaaccggacgctggtgtccgccggcagcgccaagtacgtgctgggcttcttcgcgccggacccggacgccacgggatcaggacgggcgtacctcgggatatggttcaacggcatccccgcgcggaccgtcgtgtgggtggccaaccgcgagagccccgtcctgggcagcgtgggcgccgccgcgctcagggtcctcgccaacgggagcctggccatcgtcgtcgtggacgagaccgactacgaccacgaccagcagcccgtggtctgggcgacgccgccgccggccacgtccagcggcagcaacgccaccgcgcagctcctggacaacggcaacctcgtgctgcgggtcccgggcgccggcgtggtgtggcagagcttcgaccaccccacggacacgctcctgccgggcatgaagctgggcatcgacttccgcacggggctggaccggcgcatggtctcgtggcgcgccgcgggggacccgtcaccgggggagtactcgttccgcctggacccgagcggctcgccggagctcttcctctaccgcgggtccgcgcgcgtctacggcagcgggccctggaacggctaccagttcacgggcgtgcccaacctcaagtccaacagcctcctcaccttccgcttcgtctccgccgcggacgaggcctactacagctacggcgtggtcgacagcgccgccgtgctcacgcgcttcgtcctagactcgtcggggcagatccagcgcctcatgtggattgacatgacccgctcctggagcctcttctggtcctacccgctcgacgagtgcgacggctaccgcgcctgcgggccctacggcgtgtgcagcgtcgagcgcagccccatctgcggctgcgcgccgggcttcgacccgcgcttccccaaggagtgggcgctcagggacggctccggcgggtgcaggcgccgcacggacctcgcctgcgccggcgacggcttngccgcgctcaccaacatgaagctgccggagtcggccaacgccaccgtcgacatgtccctcaccctcgaccagtgccgagaggcctgcctcaggaactgcgcgtgccgggcctacgccggcgccaatgtcagcgcgccgggggccaccggctgcttcctgtggaccggcgacctcctcgacatgaggcagttcggcaaaggcgggcagaatctcttcgtccggctcgcggcgtccgacctacctctcagcagctcttcgccagcagacacggacgggcgaaccaagaggctcgtcgagatcatcgtcccgtcggttgccgcaccggcgctgctgctgctggccggactctgcatctgcgccgtgaggacgagaaggcgtaggacgaaggagaaggaggccatccccctggcgctgctgagagacgcgcagaggcagagcgcaccgttcggccgaaggaaccagattgccgcgtccaccgacgcgcaggacgagtccctgcacgacggccagcagggcggcagccaggactgcgacctgccgtcgttcgacgtcgagacgatccaggccgccacgggcaacttctcggctcacagcaagatcggccagggcgggttcgggcccgtctacatggggaagctggacagcgggcaggacatcgccgtgaaaaggctgtcgcggcggtccacgcaggggctccgggagttcaagaacgaggtgaagctgatagccaagctgcagcacaggaacctcgtcaggctcctcggctgctgcatcgacgggtcggagaggatgctggtctacgagtacatgcacaaccggagcctcaacaccttcctcttcaatgaggagaagcagccgatgctgagctgggagaaacggttcagcatcatcaacggcatcgcgaggggcatactgtacctgcaccaggattcggcgctgaggatcatccacagggacctcaaggccagcaacattctgctcgacaaggacatgaaccccaagatctccgacttcggtgtcgccaggatattcgggaccgaccagacggccgcgtacaccaagaaagtagtcggaacatatgggtatatgtctcctgagtacgccatggacggagtcttctccaccaagtccgacgtgttcagcttcggcgttctggtgctcgagatcgtcagcgggaagaagaacagagggttctaccacaccgagcttgacctcaacctcctaagatatgcgtggaggctgtggaaggacggcgagagcctggagttcatggaccagtccatcgcggacacgtccaacgcggcggaggtgctcaagtgcatccagatcgggctgctgtgcgtgcaggagcagccgaagcgccggcccaccatgtcggcggtgaccacgatgctcacctgcgagaaccccacgctgccggagccatgcgagccggcgttcagcacggggaggaaccacgacgacgacgacgaggacccggaggcgaaggcctgccggtctaacagcgccagcagctggacttgcaccgtcgtcgagggtagatgagatagattactgactgtttctgctgcgatgtgtactgtaaatatcaaagcatttttaacttcaacagcagtgagattaattcaattgaatttacctaaacattgaacagcagtgggcctcgtcaatgatggtccagataattcatattgcttttttcgc

SEQ ID NO: 18241 - protein, 909 aa, Zea mays subsp. mays
  peptide (1)..(909): Ceres Seq. ID no. 12435288
  misc_feature (484)..(909): Homolog of NCBI NO: 2181188 NR Description: serine /threonine kinase [Brassica oleracea]
  misc_feature (484)..(909): Homolog of NCBI NO: 913141 NR Description: ARK3 product/receptor-like serine/threonine
  misc_feature (45)..(523): Homolog of NCBI NO: 913141 NR Description: ARK3 product/receptor-like serine/threonine
  misc_feature (37)..(540): Homolog of NCBI NO: 2181188 NR Description: serine /threonine kinase [Brassica oleracea]
  misc_feature (484)..(909): Homolog of NCBI NO: 7434413 NR Description: receptor-like kinase (EC 2.7.1.-) SFR2 - wild
  misc_feature (39)..(540): Homolog of NCBI NO: 7434413 NR Description: receptor-like kinase (EC 2.7.1.-) SFR2 - wild
  misc_feature (484)..(909): Homolog of NCBI NO: 15234427 NR Description: receptor-like serine/threonine protein kinase ARK3
  misc_feature (45)..(523): Homolog of NCBI NO: 15234427 NR Description: receptor-like serine/threonine protein kinase ARK3
  misc_feature (484)..(909): Homolog of NCBI NO: 16040952 NR Description: receptor kinase 5 [Brassica rapa]
  misc_feature (39)..(561): Homolog of NCBI NO: 16040952 NR Description: receptor kinase 5 [Brassica rapa]
  misc_feature (395)..(395): Xaa is any aa, unknown or other
ARDHYLEHPNRKAINQLRHDQHVRNQRRFGSMRRRRCPLLAAVLFLLPLFHRHHAASGTDTDTVTLAAPLMGNRTLVSAGSAKYVLGFFAPDPDATGSGRAYLGIWFNGIPARTVVWVANRESPVLGSVGAAALRVLANGSLAIVVVDETDYDHDQQPVVWATPPPATSSGSNATAQLLDNGNLVLRVPGAGVVWQSFDHPTDTLLPGMKLGIDFRTGLDRRMVSWRAAGDPSPGEYSFRLDPSGSPELFLYRGSARVYGSGPWNGYQFTGVPNLKSNSLLTFRFVSAADEAYYSYGVVDSAAVLTRFVLDSSGQIQRLMWIDMTRSWSLFWSYPLDECDGYRACGPYGVCSVERSPICGCAPGFDPRFPKEWALRDGSGGCRRRTDLACAGDGXAALTNMKLPESANATVDMSLTLDQCREACLRNCACRAYAGANVSAPGATGCFLWTGDLLDMRQFGKGGQNLFVRLAASDLPLSSSSPADTDGRTKRLVEIIVPSVAAPALLLLAGLCICAVRTRRRRTKEKEAIPLALLRDAQRQSAPFGRRNQIAASTDAQDESLHDGQQGGSQDCDLPSFDVETIQAATGNFSAHSKIGQGGFGPVYMGKLDSGQDIAVKRLSRRSTQGLREFKNEVKLIAKLQHRNLVRLLGCCIDGSERMLVYEYMHNRSLNTFLFNEEKQPMLSWEKRFSIINGIARGILYLHQDSALRIIHRDLKASNILLDKDMNPKISDFGVARIFGTDQTAAYTKKVVGTYGYMSPEYAMDGVFSTKSDVFSFGVLVLEIVSGKKNRGFYHTELDLNLLRYAWRLWKDGESLEFMDQSIADTSNAAEVLKCIQIGLLCVQEQPKRRPTMSAVTTMLTCENPTLPEPCEPAFSTGRNHDDDDEDPEAKACRSNSASSWTCTVVEGR

SEQ ID NO: 18242 - protein, 878 aa, Zea mays subsp. mays
  peptide (1)..(878): Ceres Seq. ID no. 12435289
  misc_feature (453)..(878): Homolog of NCBI NO: 2181188 NR Description: serine /threonine kinase [Brassica oleracea]
  misc_feature (453)..(878): Homolog of NCBI NO: 913141 NR Description: ARK3 product/receptor-like serine/threonine
  misc_feature (14)..(492): Homolog of NCBI NO: 913141 NR Description: ARK3 product/receptor-like serine/threonine
  misc_feature (6)..(509): Homolog of NCBI NO: 2181188 NR Description: serine /threonine kinase [Brassica oleracea]
  misc_feature (453)..(878): Homolog of NCBI NO: 7434413 NR Description: receptor-like kinase (EC 2.7.1.-) SFR2 - wild
  misc_feature (8)..(509): Homolog of NCBI NO: 7434413 NR Description: receptor-like kinase (EC 2.7.1.-) SFR2 - wild
  misc_feature (453)..(878): Homolog of NCBI NO: 15234427 NR Description: receptor-like serine/threonine protein kinase ARK3
  misc_feature (14)..(492): Homolog of NCBI NO: 15234427 NR Description: receptor-like serine/threonine protein kinase ARK3
  misc_feature (453)..(878): Homolog of NCBI NO: 16040952 NR Description: receptor kinase 5 [Brassica rapa]
  misc_feature (8)..(530): Homolog of NCBI NO: 16040952 NR Description: receptor kinase 5 [Brassica rapa]
  misc_feature (364)..(364): Xaa is any aa, unknown or other
MRRRRCPLLAAVLFLLPLFHRHHAASGTDTDTVTLAAPLMGNRTLVSAGSAKYVLGFFAPDPDATGSGRAYLGIWFNGIPARTVVWVANRESPVLGSVGAAALRVLANGSLAIVVVDETDYDHDQQPVVWATPPPATSSGSNATAQLLDNGNLVLRVPGAGVVWQSFDHPTDTLLPGMKLGIDFRTGLDRRMVSWRAAGDPSPGEYSFRLDPSGSPELFLYRGSARVYGSGPWNGYQFTGVPNLKSNSLLTFRFVSAADEAYYSYGVVDSAAVLTRFVLDSSGQIQRLMWIDMTRSWSLFWSYPLDECDGYRACGPYGVCSVERSPICGCAPGFDPRFPKEWALRDGSGGCRRRTDLACAGDGXAALTNMKLPESANATVDMSLTLDQCREACLRNCACRAYAGANVSAPGATGCFLWTGDLLDMRQFGKGGQNLFVRLAASDLPLSSSSPADTDGRTKRLVEIIVPSVAAPALLLLAGLCICAVRTRRRRTKEKEAIPLALLRDAQRQSAPFGRRNQIAASTDAQDESLHDGQQGGSQDCDLPSFDVETIQAATGNFSAHSKIGQGGFGPVYMGKLDSGQDIAVKRLSRRSTQGLREFKNEVKLIAKLQHRNLVRLLGCCIDGSERMLVYEYMHNRSLNTFLFNEEKQPMLSWEKRFSIINGIARGILYLHQDSALRIIHRDLKASNILLDKDMNPKISDFGVARIFGTDQTAAYTKKVVGTYGYMSPEYAMDGVFSTKSDVFSFGVLVLEIVSGKKNRGFYHTELDLNLLRYAWRLWKDGESLEFMDQSIADTSNAAEVLKCIQIGLLCVQEQPKRRPTMSAVTTMLTCENPTLPEPCEPAFSTGRNHDDDDEDPEAKACRSNSASSWTCTVVEGR

SEQ ID NO: 18243 - protein, 839 aa, Zea mays subsp. mays
  peptide (1)..(839): Ceres Seq. ID no. 12435290
  misc_feature (414)..(839): Homolog of NCBI NO: 2181188 NR Description: serine /threonine kinase [Brassica oleracea]
  misc_feature (414)..(839): Homolog of NCBI NO: 913141 NR Description: ARK3 product/receptor-like serine/threonine
  misc_feature (1)..(453): Homolog of NCBI NO: 913141 NR Description: ARK3 product/receptor-like serine/threonine
  misc_feature (1)..(470): Homolog of NCBI NO: 2181188 NR Description: serine /threonine kinase [Brassica oleracea]
  misc_feature (414)..(839): Homolog of NCBI NO: 7434413 NR Description: receptor-like kinase (EC 2.7.1.-) SFR2 - wild
  misc_feature (1)..(470): Homolog of NCBI NO: 7434413 NR Description: receptor-like kinase (EC 2.7.1.-) SFR2 - wild
  misc_feature (414)..(839): Homolog of NCBI NO: 15234427 NR Description: receptor-like serine/threonine protein kinase ARK3
  misc_feature (1)..(453): Homolog of NCBI NO: 15234427 NR Description: receptor-like serine/threonine protein kinase ARK3
  misc_feature (414)..(839): Homolog of NCBI NO: 16040952 NR Description: receptor kinase 5 [Brassica rapa]
  misc_feature (1)..(491): Homolog of NCBI NO: 16040952 NR Description: receptor kinase 5 [Brassica rapa]
  misc_feature (325)..(325): Xaa is any aa, unknown or other
MGNRTLVSAGSAKYVLGFFAPDPDATGSGRAYLGIWFNGIPARTVVWVANRESPVLGSVGAAALRVLANGSLAIVVVDETDYDHDQQPVVWATPPPATSSGSNATAQLLDNGNLVLRVPGAGVVWQSFDHPTDTLLPGMKLGIDFRTGLDRRMVSWRAAGDPSPGEYSFRLDPSGSPELFLYRGSARVYGSGPWNGYQFTGVPNLKSNSLLTFRFVSAADEAYYSYGVVDSAAVLTRFVLDSSGQIQRLMWIDMTRSWSLFWSYPLDECDGYRACGPYGVCSVERSPICGCAPGFDPRFPKEWALRDGSGGCRRRTDLACAGDGXAALTNMKLPESANATVDMSLTLDQCREACLRNCACRAYAGANVSAPGATGCFLWTGDLLDMRQFGKGGQNLFVRLAASDLPLSSSSPADTDGRTKRLVEIIVPSVAAPALLLLAGLCICAVRTRRRRTKEKEAIPLALLRDAQRQSAPFGRRNQIAASTDAQDESLHDGQQGGSQDCDLPSFDVETIQAATGNFSAHSKIGQGGFGPVYMGKLDSGQDIAVKRLSRRSTQGLREFKNEVKLIAKLQHRNLVRLLGCCIDGSERMLVYEYMHNRSLNTFLFNEEKQPMLSWEKRFSIINGIARGILYLHQDSALRIIHRDLKASNILLDKDMNPKISDFGVARIFGTDQTAAYTKKVVGTYGYMSPEYAMDGVFSTKSDVFSFGVLVLEIVSGKKNRGFYHTELDLNLLRYAWRLWKDGESLEFMDQSIADTSNAAEVLKCIQIGLLCVQEQPKRRPTMSAVTTMLTCENPTLPEPCEPAFSTGRNHDDDDEDPEAKACRSNSASSWTCTVVEGR

SEQ ID NO: 18244 - DNA, 2442 bp, Zea mays subsp. mays
  misc_feature (1)..(2442): Ceres Seq. ID no. 13589290
  misc_feature: MA Experiment ID: 108522 Result: Up-regulated in Transcription
  misc_feature: MA Experiment 108522 PARAMETER Experiment Name: Zm_42deg_Heat_P Parameter: Age (day) Value: 8
  misc_feature: MA Experiment 108522 PARAMETER Experiment Name: Zm_42deg_Heat_P Parameter: Organism Value: Zea mays
  misc_feature: MA Experiment 108522 PARAMETER Experiment Name: Zm_42deg_Heat_P Parameter: Plant Line Value: 35A19
  misc_feature: MA Experiment 108522 PARAMETER Experiment Name: Zm_42deg_Heat_P Parameter: Temperature (deg C) Value: 42 vs. 22
  misc_feature: MA Experiment 108522 PARAMETER Experiment Name: Zm_42deg_Heat_P Parameter: Timepoint (hr) Value: 1
  misc_feature: MA Experiment 108522 PARAMETER Experiment Name: Zm_42deg_Heat_P Parameter: Tissue Value: Aerial
  misc_feature: MA Experiment ID: 108523 Result: Up-regulated in Transcription
  misc_feature: MA Experiment 108523 PARAMETER Experiment Name: Zm_42deg_Heat_P Parameter: Age (day) Value: 8
  misc_feature: MA Experiment 108523 PARAMETER Experiment Name: Zm_42deg_Heat_P Parameter: Organism Value: Zea mays
  misc_feature: MA Experiment 108523 PARAMETER Experiment Name: Zm_42deg_Heat_P Parameter: Plant Line Value: 35A19
  misc_feature: MA Experiment 108523 PARAMETER Experiment Name: Zm_42deg_Heat_P Parameter: Temperature (deg C) Value: 42 vs. 22
  misc_feature: MA Experiment 108523 PARAMETER Experiment Name: Zm_42deg_Heat_P Parameter: Timepoint (hr) Value: 6
  misc_feature: MA Experiment 108523 PARAMETER Experiment Name: Zm_42deg_Heat_P Parameter: Tissue Value: Aerial
  misc_feature: MA Experiment ID: 108535 Result: Up-regulated in Transcription
  misc_feature: MA Experiment 108535 PARAMETER Experiment Name: Zm_Meristem_P Parameter: Age (day) Value: 8
  misc_feature: MA Experiment 108535 PARAMETER Experiment Name: Zm_Meristem_P Parameter: Organism Value: Zea mays
  misc_feature: MA Experiment 108535 PARAMETER Experiment Name: Zm_Meristem_P Parameter: Plant Line Value: 35A19
  misc_feature: MA Experiment 108535 PARAMETER Experiment Name: Zm_Meristem_P Parameter: Tissue Value: Root Meristem vs. Above Root Meristem
  misc_feature: MA Experiment ID: 20000488 Result: Up-regulated in Transcription
  misc_feature: MA Experiment 20000488 PARAMETER Experiment Name: Zm_50mM_NH4NO3_L_to_H_P Parameter: Organism Value: Zea mays
  misc_feature: MA Experiment 20000488 PARAMETER Experiment Name: Zm_50mM_NH4NO3_L_to_H_P Parameter: Timepoint (hr) Value: 8
  misc_feature: MA Experiment 20000488 PARAMETER Experiment Name: Zm_50mM_NH4NO3_L_to_H_P Parameter: Tissue Value: Leaves
  misc_feature: MA Experiment 20000488 PARAMETER Experiment Name: Zm_50mM_NH4NO3_L_to_H_P Parameter: Treatment Value: 50mM NH4NO3 vs. 100mM Mannitol
  misc_feature: MA Experiment ID: 20000492 Result: Up-regulated in Transcription
  misc_feature: MA Experiment 20000492 PARAMETER Experiment Name: Zm_Hybrid_Seed_Dev_P Parameter: DAP Value: 12
  misc_feature: MA Experiment 20000492 PARAMETER Experiment Name: Zm_Hybrid_Seed_Dev_P Parameter: Organism Value: Zea mays
  misc_feature: MA Experiment 20000492 PARAMETER Experiment Name: Zm_Hybrid_Seed_Dev_P Parameter: Plant Line Value: 35A19
  misc_feature: MA Experiment 20000492 PARAMETER Experiment Name: Zm_Hybrid_Seed_Dev_P Parameter: Tissue Value: Fert Kernel vs. Unfert Floret
actttcgcaagcccccttccgaccttgcccctgcggtctcccgagtcccgaagcatccccttccaaaaccctcgccgcgccgcagccacccttgcttccgcacgctatcgcccgggaccagccatctatggcggcgtccctgctcctccgcgccgtgcgccgaagggagcttgcgtcccctctcggatccctgggtgccagcatacagtcaacatgtgttgccaacatatgctcaaaatggggaaggtttgcaagacctttcagtgcaaaagctgctggaaatgaggttattgggattgatttggggacaacgaactcatgtgtttctgttatggagggaaagaacccaaaagttattgagaatgctgaaggtgcgagaacaacaccatctgttgtcgcatttactcagaagggtgaaagacttgttggaactccagccaagcgccaggcagtaaccaacccccagaatactttctttggaacaaagaggttaattgggcgacgctttgatgatccacagacacagaaagagatgaagatggtgccatacacaatcgtgaaggctccaaatggtgatgcttgggttcaaacaacagatggcaagcagtactcaccaagtcaggtcggtgcatttgtgctgaccaagatgaaggagacagctgaatcttaccttggcaagtctatctcaaaggcagtgattactgttccagcttatttcaatgacgctcagcgtcaggccacaaaggatgcaggccgcattgctggccttgatgttgaaaggatcatcaatgaacctacagcagccgctctgtcttatggaatgaacaacaaggaaggcttgatagcggtatttgatcttggaggaggaacttttgatatctctattctggagatctcaaatggagtttttgaggtcaaagcaacaaatggtgatactttcttgggtggtgaagattttgataatacactattggagttcttggtgagtgatttcaagaaaactgagggcatagatctgtcgaaagatagattggccctgcaaaggcttcgtgaagctgctgagaaggcaaaggttgaactttcgtcgacttctcagacagaaatcaatctgccattcataacagctgatgcttcaggggcaaaacatttgaacatcacactgacaaggtcaaaatttgaatctcttgtacacgatctgattgagagaactagagatccatgcaagaactgtttgaaggatgccggaatatctactaaagaggtggatgaagtacttcttgttggtggaatgactagggttccaaaggtgcaggaggtagtctctgaaatctttgggaagaacccaagcaaaggagtcaatccagatgaagctgtggccatgggtgctgcacttcagggtggcattctccgtggagatgttaaggagcttcttcttcttgatgttactcccctgtcactaggtattgagacgctcggtggtatcttcaccagattgatcaacagaaacactacaatccccacaaagaaaagtcaggtgttctcaactgctgctgacaaccagacccaagtgggtatccgggtgttgcaaggtgagcgtgaaatggctacagacaacaagctccttggtgaatttgacctcgtgggcattccacctgccccaagaggcttgcctcagattgaggttacattcgacatcgatgccaatggaattgtgaccgtctcagccaaagataaggctaccgggaaggagcagaacatcaccatacgatcctcgggtgggctgtcagaggctgacatccagaagatggtgcaagaagctgagctgcatgcccagaaggaccaggagcggaaagccctcattgacatcaggaacaatgccgacaccactatctacagcatcgagaagagtcttggagagtacagggacaagatcccggcagaggttgcatctgagatcgaggcagccatcgctgacctccgccaggagatggcctcggatgacattgagaagatcaaggccaagcttgaggctgccaacaaggctgtctcgaagattggacagcacatgtctggtggtggctctggcggctcgcagtcaggatctggacctcagggtggcggcgaccaggcgccggaggcagagtatgaggaggttaagaagtgaggctgcgggagttcaagggaattgtagcggcttgtttagaagtagctcgtttttttttttgggaacgcagatagtcagatgtctcagatgaggtgtaacctgtgttgcaataatctatgaacttacccctcttgttttctcctgcagtgaaacaggtcacacgacattgtcatggcttttattgcatatgaagccttgttctgcccgatgtactcgcacagcgaaaaccatcggcgagttctgttaatggattgaagtatatttgttcctgtgttttg

SEQ ID NO: 18245 - protein, 720 aa, Zea mays subsp. mays
  peptide (1)..(720): Ceres Seq. ID no. 13589291
  misc_feature (96)..(691): Pfam Name: Hsp70 protein Pfam Description: Hsp70 protein
  misc_feature (95)..(717): Homolog of NCBI NO: 23475140 NR Description: hypothetical protein [Desulfovibrio desulfuricans
  misc_feature (67)..(717): Homolog of NCBI NO: 7441874 NR Description: dnaK-type molecular chaperone F20D10.30 -
  misc_feature (43)..(717): Homolog of NCBI NO: 30691626 NR Description: heat shock protein mtHsc70-1 [Arabidopsis
  misc_feature (43)..(720): Homolog of NCBI NO: 585273 NR Description: Heat shock 70 kDa protein, mitochondrial
  misc_feature (45)..(720): Homolog of NCBI NO: 7441881 NR Description: dnaK-type molecular chaperone HSC70-10,
  misc_feature (45)..(720): Homolog of NCBI NO: 7441879 NR Description: dnaK-type molecular chaperone HSC70-11,
  misc_feature (43)..(720): Homolog of NCBI NO: 585272 NR Description: HEAT SHOCK 70 KD PROTEIN, MITOCHONDRIAL PRECURSOR
  misc_feature (43)..(720): Homolog of NCBI NO: 7441844 NR Description: dnaK-type molecular chaperone PHSP1 precursor,
  misc_feature (43)..(720): Homolog of NCBI NO: 15242459 NR Description: heat shock protein mtHsc70-2 (Hsc70-5)
  misc_feature (43)..(720): Homolog of NCBI NO: 399940 NR Description: HEAT SHOCK 70 KD PROTEIN, MITOCHONDRIAL PRECURSOR
LSQAPFRPCPCGLPSPEASPSKTLAAPQPPLLPHAIARDQPSMAASLLLRAVRRRELASPLGSLGASIQSTCVANICSKWGRFARPFSAKAAGNEVIGIDLGTTNSCVSVMEGKNPKVIENAEGARTTPSVVAFTQKGERLVGTPAKRQAVTNPQNTFFGTKRLIGRRFDDPQTQKEMKMVPYTIVKAPNGDAWVQTTDGKQYSPSQVGAFVLTKMKETAESYLGKSISKAVITVPAYFNDAQRQATKDAGRIAGLDVERIINEPTAAALSYGMNNKEGLIAVFDLGGGTFDISILEISNGVFEVKATNGDTFLGGEDFDNTLLEFLVSDFKKTEGIDLSKDRLALQRLREAAEKAKVELSSTSQTEINLPFITADASGAKHLNITLTRSKFESLVHDLIERTRDPCKNCLKDAGISTKEVDEVLLVGGMTRVPKVQEVVSEIFGKNPSKGVNPDEAVAMGAALQGGILRGDVKELLLLDVTPLSLGIETLGGIFTRLINRNTTIPTKKSQVFSTAADNQTQVGIRVLQGEREMATDNKLLGEFDLVGIPPAPRGLPQIEVTFDIDANGIVTVSAKDKATGKEQNITIRSSGGLSEADIQKMVQEAELHAQKDQERKALIDIRNNADTTIYSIEKSLGEYRDKIPAEVASEIEAAIADLRQEMASDDIEKIKAKLEAANKAVSKIGQHMSGGGSGGSQSGSGPQGGGDQAPEAEYEEVKK

SEQ ID NO: 18246 - protein, 678 aa, Zea mays subsp. mays
  peptide (1)..(678): Ceres Seq. ID no. 13589292
  misc_feature (54)..(649): Pfam Name: Hsp70 protein Pfam Description: Hsp70 protein
  misc_feature (1)..(675): Homolog of NCBI NO: 30691626 NR Description: heat shock protein mtHsc70-1 [Arabidopsis
  misc_feature (1)..(678): Homolog of NCBI NO: 585273 NR Description: Heat shock 70 kDa protein, mitochondrial
  misc_feature (3)..(678): Homolog of NCBI NO: 7441881 NR Description: dnaK-type molecular chaperone HSC70-10,
  misc_feature (3)..(678): Homolog of NCBI NO: 7441879 NR Description: dnaK-type molecular chaperone HSC70-11,
  misc_feature (53)..(675): Homolog of NCBI NO: 23475140 NR Description: hypothetical protein [Desulfovibrio desulfuricans
  misc_feature (25)..(675): Homolog of NCBI NO: 7441874 NR Description: dnaK-type molecular chaperone F20D10.30 -
  misc_feature (1)..(678): Homolog of NCBI NO: 585272 NR Description: HEAT SHOCK 70 KD PROTEIN, MITOCHONDRIAL PRECURSOR
  misc_feature (1)..(678): Homolog of NCBI NO: 7441844 NR Description: dnaK-type molecular chaperone PHSP1 precursor,
  misc_feature (1)..(678): Homolog of NCBI NO: 15242459 NR Description: heat shock protein mtHsc70-2 (Hsc70-5)
  misc_feature (1)..(678): Homolog of NCBI NO: 399940 NR Description: HEAT SHOCK 70 KD PROTEIN, MITOCHONDRIAL PRECURSOR
MAASLLLRAVRRRELASPLGSLGASIQSTCVANICSKWGRFARPFSAKAAGNEVIGIDLGTTNSCVSVMEGKNPKVIENAEGARTTPSVVAFTQKGERLVGTPAKRQAVTNPQNTFFGTKRLIGRRFDDPQTQKEMKMVPYTIVKAPNGDAWVQTTDGKQYSPSQVGAFVLTKMKETAESYLGKSISKAVITVPAYFNDAQRQATKDAGRIAGLDVERIINEPTAAALSYGMNNKEGLIAVFDLGGGTFDISILEISNGVFEVKATNGDTFLGGEDFDNTLLEFLVSDFKKTEGIDLSKDRLALQRLREAAEKAKVELSSTSQTEINLPFITADASGAKHLNITLTRSKFESLVHDLIERTRDPCKNCLKDAGISTKEVDEVLLVGGMTRVPKVQEVVSEIFGKNPSKGVNPDEAVAMGAALQGGILRGDVKELLLLDVTPLSLGIETLGGIFTRLINRNTTIPTKKSQVFSTAADNQTQVGIRVLQGEREMATDNKLLGEFDLVGIPPAPRGLPQIEVTFDIDANGIVTVSAKDKATGKEQNITIRSSGGLSEADIQKMVQEAELHAQKDQERKALIDIRNNADTTIYSIEKSLGEYRDKIPAEVASEIEAAIADLRQEMASDDIEKIKAKLEAANKAVSKIGQHMSGGGSGGSQSGSGPQGGGDQAPEAEYEEVKK

SEQ ID NO: 18247 - protein, 610 aa, Zea mays subsp. mays
  peptide (1)..(610): Ceres Seq. ID no. 13589293
  misc_feature (1)..(581): Pfam Name: Hsp70 protein Pfam Description: Hsp70 protein
  misc_feature (1)..(607): Homolog of NCBI NO: 23475140 NR Description: hypothetical protein [Desulfovibrio desulfuricans
  misc_feature (1)..(607): Homolog of NCBI NO: 7441874 NR Description: dnaK-type molecular chaperone F20D10.30 -
  misc_feature (1)..(607): Homolog of NCBI NO: 30691626 NR Description: heat shock protein mtHsc70-1 [Arabidopsis
  misc_feature (1)..(610): Homolog of NCBI NO: 585273 NR Description: Heat shock 70 kDa protein, mitochondrial
  misc_feature (1)..(610): Homolog of NCBI NO: 7441881 NR Description: dnaK-type molecular chaperone HSC70-10,
  misc_feature (1)..(610): Homolog of NCBI NO: 7441879 NR Description: dnaK-type molecular chaperone HSC70-11,
  misc_feature (1)..(610): Homolog of NCBI NO: 585272 NR Description: HEAT SHOCK 70 KD PROTEIN, MITOCHONDRIAL PRECURSOR
  misc_feature (1)..(610): Homolog of NCBI NO: 7441844 NR Description: dnaK-type molecular chaperone PHSP1 precursor,
  misc_feature (1)..(610): Homolog of NCBI NO: 15242459 NR Description: heat shock protein mtHsc70-2 (Hsc70-5)
  misc_feature (1)..(610): Homolog of NCBI NO: 399940 NR Description: HEAT SHOCK 70 KD PROTEIN, MITOCHONDRIAL PRECURSOR
MEGKNPKVIENAEGARTTPSVVAFTQKGERLVGTPAKRQAVTNPQNTFFGTKRLIGRRFDDPQTQKEMKMVPYTIVKAPNGDAWVQTTDGKQYSPSQVGAFVLTKMKETAESYLGKSISKAVITVPAYFNDAQRQATKDAGRIAGLDVERIINEPTAAALSYGMNNKEGLIAVFDLGGGTFDISILEISNGVFEVKATNGDTFLGGEDFDNTLLEFLVSDFKKTEGIDLSKDRLALQRLREAAEKAKVELSSTSQTEINLPFITADASGAKHLNITLTRSKFESLVHDLIERTRDPCKNCLKDAGISTKEVDEVLLVGGMTRVPKVQEVVSEIFGKNPSKGVNPDEAVAMGAALQGGILRGDVKELLLLDVTPLSLGIETLGGIFTRLINRNTTIPTKKSQVFSTAADNQTQVGIRVLQGEREMATDNKLLGEFDLVGIPPAPRGLPQIEVTFDIDANGIVTVSAKDKATGKEQNITIRSSGGLSEADIQKMVQEAELHAQKDQERKALIDIRNNADTTIYSIEKSLGEYRDKIPAEVASEIEAAIADLRQEMASDDIEKIKAKLEAANKAVSKIGQHMSGGGSGGSQSGSGPQGGGDQAPEAEYEEVKK

SEQ ID NO: 18248 - DNA, 1114 bp, Zea mays subsp. mays
  misc_feature (1)..(1114): Ceres Seq. ID no. 12350235
  misc_feature: MA Experiment ID: 20000480 Result: Down-regulated in Transcription
  misc_feature: MA Experiment 20000480 PARAMETER Experiment Name: Zm_Drought_P Parameter: Age (day) Value: 11
  misc_feature: MA Experiment 20000480 PARAMETER Experiment Name: Zm_Drought_P Parameter: Organism Value: Zea mays
  misc_feature: MA Experiment 20000480 PARAMETER Experiment Name: Zm_Drought_P Parameter: Plant Line Value: 35A19
  misc_feature: MA Experiment 20000480 PARAMETER Experiment Name: Zm_Drought_P Parameter: Timepoint (hr) Value: 72
  misc_feature: MA Experiment 20000480 PARAMETER Experiment Name: Zm_Drought_P Parameter: Tissue Value: Aerial
  misc_feature: MA Experiment 20000480 PARAMETER Experiment Name: Zm_Drought_P Parameter: Treatment Value: Drought vs. No Drought
aacgctcaggcacactgtgcaggtgacggcgaaccaggtaaccagctgccgagggaggaaccctagcggaacactgtgcaggtgacggcggcgcgctaccggtgacgggggatacggcggcatcgtccccctcggcccctcctccatccccggcgtggcggcgcaggcagccagcctgcagggttttctgactcagattacttgttcactgtggggtgcaagcttaatcggccaccatggatgttgataagcaagaaacaatggaggagaccatccttgttggtgatgatctcatgcgtgggccgccatcccctgtcataccgaaagagatcgcatcacatgtccttgaagatgttgagctttgtgatggtatactcaagaaccttttcttatgcctacagatcaatgatattgagccattctgccaagatgaaattgtgctatatcgacagtgtgctgagaaaagggacaaggaaataagagagcggatgcaaaatagtgaatataaattgggtttttcgatgcccctgaaacaagcgaaggagagagctactcaactccaatcagaagtaacactgctagaaaggcgcatgattcttgctagtggacttgagggtatggaaggatttcgccagagatggagcttgcacggacagcttgaagacacaaggaaaaggctagaagcactgaaccatggcatggaaaaacgagagaaccaaagttctacggcggagaggacaaaatctccagctgggaagaagtggttcttttggtagtacgtgttgtgtgcaatatgcaaactccaacgatggtccagctgtgtggtccaaatgggatgacttgttaggcaagttgcattctaagcggctaagcctgaagcaatgtgatagcagctaacaaagctacaatttgtttgcaacatgtacctctagggtctactccccctaaagtttgtgccatactcatgtgtttccatttgcatctggtcctctttggatgcaaagtagcattggataaagctagggttttgtaaaatatgtttgttttttaaaaagcgacgaactctgtttggatatgacaaatcttggtagtttataaaagccatggttttatt

SEQ ID NO: 18249 - protein, 179 aa, Zea mays subsp. mays
  peptide (1)..(179): Ceres Seq. ID no. 12350236
  misc_feature (128)..(166): Homolog of NCBI NO: 34906406 NR Description: P0710E05.16 [Oryza sativa (japonica
  misc_feature (9)..(143): Homolog of NCBI NO: 15233419 NR Description: hypothetical protein; protein id: At4g04190.1
  misc_feature (9)..(179): Homolog of NCBI NO: 21741739 NR Description: OSJNBa0073L04.19 [Oryza sativa (japonica
MDVDKQETMEETILVGDDLMRGPPSPVIPKEIASHVLEDVELCDGILKNLFLCLQINDIEPFCQDEIVLYRQCAEKRDKEIRERMQNSEYKLGFSMPLKQAKERATQLQSEVTLLERRMILASGLEGMEGFRQRWSLHGQLEDTRKRLEALNHGMEKRENQSSTAERTKSPAGKKWFFW

SEQ ID NO: 18250 - protein, 171 aa, Zea mays subsp. mays
  peptide (1)..(171): Ceres Seq. ID no. 12350237
  misc_feature (120)..(158): Homolog of NCBI NO: 34906406 NR Description: P0710E05.16 [Oryza sativa (japonica
  misc_feature (1)..(135): Homolog of NCBI NO: 15233419 NR Description: hypothetical protein; protein id: At4g04190.1
  misc_feature (1)..(171): Homolog of NCBI NO: 21741739 NR Description: OSJNBa0073L04.19 [Oryza sativa (japonica
MEETILVGDDLMRGPPSPVIPKEIASHVLEDVELCDGILKNLFLCLQINDIEPFCQDEIVLYRQCAEKRDKEIRERMQNSEYKLGFSMPLKQAKERATQLQSEVTLLERRMILASGLEGMEGFRQRWSLHGQLEDTRKRLEALNHGMEKRENQSSTAERTKSPAGKKWFFW

SEQ ID NO: 18251 - protein, 160 aa, Zea mays subsp. mays
  peptide (1)..(160): Ceres Seq. ID no. 12350238
  misc_feature (109)..(147): Homolog of NCBI NO: 34906406 NR Description: P0710E05.16 [Oryza sativa (japonica
  misc_feature (1)..(124): Homolog of NCBI NO: 15233419 NR Description: hypothetical protein; protein id: At4g04190.1
  misc_feature (1)..(160): Homolog of NCBI NO: 21741739 NR Description: OSJNBa0073L04.19 [Oryza sativa (japonica
MRGPPSPVIPKEIASHVLEDVELCDGILKNLFLCLQINDIEPFCQDEIVLYRQCAEKRDKEIRERMQNSEYKLGFSMPLKQAKERATQLQSEVTLLERRMILASGLEGMEGFRQRWSLHGQLEDTRKRLEALNHGMEKRENQSSTAERTKSPAGKKWFFW

SEQ ID NO: 18252 - DNA, 1069 bp, Zea mays subsp. mays
  misc_feature (1)..(1069): Ceres Seq. ID no. 12383353
  misc_feature: MA Experiment ID: 108513 Result: Up-regulated in Transcription
  misc_feature: MA Experiment 108513 PARAMETER Experiment Name: Zm_100uM_ABA_P Parameter: Age (day) Value: 8
  misc_feature: MA Experiment 108513 PARAMETER Experiment Name: Zm_100uM_ABA_P Parameter: Organism Value: Zea mays
  misc_feature: MA Experiment 108513 PARAMETER Experiment Name: Zm_100uM_ABA_P Parameter: Plant Line Value: 35A19
  misc_feature: MA Experiment 108513 PARAMETER Experiment Name: Zm_100uM_ABA_P Parameter: Timepoint (hr) Value: 6
  misc_feature: MA Experiment 108513 PARAMETER Experiment Name: Zm_100uM_ABA_P Parameter: Tissue Value: Aerial
  misc_feature: MA Experiment 108513 PARAMETER Experiment Name: Zm_100uM_ABA_P Parameter: Treatment Value: 100uM ABA vs. No Treatment
  misc_feature: MA Experiment ID: 108526 Result: Down-regulated in Transcription
  misc_feature: MA Experiment 108526 PARAMETER Experiment Name: Zm_5mM_NO_P Parameter: Age (day) Value: 8
  misc_feature: MA Experiment 108526 PARAMETER Experiment Name: Zm_5mM_NO_P Parameter: Organism Value: Zea mays
  misc_feature: MA Experiment 108526 PARAMETER Experiment Name: Zm_5mM_NO_P Parameter: Plant Line Value: 35A19
  misc_feature: MA Experiment 108526 PARAMETER Experiment Name: Zm_5mM_NO_P Parameter: Timepoint (hr) Value: 1
  misc_feature: MA Experiment 108526 PARAMETER Experiment Name: Zm_5mM_NO_P Parameter: Tissue Value: Aerial
  misc_feature: MA Experiment 108526 PARAMETER Experiment Name: Zm_5mM_NO_P Parameter: Treatment Value: 5mM NO vs. No Treatment
  misc_feature: MA Experiment ID: 108527 Result: Down-regulated in Transcription
  misc_feature: MA Experiment 108527 PARAMETER Experiment Name: Zm_5mM_NO_P Parameter: Age (day) Value: 8
  misc_feature: MA Experiment 108527 PARAMETER Experiment Name: Zm_5mM_NO_P Parameter: Organism Value: Zea mays
  misc_feature: MA Experiment 108527 PARAMETER Experiment Name: Zm_5mM_NO_P Parameter: Plant Line Value: 35A19
  misc_feature: MA Experiment 108527 PARAMETER Experiment Name: Zm_5mM_NO_P Parameter: Timepoint (hr) Value: 6
  misc_feature: MA Experiment 108527 PARAMETER Experiment Name: Zm_5mM_NO_P Parameter: Tissue Value: Aerial
  misc_feature: MA Experiment 108527 PARAMETER Experiment Name: Zm_5mM_NO_P Parameter: Treatment Value: 5mM NO vs. No Treatment
  misc_feature: MA Experiment ID: 108528 Result: Up-regulated in Transcription
  misc_feature: MA Experiment 108528 PARAMETER Experiment Name: Zm_Imbibed_Seeds_P Parameter: Age (day) Value: 5 vs. 2
  misc_feature: MA Experiment 108528 PARAMETER Experiment Name: Zm_Imbibed_Seeds_P Parameter: Organism Value: Zea mays
  misc_feature: MA Experiment 108528 PARAMETER Experiment Name: Zm_Imbibed_Seeds_P Parameter: Plant Line Value: 35A19
  misc_feature: MA Experiment 108528 PARAMETER Experiment Name: Zm_Imbibed_Seeds_P Parameter: Tissue Value: Aerial vs. Embryo
  misc_feature: MA Experiment ID: 108530 Result: Up-regulated in Transcription
  misc_feature: MA Experiment 108530 PARAMETER Experiment Name: Zm_Imbibed_Seeds_P Parameter: Age (day) Value: 6 vs. 2
  misc_feature: MA Experiment 108530 PARAMETER Experiment Name: Zm_Imbibed_Seeds_P Parameter: Organism Value: Zea mays
  misc_feature: MA Experiment 108530 PARAMETER Experiment Name: Zm_Imbibed_Seeds_P Parameter: Plant Line Value: 35A19
  misc_feature: MA Experiment 108530 PARAMETER Experiment Name: Zm_Imbibed_Seeds_P Parameter: Tissue Value: Aerial vs. Embryo
  misc_feature: MA Experiment ID: 108540 Result: Up-regulated in Transcription
  misc_feature: MA Experiment 108540 PARAMETER Experiment Name: Zm_20percent_PEG_P Parameter: Age (day) Value: 8
  misc_feature: MA Experiment 108540 PARAMETER Experiment Name: Zm_20percent_PEG_P Parameter: Organism Value: Zea mays
  misc_feature: MA Experiment 108540 PARAMETER Experiment Name: Zm_20percent_PEG_P Parameter: Plant Line Value: 35A19
  misc_feature: MA Experiment 108540 PARAMETER Experiment Name: Zm_20percent_PEG_P Parameter: Timepoint (hr) Value: 6
  misc_feature: MA Experiment 108540 PARAMETER Experiment Name: Zm_20percent_PEG_P Parameter: Tissue Value: Aerial
  misc_feature: MA Experiment 108540 PARAMETER Experiment Name: Zm_20percent_PEG_P Parameter: Treatment Value: 20percent PEG vs. No Treatment
  misc_feature: MA Experiment ID: 108547 Result: Up-regulated in Transcription
  misc_feature: MA Experiment 108547 PARAMETER Experiment Name: Zm_Imbibed_Seeds_P Parameter: Age (day) Value: 4 vs. 2
  misc_feature: MA Experiment 108547 PARAMETER Experiment Name: Zm_Imbibed_Seeds_P Parameter: Organism Value: Zea mays
  misc_feature: MA Experiment 108547 PARAMETER Experiment Name: Zm_Imbibed_Seeds_P Parameter: Plant Line Value: 35A19
  misc_feature: MA Experiment 108547 PARAMETER Experiment Name: Zm_Imbibed_Seeds_P Parameter: Tissue Value: Aerial vs. Embryo
  misc_feature: MA Experiment ID: 108559 Result: Down-regulated in Transcription
  misc_feature: MA Experiment 108559 PARAMETER Experiment Name: Zm_5mM_NO_P Parameter: Age (day) Value: 8
  misc_feature: MA Experiment 108559 PARAMETER Experiment Name: Zm_5mM_NO_P Parameter: Organism Value: Zea mays
  misc_feature: MA Experiment 108559 PARAMETER Experiment Name: Zm_5mM_NO_P Parameter: Plant Line Value: 35A19
  misc_feature: MA Experiment 108559 PARAMETER Experiment Name: Zm_5mM_NO_P Parameter: Timepoint (hr) Value: 12
  misc_feature: MA Experiment 108559 PARAMETER Experiment Name: Zm_5mM_NO_P Parameter: Tissue Value: Aerial
  misc_feature: MA Experiment 108559 PARAMETER Experiment Name: Zm_5mM_NO_P Parameter: Treatment Value: 5mM NO vs. No Treatment
  misc_feature: MA Experiment ID: 108687 Result: Down-regulated in Transcription
  misc_feature: MA Experiment 108687 PARAMETER Experiment Name: Zm_Embryos-Flowers__P Parameter: Tissue Value: Embryo vs. Aerial+
  misc_feature: MA Experiment ID: 108688 Result: Down-regulated in Transcription
  misc_feature: MA Experiment 108688 PARAMETER Experiment Name: Zm_Embryos-Flowers__P Parameter: Tissue Value: Immature Flowers vs. Aerial+
  misc_feature: MA Experiment ID: 108689 Result: Up-regulated in Transcription
  misc_feature: MA Experiment 108689 PARAMETER Experiment Name: Zm_Drought_Roots_P Parameter: Age (day) Value: 9
  misc_feature: MA Experiment 108689 PARAMETER Experiment Name: Zm_Drought_Roots_P Parameter: Organism Value: Zea mays
  misc_feature: MA Experiment 108689 PARAMETER Experiment Name: Zm_Drought_Roots_P Parameter: Plant Line Value: 35A19
  misc_feature: MA Experiment 108689 PARAMETER Experiment Name: Zm_Drought_Roots_P Parameter: Timepoint (hr) Value: 24
  misc_feature: MA Experiment 108689 PARAMETER Experiment Name: Zm_Drought_Roots_P Parameter: Tissue Value: Roots
  misc_feature: MA Experiment 108689 PARAMETER Experiment Name: Zm_Drought_Roots_P Parameter: Treatment Value: Drought vs. No Drought
gcacgagaccattacctagaacatcctaatcaaaaaaagacggttcgagtccgttctagaatctagacacggcaatgaagcccaggcctctcggttgcggttgcggttgcgtcccggcggcggtagggtgcgtcggctgggcatggaggccgactccgaggccgcgcgggggagggagggcagcaggggtgtcgcccaagtgctcgcactcggcggcggcggcgggagcggtacagtcggaggaccgccgccgcgaggtgctgtaccgcccggtggagctgcccgggacggggtacgggtcggagctggaggcgcggatcgagaaggtcatctacgcctgccgcttcatgaccttcttcggaatttgtggcttgctcctcggctctgtcccatgcttcctcaagggatgcgttttcgtgatggatgccttcgtcgagtactaccggcacggcggagggaaggtcatcctcctgctggtggaagccattgagatgtttctcattgcaacggtcacgtttgtcttggggacgggcttgtacgagctcttcatcagtaacatggactccttttacgggtccaacctcttcggcctgttcagccttccggaacggcccaagtgggttgaaatcaagtcggtaaatgatctcaagacaaagctgggccatgtcattgtcatggttctgctggttggcatcttcgagaagagcaagagggtgaccatcacatcctgtgctgacctcttgtgctttgctggatcgattttcctgtcttcagtttgcctctacctgctttccaagctccataccaccaagggaggcagccaggcctgaaatgagagtgtttgtatgtaagtgatatgtcttgttctgttgctgtgcaacgcctgcctccggttctgttcgtgtagtaaataattaggcagtggggaggtaccgatttcccatgtactcatgttcatgtatggctagggagtttcagttaggcacaaaccaaactacattgagtatcatcctgtatgtgtagctcgatgtaatgcaatcaataactgatattctctttnagtaagctt

SEQ ID NO: 18253 - protein, 251 aa, Zea mays subsp. mays
  peptide (1)..(251): Ceres Seq. ID no. 12383354
  misc_feature (78)..(241): Homolog of NCBI NO: 15792349 NR Description: putative integral membrane protein [Campylobacter
  misc_feature (29)..(250): Homolog of NCBI NO: 31126772 NR Description: unknown protein [Oryza sativa (japonica
  misc_feature (65)..(243): Homolog of NCBI NO: 20465418 NR Description: unknown protein [Arabidopsis thaliana]
  misc_feature (65)..(243): Homolog of NCBI NO: 15240692 NR Description: unknown protein
  misc_feature (71)..(243): Homolog of NCBI NO: 34899024 NR Description: hypothetical protein~similar to Arabidopsis
  misc_feature (71)..(243): Homolog of NCBI NO: 34395260 NR Description: unknown protein [Oryza sativa (japonica
  misc_feature (70)..(243): Homolog of NCBI NO: 34899026 NR Description: contains ESTs
  misc_feature (22)..(243): Homolog of NCBI NO: 7487716 NR Description: hypothetical protein T5K18.170 - Arabidopsis
  misc_feature (22)..(243): Homolog of NCBI NO: 15810053 NR Description: AT4g19390/T5K18_170 [Arabidopsis thaliana]
  misc_feature (22)..(243): Homolog of NCBI NO: 18415304 NR Description: putative protein
MKPRPLGCGCGCVPAAVGCVGWAWRPTPRPRGGGRAAGVSPKCSHSAAAAGAVQSEDRRREVLYRPVELPGTGYGSELEARIEKVIYACRFMTFFGICGLLLGSVPCFLKGCVFVMDAFVEYYRHGGGKVILLLVEAIEMFLIATVTFVLGTGLYELFISNMDSFYGSNLFGLFSLPERPKWVEIKSVNDLKTKLGHVIVMVLLVGIFEKSKRVTITSCADLLCFAGSIFLSSVCLYLLSKLHTTKGGSQA

SEQ ID NO: 18254 - protein, 160 aa, Zea mays subsp. mays
  peptide (1)..(160): Ceres Seq. ID no. 12383355
  misc_feature (1)..(150): Homolog of NCBI NO: 15792349 NR Description: putative integral membrane protein [Campylobacter
  misc_feature (1)..(159): Homolog of NCBI NO: 31126772 NR Description: unknown protein [Oryza sativa (japonica
  misc_feature (1)..(152): Homolog of NCBI NO: 20465418 NR Description: unknown protein [Arabidopsis thaliana]
  misc_feature (1)..(152): Homolog of NCBI NO: 15240692 NR Description: unknown protein
  misc_feature (1)..(152): Homolog of NCBI NO: 34899024 NR Description: hypothetical protein~similar to Arabidopsis
  misc_feature (1)..(152): Homolog of NCBI NO: 34395260 NR Description: unknown protein [Oryza sativa (japonica
  misc_feature (1)..(152): Homolog of NCBI NO: 34899026 NR Description: contains ESTs
  misc_feature (1)..(152): Homolog of NCBI NO: 7487716 NR Description: hypothetical protein T5K18.170 - Arabidopsis
  misc_feature (1)..(152): Homolog of NCBI NO: 15810053 NR Description: AT4g19390/T5K18_170 [Arabidopsis thaliana]
  misc_feature (1)..(152): Homolog of NCBI NO: 18415304 NR Description: putative protein
MTFFGICGLLLGSVPCFLKGCVFVMDAFVEYYRHGGGKVILLLVEAIEMFLIATVTFVLGTGLYELFISNMDSFYGSNLFGLFSLPERPKWVEIKSVNDLKTKLGHVIVMVLLVGIFEKSKRVTITSCADLLCFAGSIFLSSVCLYLLSKLHTTKGGSQA

SEQ ID NO: 18255 - protein, 136 aa, Zea mays subsp. mays
  peptide (1)..(136): Ceres Seq. ID no. 12383356
  misc_feature (1)..(126): Homolog of NCBI NO: 15792349 NR Description: putative integral membrane protein [Campylobacter
  misc_feature (1)..(135): Homolog of NCBI NO: 31126772 NR Description: unknown protein [Oryza sativa (japonica
  misc_feature (1)..(128): Homolog of NCBI NO: 20465418 NR Description: unknown protein [Arabidopsis thaliana]
  misc_feature (1)..(128): Homolog of NCBI NO: 15240692 NR Description: unknown protein
  misc_feature (1)..(128): Homolog of NCBI NO: 34899024 NR Description: hypothetical protein~similar to Arabidopsis
  misc_feature (1)..(128): Homolog of NCBI NO: 34395260 NR Description: unknown protein [Oryza sativa (japonica
  misc_feature (1)..(128): Homolog of NCBI NO: 34899026 NR Description: contains ESTs
  misc_feature (1)..(128): Homolog of NCBI NO: 7487716 NR Description: hypothetical protein T5K18.170 - Arabidopsis
  misc_feature (1)..(128): Homolog of NCBI NO: 15810053 NR Description: AT4g19390/T5K18_170 [Arabidopsis thaliana]
  misc_feature (1)..(128): Homolog of NCBI NO: 18415304 NR Description: putative protein
MDAFVEYYRHGGGKVILLLVEAIEMFLIATVTFVLGTGLYELFISNMDSFYGSNLFGLFSLPERPKWVEIKSVNDLKTKLGHVIVMVLLVGIFEKSKRVTITSCADLLCFAGSIFLSSVCLYLLSKLHTTKGGSQA

SEQ ID NO: 18256 - DNA, 1005 bp, Zea mays subsp. mays; identical to SEQ ID NO: 2042
  misc_feature (1)..(1005): Ceres Seq. ID no. 13492805
  misc_feature: MA Experiment ID: 108543 Result: Down-regulated in Transcription
  misc_feature: MA Experiment ID: 108559 Result: Up-regulated in Transcription
  misc_feature: MA Experiment 108559 PARAMETER Experiment Name: Zm_5mM_NO_P Parameter: Age (day) Value: 8
  misc_feature: MA Experiment 108559 PARAMETER Experiment Name: Zm_5mM_NO_P Parameter: Organism Value: Zea mays
  misc_feature: MA Experiment 108559 PARAMETER Experiment Name: Zm_5mM_NO_P Parameter: Plant Line Value: 35A19
  misc_feature: MA Experiment 108559 PARAMETER Experiment Name: Zm_5mM_NO_P Parameter: Timepoint (hr) Value: 12
  misc_feature: MA Experiment 108559 PARAMETER Experiment Name: Zm_5mM_NO_P Parameter: Tissue Value: Aerial
  misc_feature: MA Experiment 108559 PARAMETER Experiment Name: Zm_5mM_NO_P Parameter: Treatment Value: 5mM NO vs. No Treatment
  misc_feature: MA Experiment ID: 20000477 Result: Up-regulated in Transcription
  misc_feature: MA Experiment 20000477 PARAMETER Experiment Name: Zm_5mM_SA_P Parameter: Age (day) Value: 10
  misc_feature: MA Experiment 20000477 PARAMETER Experiment Name: Zm_5mM_SA_P Parameter: Organism Value: Zea mays
  misc_feature: MA Experiment 20000477 PARAMETER Experiment Name: Zm_5mM_SA_P Parameter: Plant Line Value: 35A19
  misc_feature: MA Experiment 20000477 PARAMETER Experiment Name: Zm_5mM_SA_P Parameter: Timepoint (hr) Value: 48
  misc_feature: MA Experiment 20000477 PARAMETER Experiment Name: Zm_5mM_SA_P Parameter: Tissue Value: Aerial
  misc_feature: MA Experiment 20000477 PARAMETER Experiment Name: Zm_5mM_SA_P Parameter: Treatment Value: 5mM SA vs. No Treatment
  misc_feature: MA Experiment ID: 20000478 Result: Up-regulated in Transcription
  misc_feature: MA Experiment 20000478 PARAMETER Experiment Name: Zm_5mM_SA_P Parameter: Age (day) Value: 11
  misc_feature: MA Experiment 20000478 PARAMETER Experiment Name: Zm_5mM_SA_P Parameter: Organism Value: Zea mays
  misc_feature: MA Experiment 20000478 PARAMETER Experiment Name: Zm_5mM_SA_P Parameter: Plant Line Value: 35A19
  misc_feature: MA Experiment 20000478 PARAMETER Experiment Name: Zm_5mM_SA_P Parameter: Timepoint (hr) Value: 72
  misc_feature: MA Experiment 20000478 PARAMETER Experiment Name: Zm_5mM_SA_P Parameter: Tissue Value: Aerial
  misc_feature: MA Experiment 20000478 PARAMETER Experiment Name: Zm_5mM_SA_P Parameter: Treatment Value: 5mM SA vs. No Treatment
  misc_feature: MA Experiment ID: 20000480 Result: Up-regulated in Transcription
  misc_feature: MA Experiment 20000480 PARAMETER Experiment Name: Zm_Drought_P Parameter: Age (day) Value: 11
  misc_feature: MA Experiment 20000480 PARAMETER Experiment Name: Zm_Drought_P Parameter: Organism Value: Zea mays
  misc_feature: MA Experiment 20000480 PARAMETER Experiment Name: Zm_Drought_P Parameter: Plant Line Value: 35A19
  misc_feature: MA Experiment 20000480 PARAMETER Experiment Name: Zm_Drought_P Parameter: Timepoint (hr) Value: 72
  misc_feature: MA Experiment 20000480 PARAMETER Experiment Name: Zm_Drought_P Parameter: Tissue Value: Aerial
  misc_feature: MA Experiment 20000480 PARAMETER Experiment Name: Zm_Drought_P Parameter: Treatment Value: Drought vs. No Drought

SEQ ID NO: 18257 - protein, 284 aa, Zea mays subsp. mays; identical to SEQ ID NO: 2043
  peptide (1)..(284): Ceres Seq. ID no. 13492806
  misc_feature (203)..(273): Pfam Name: NifU-like domain Pfam Description: NifU-like domain
  misc_feature (203)..(273): Pfam Name: NifU-like domain Pfam Description: NifU-like domain
  misc_feature (85)..(281): Homolog of NCBI NO: 34856373 NR Description: similar to HIRA-interacting protein 5 (mHIRIP5)
  misc_feature (87)..(281): Homolog of NCBI NO: 9910264 NR Description: histone cell cycle regulation defective
  misc_feature (85)..(281): Homolog of NCBI NO: 34500321 NR Description: NifU-like protein HIRIP5 [Mus musculus]
  misc_feature (85)..(281): Homolog of NCBI NO: 12834577 NR Description: unnamed protein product [Mus musculus]
  misc_feature (85)..(283): Homolog of NCBI NO: 37681825 NR Description: HIRA interacting protein 5 [Danio rerio]
  misc_feature (85)..(281): Homolog of NCBI NO: 34856373 NR Description: similar to HIRA-interacting protein 5 (mHIRIP5)
  misc_feature (85)..(281): Homolog of NCBI NO: 34500321 NR Description: NifU-like protein HIRIP5 [Mus musculus]
  misc_feature (85)..(283): Homolog of NCBI NO: 37681825 NR Description: HIRA interacting protein 5 [Danio rerio]
  misc_feature (17)..(284): Homolog of NCBI NO: 34897632 NR Description: hypothetical protein [Oryza sativa]
  misc_feature (76)..(284): Homolog of NCBI NO: 18402817 NR Description: expressed protein [Arabidopsis thaliana]
  misc_feature (46)..(284): Homolog of NCBI NO: 25405462 NR Description: unknown protein, 90320-88994 [imported] -
  misc_feature (70)..(284): Homolog of NCBI NO: 15223842 NR Description: expressed protein [Arabidopsis thaliana]
  misc_feature (87)..(281): Homolog of NCBI NO: 26324295 NR Description: unnamed protein product [Mus musculus]
  misc_feature (85)..(281): Homolog of NCBI NO: 12834577 NR Description: unnamed protein product [Mus musculus]
  misc_feature (87)..(281): Homolog of NCBI NO: 9910264 NR Description: histone cell cycle regulation defective
  misc_feature (87)..(281): Homolog of NCBI NO: 26324295 NR Description: unnamed protein product [Mus musculus]
  misc_feature (70)..(284): Homolog of NCBI NO: 15223842 NR Description: expressed protein [Arabidopsis thaliana]
  misc_feature (46)..(284): Homolog of NCBI NO: 25405462 NR Description: unknown protein, 90320-88994 [imported] -
  misc_feature (76)..(284): Homolog of NCBI NO: 18402817 NR Description: expressed protein [Arabidopsis thaliana]
  misc_feature (17)..(284): Homolog of NCBI NO: 34897632 NR Description: hypothetical protein [Oryza sativa]

SEQ ID NO: 18258 - protein, 268 aa, Zea mays subsp. mays; identical to SEQ ID NO: 2044
  peptide (1)..(268): Ceres Seq. ID no. 13492807
  misc_feature (187)..(257): Pfam Name: NifU-like domain Pfam Description: NifU-like domain
  misc_feature (187)..(257): Pfam Name: NifU-like domain Pfam Description: NifU-like domain
  misc_feature (69)..(265): Homolog of NCBI NO: 34856373 NR Description: similar to HIRA-interacting protein 5 (mHIRIP5)
  misc_feature (71)..(265): Homolog of NCBI NO: 9910264 NR Description: histone cell cycle regulation defective
  misc_feature (69)..(265): Homolog of NCBI NO: 34500321 NR Description: NifU-like protein HIRIP5 [Mus musculus]
  misc_feature (69)..(265): Homolog of NCBI NO: 12834577 NR Description: unnamed protein product [Mus musculus]
  misc_feature (69)..(267): Homolog of NCBI NO: 37681825 NR Description: HIRA interacting protein 5 [Danio rerio]
  misc_feature (69)..(265): Homolog of NCBI NO: 34856373 NR Description: similar to HIRA-interacting protein 5 (mHIRIP5)
  misc_feature (69)..(265): Homolog of NCBI NO: 34500321 NR Description: NifU-like protein HIRIP5 [Mus musculus]
  misc_feature (69)..(267): Homolog of NCBI NO: 37681825 NR Description: HIRA interacting protein 5 [Danio rerio]
  misc_feature (1)..(268): Homolog of NCBI NO: 34897632 NR Description: hypothetical protein [Oryza sativa]
  misc_feature (60)..(268): Homolog of NCBI NO: 18402817 NR Description: expressed protein [Arabidopsis thaliana]
  misc_feature (30)..(268): Homolog of NCBI NO: 25405462 NR Description: unknown protein, 90320-88994 [imported] -
  misc_feature (54)..(268): Homolog of NCBI NO: 15223842 NR Description: expressed protein [Arabidopsis thaliana]
  misc_feature (71)..(265): Homolog of NCBI NO: 26324295 NR Description: unnamed protein product [Mus musculus]
  misc_feature (69)..(265): Homolog of NCBI NO: 12834577 NR Description: unnamed protein product [Mus musculus]
  misc_feature (71)..(265): Homolog of NCBI NO: 9910264 NR Description: histone cell cycle regulation defective
  misc_feature (71)..(265): Homolog of NCBI NO: 26324295 NR Description: unnamed protein product [Mus musculus]
  misc_feature (54)..(268): Homolog of NCBI NO: 15223842 NR Description: expressed protein [Arabidopsis thaliana]
  misc_feature (30)..(268): Homolog of NCBI NO: 25405462 NR Description: unknown protein, 90320-88994 [imported] -
  misc_feature (60)..(268): Homolog of NCBI NO: 18402817 NR Description: expressed protein [Arabidopsis thaliana]
  misc_feature (1)..(268): Homolog of NCBI NO: 34897632 NR Description: hypothetical protein [Oryza sativa]

SEQ ID NO: 18259 - protein, 198 aa, Zea mays subsp. mays; identical to SEQ ID NO: 2045
  peptide (1)..(198): Ceres Seq. ID no. 13492808
  misc_feature (117)..(187): Pfam Name: NifU-like domain Pfam Description: NifU-like domain
  misc_feature (117)..(187): Pfam Name: NifU-like domain Pfam Description: NifU-like domain
  misc_feature (1)..(195): Homolog of NCBI NO: 34856373 NR Description: similar to HIRA-interacting protein 5 (mHIRIP5)
  misc_feature (1)..(195): Homolog of NCBI NO: 9910264 NR Description: histone cell cycle regulation defective
  misc_feature (1)..(195): Homolog of NCBI NO: 34500321 NR Description: NifU-like protein HIRIP5 [Mus musculus]
  misc_feature (1)..(195): Homolog of NCBI NO: 12834577 NR Description: unnamed protein product [Mus musculus]
  misc_feature (1)..(197): Homolog of NCBI NO: 37681825 NR Description: HIRA interacting protein 5 [Danio rerio]
  misc_feature (1)..(195): Homolog of NCBI NO: 34856373 NR Description: similar to HIRA-interacting protein 5 (mHIRIP5)
  misc_feature (1)..(195): Homolog of NCBI NO: 34500321 NR Description: NifU-like protein HIRIP5 [Mus musculus]
  misc_feature (1)..(197): Homolog of NCBI NO: 37681825 NR Description: HIRA interacting protein 5 [Danio rerio]
  misc_feature (1)..(198): Homolog of NCBI NO: 34897632 NR Description: hypothetical protein [Oryza sativa]
  misc_feature (1)..(198): Homolog of NCBI NO: 18402817 NR Description: expressed protein [Arabidopsis thaliana]
  misc_feature (1)..(198): Homolog of NCBI NO: 25405462 NR Description: unknown protein, 90320-88994 [imported] -
  misc_feature (1)..(198): Homolog of NCBI NO: 15223842 NR Description: expressed protein [Arabidopsis thaliana]
  misc_feature (1)..(195): Homolog of NCBI NO: 26324295 NR Description: unnamed protein product [Mus musculus]
  misc_feature (1)..(195): Homolog of NCBI NO: 12834577 NR Description: unnamed protein product [Mus musculus]
  misc_feature (1)..(195): Homolog of NCBI NO: 9910264 NR Description: histone cell cycle regulation defective
  misc_feature (1)..(195): Homolog of NCBI NO: 26324295 NR Description: unnamed protein product [Mus musculus]
  misc_feature (1)..(198): Homolog of NCBI NO: 15223842 NR Description: expressed protein [Arabidopsis thaliana]
  misc_feature (1)..(198): Homolog of NCBI NO: 25405462 NR Description: unknown protein, 90320-88994 [imported] -
  misc_feature (1)..(198): Homolog of NCBI NO: 18402817 NR Description: expressed protein [Arabidopsis thaliana]
  misc_feature (1)..(198): Homolog of NCBI NO: 34897632 NR Description: hypothetical protein [Oryza sativa]

SEQ ID NO: 18260 - DNA, 2116 bp, Zea mays subsp. mays
  misc_feature (1)..(2116): Ceres Seq. ID no. 13566658
  misc_feature: MA Experiment ID: 108504 Result: Down-regulated in Transcription
  misc_feature: MA Experiment 108504 PARAMETER Experiment Name: Zm_Drought_P Parameter: Age (day) Value: 8
  misc_feature: MA Experiment 108504 PARAMETER Experiment Name: Zm_Drought_P Parameter: Organism Value: Zea mays
  misc_feature: MA Experiment 108504 PARAMETER Experiment Name: Zm_Drought_P Parameter: Plant Line Value: 35A19
  misc_feature: MA Experiment 108504 PARAMETER Experiment Name: Zm_Drought_P Parameter: Timepoint (hr) Value: 12
  misc_feature: MA Experiment 108504 PARAMETER Experiment Name: Zm_Drought_P Parameter: Tissue Value: Aerial
  misc_feature: MA Experiment 108504 PARAMETER Experiment Name: Zm_Drought_P Parameter: Treatment Value: Drought vs. No Drought
  misc_feature: MA Experiment ID: 108535 Result: Up-regulated in Transcription
  misc_feature: MA Experiment 108535 PARAMETER Experiment Name: Zm_Meristem_P Parameter: Age (day) Value: 8
  misc_feature: MA Experiment 108535 PARAMETER Experiment Name: Zm_Meristem_P Parameter: Organism Value: Zea mays
  misc_feature: MA Experiment 108535 PARAMETER Experiment Name: Zm_Meristem_P Parameter: Plant Line Value: 35A19
  misc_feature: MA Experiment 108535 PARAMETER Experiment Name: Zm_Meristem_P Parameter: Tissue Value: Root Meristem vs. Above Root Meristem
  misc_feature: MA Experiment ID: 108543 Result: Down-regulated in Transcription
  misc_feature: MA Experiment ID: 108556 Result: Down-regulated in Transcription
  misc_feature: MA Experiment 108556 PARAMETER Experiment Name: Zm_Drought_P Parameter: Age (day) Value: 9
  misc_feature: MA Experiment 108556 PARAMETER Experiment Name: Zm_Drought_P Parameter: Organism Value: Zea mays
  misc_feature: MA Experiment 108556 PARAMETER Experiment Name: Zm_Drought_P Parameter: Plant Line Value: 35A19
  misc_feature: MA Experiment 108556 PARAMETER Experiment Name: Zm_Drought_P Parameter: Timepoint (hr) Value: 24
  misc_feature: MA Experiment 108556 PARAMETER Experiment Name: Zm_Drought_P Parameter: Tissue Value: Aerial
  misc_feature: MA Experiment 108556 PARAMETER Experiment Name: Zm_Drought_P Parameter: Treatment Value: Drought vs. No Drought
  misc_feature: MA Experiment ID: 108597 Result: Down-regulated in Transcription
  misc_feature: MA Experiment 108597 PARAMETER Experiment Name: Zm_100uM_ABA_P Parameter: Age (day) Value: 9
  misc_feature: MA Experiment 108597 PARAMETER Experiment Name: Zm_100uM_ABA_P Parameter: Organism Value: Zea mays
  misc_feature: MA Experiment 108597 PARAMETER Experiment Name: Zm_100uM_ABA_P Parameter: Plant Line Value: 35A19
  misc_feature: MA Experiment 108597 PARAMETER Experiment Name: Zm_100uM_ABA_P Parameter: Timepoint (hr) Value: 24
  misc_feature: MA Experiment 108597 PARAMETER Experiment Name: Zm_100uM_ABA_P Parameter: Tissue Value: Aerial
  misc_feature: MA Experiment 108597 PARAMETER Experiment Name: Zm_100uM_ABA_P Parameter: Treatment Value: 100uM ABA vs. No Treatment
  misc_feature: MA Experiment ID: 108689 Result: Down-regulated in Transcription
  misc_feature: MA Experiment 108689 PARAMETER Experiment Name: Zm_Drought_Roots_P Parameter: Age (day) Value: 9
  misc_feature: MA Experiment 108689 PARAMETER Experiment Name: Zm_Drought_Roots_P Parameter: Organism Value: Zea mays
  misc_feature: MA Experiment 108689 PARAMETER Experiment Name: Zm_Drought_Roots_P Parameter: Plant Line Value: 35A19
  misc_feature: MA Experiment 108689 PARAMETER Experiment Name: Zm_Drought_Roots_P Parameter: Timepoint (hr) Value: 24
  misc_feature: MA Experiment 108689 PARAMETER Experiment Name: Zm_Drought_Roots_P Parameter: Tissue Value: Roots
  misc_feature: MA Experiment 108689 PARAMETER Experiment Name: Zm_Drought_Roots_P Parameter: Treatment Value: Drought vs. No Drought
  misc_feature: MA Experiment ID: 20000477 Result: Down-regulated in Transcription
  misc_feature: MA Experiment 20000477 PARAMETER Experiment Name: Zm_5mM_SA_P Parameter: Age (day) Value: 10
  misc_feature: MA Experiment 20000477 PARAMETER Experiment Name: Zm_5mM_SA_P Parameter: Organism Value: Zea mays
  misc_feature: MA Experiment 20000477 PARAMETER Experiment Name: Zm_5mM_SA_P Parameter: Plant Line Value: 35A19
  misc_feature: MA Experiment 20000477 PARAMETER Experiment Name: Zm_5mM_SA_P Parameter: Timepoint (hr) Value: 48
  misc_feature: MA Experiment 20000477 PARAMETER Experiment Name: Zm_5mM_SA_P Parameter: Tissue Value: Aerial
  misc_feature: MA Experiment 20000477 PARAMETER Experiment Name: Zm_5mM_SA_P Parameter: Treatment Value: 5mM SA vs. No Treatment
  misc_feature: MA Experiment ID: 20000478 Result: Down-regulated in Transcription
  misc_feature: MA Experiment 20000478 PARAMETER Experiment Name: Zm_5mM_SA_P Parameter: Age (day) Value: 11
  misc_feature: MA Experiment 20000478 PARAMETER Experiment Name: Zm_5mM_SA_P Parameter: Organism Value: Zea mays
  misc_feature: MA Experiment 20000478 PARAMETER Experiment Name: Zm_5mM_SA_P Parameter: Plant Line Value: 35A19
  misc_feature: MA Experiment 20000478 PARAMETER Experiment Name: Zm_5mM_SA_P Parameter: Timepoint (hr) Value: 72
  misc_feature: MA Experiment 20000478 PARAMETER Experiment Name: Zm_5mM_SA_P Parameter: Tissue Value: Aerial
  misc_feature: MA Experiment 20000478 PARAMETER Experiment Name: Zm_5mM_SA_P Parameter: Treatment Value: 5mM SA vs. No Treatment
  misc_feature: MA Experiment ID: 20000479 Result: Down-regulated in Transcription
  misc_feature: MA Experiment 20000479 PARAMETER Experiment Name: Zm_Drought_P Parameter: Age (day) Value: 10
  misc_feature: MA Experiment 20000479 PARAMETER Experiment Name: Zm_Drought_P Parameter: Organism Value: Zea mays
  misc_feature: MA Experiment 20000479 PARAMETER Experiment Name: Zm_Drought_P Parameter: Plant Line Value: 35A19
  misc_feature: MA Experiment 20000479 PARAMETER Experiment Name: Zm_Drought_P Parameter: Timepoint (hr) Value: 48
  misc_feature: MA Experiment 20000479 PARAMETER Experiment Name: Zm_Drought_P Parameter: Tissue Value: Aerial
  misc_feature: MA Experiment 20000479 PARAMETER Experiment Name: Zm_Drought_P Parameter: Treatment Value: Drought vs. No Drought
  misc_feature: MA Experiment ID: 20000480 Result: Down-regulated in Transcription
  misc_feature: MA Experiment 20000480 PARAMETER Experiment Name: Zm_Drought_P Parameter: Age (day) Value: 11
  misc_feature: MA Experiment 20000480 PARAMETER Experiment Name: Zm_Drought_P Parameter: Organism Value: Zea mays
  misc_feature: MA Experiment 20000480 PARAMETER Experiment Name: Zm_Drought_P Parameter: Plant Line Value: 35A19
  misc_feature: MA Experiment 20000480 PARAMETER Experiment Name: Zm_Drought_P Parameter: Timepoint (hr) Value: 72
  misc_feature: MA Experiment 20000480 PARAMETER Experiment Name: Zm_Drought_P Parameter: Tissue Value: Aerial
  misc_feature: MA Experiment 20000480 PARAMETER Experiment Name: Zm_Drought_P Parameter: Treatment Value: Drought vs. No Drought
  misc_feature: MA Experiment ID: 20000492 Result: Up-regulated in Transcription
  misc_feature: MA Experiment 20000492 PARAMETER Experiment Name: Zm_Hybrid_Seed_Dev_P Parameter: DAP Value: 12
  misc_feature: MA Experiment 20000492 PARAMETER Experiment Name: Zm_Hybrid_Seed_Dev_P Parameter: Organism Value: Zea mays
  misc_feature: MA Experiment 20000492 PARAMETER Experiment Name: Zm_Hybrid_Seed_Dev_P Parameter: Plant Line Value: 35A19
  misc_feature: MA Experiment 20000492 PARAMETER Experiment Name: Zm_Hybrid_Seed_Dev_P Parameter: Tissue Value: Fert Kernel vs. Unfert Floret
  misc_feature: MA Experiment ID: 20000533 Result: Down-regulated in Transcription
  misc_feature: MA Experiment 20000533 PARAMETER Experiment Name: Zm_0.001percent_MeJA_P Parameter: Age (day) Value: 11
  misc_feature: MA Experiment 20000533 PARAMETER Experiment Name: Zm_0.001percent_MeJA_P Parameter: Organism Value: Zea mays
  misc_feature: MA Experiment 20000533 PARAMETER Experiment Name: Zm_0.001percent_MeJA_P Parameter: Plant Line Value: 35A19
  misc_feature: MA Experiment 20000533 PARAMETER Experiment Name: Zm_0.001percent_MeJA_P Parameter: Timepoint (hr) Value: 72
  misc_feature: MA Experiment 20000533 PARAMETER Experiment Name: Zm_0.001percent_MeJA_P Parameter: Tissue Value: Aerial
  misc_feature: MA Experiment 20000533 PARAMETER Experiment Name: Zm_0.001percent_MeJA_P Parameter: Treatment Value: 0.001percent MeJA vs. No Treatment
  misc_feature: MA Experiment ID: 20000535 Result: Up-regulated in Transcription
  misc_feature: MA Experiment 20000535 PARAMETER Experiment Name: Zm_Hybrid_Seed_Dev_P Parameter: DAP Value: 30 vs. 12
  misc_feature: MA Experiment 20000535 PARAMETER Experiment Name: Zm_Hybrid_Seed_Dev_P Parameter: Organism Value: Zea mays
  misc_feature: MA Experiment 20000535 PARAMETER Experiment Name: Zm_Hybrid_Seed_Dev_P Parameter: Plant Line Value: 35A19
  misc_feature: MA Experiment 20000535 PARAMETER Experiment Name: Zm_Hybrid_Seed_Dev_P Parameter: Tissue Value: Embryo vs. Unfert Floret
aacacaagaagaaactgacggaggagcggagcggagccgagccacggccagtgccaggagcgaaaataaaaaggggtaggagttcctcctccccaacctcacaagtaaagcagcagcagcagaccttcttgacctagcaagcaatggggccgccgttcctcgccgtcgccgtcatcgtcgccttcctggccgccgccgcgcaggccgccgaccccttcgccttcttcgactgggacgtctcctacatcaccgcctcccctctcggcgtcccgcagcaggtcattgcagtcaacaagcagttcccaggccctatcatgaacgtcactaccaactacaatgtggtcgtcaatgtgctcaacagcttagacgagcccctgctcatcacttgggatgggatccagcagcgcaagaattgctggcaggatggggttctcggcaccacctgccccataccgccaggttggaactggacctacaacttccaggtcaaggaccagattggcagcttcttctacttcccaccccttggtatgcagcgtgccgcgggggggttcggaggtatcactgtcaacaaccgcgcggtcatctcggtcccattcgacacgcccgatggggacatcacgctcttcatcggggactggtacaagatgaaccacacgcacctgaggaagatgctcgacgacggcaaggaactggggatgccagacggtgttttgatgaatggcaaggggccatataggtataatgactcgctagtgccagatggcattgagcacgagactatcaaagttgagccaggaaaaacataccgtttccgtgtccacaatgttggtgtctccacaagcttgaacttacggattcagaatcacaacatggcccttgttgaaacagaaggttcatacacgatgaagcagaattttactaatctcgacatccacgtgggccagtcttactcatttctggtcactatggatcagaacgcaagcagtgattattacatcgtggccagtgctaggtttgtgaacgaatcgctttggaccagagtcaccggtgttgcaattttgcaatattcaaattcaaagggaaaagcatctggtcctcttcctgatccaccaaatgatgagtatgacaaaactttttcaatgaaccaggcacgttccatcaggatgaacgtgagcactggtgctgctcgtccgaatcctcaaggatcatttcactatgggtctatcaatgtgagccaagtttacaagctgaggaatgaaccacctgttatcatcaatgggaagaaacggactacactgagtggtatctcttattccccacccgacactcctctaaggttggcagatctgtacgacaagaaggatgtctacacacttgacttccctacaatgccaattgatggaccgccagtgatcagaacatctgtcattaactccacatacaagaactttttggaaattgtatttcagaacaatgactcaactgtccagacctaccacattgatggatatgcattctgggttgtaggaatggactatggcgagtggactgagaatagccgtgggacttacaacaagtgggatggtgtttctcgttgcacgactcangtgtttccgggagcatggactgctgtgatgctgtcacttgacagcccaggattttggaatgtacggacagaaaacctggacacgtggtatctgggtcaggagacttacatcagggtggtggatccaaatggaggctataatgttactgagatggtggctccagacaacatgctctactgtggcctcctcaaggataaacagaaggctcagaagcctcatggttcgaggtcatcagcctctgcagcaaaactgaactatcatgtgctcgcggctttggtctctttggtggtagccttggtgttgggccattgacaagaactgcctccagcttgtggtcagctgctgtttgcaggttgattaggcgtttgacagaaatactgttagtaggtcagtcgaattcgtaggttccattcatgatttgtctggcaattgagaaaaaaaaatgctgtgccattgcgcatcttcgtccatcggaattgattaacatgctgaagaactgtgcagtt

SEQ ID NO: 18261 - protein, 592 aa, Zea mays subsp. mays
  peptide (1)..(592): Ceres Seq. ID no. 13566659
  misc_feature (21)..(592): Homolog of NCBI NO: 15234551 NR Description: pectinesterase (pectin methylesterase) family
  misc_feature (7)..(589): Homolog of NCBI NO: 27817921 NR Description: putative pectinesterase [Oryza sativa (japonica
  misc_feature (7)..(588): Homolog of NCBI NO: 34897712 NR Description: ESTs AU082304(C61278),C93463(C50982) correspond a region of the predicted gene.~Similar to Arabidopsis thaliana chromosome 4, BAC clone F24A6, Pollen-specific protein precursor
  misc_feature (490)..(557): Homolog of NCBI NO: 34893990 NR Description: putative pollen-specific protein homolog
  misc_feature (8)..(490): Homolog of NCBI NO: 34893990 NR Description: putative pollen-specific protein homolog
  misc_feature (13)..(557): Homolog of NCBI NO: 7433000 NR Description: pollen-specific protein homolog F24A6.80 -
  misc_feature (5)..(588): Homolog of NCBI NO: 15242108 NR Description: pectinesterase (pectin methylesterase) family
  misc_feature (13)..(589): Homolog of NCBI NO: 22328918 NR Description: pectinesterase (pectin methylesterase) family
  misc_feature (326)..(590): Homolog of NCBI NO: 37535902 NR Description: putative ascorbate oxidase
  misc_feature (1)..(341): Homolog of NCBI NO: 37535902 NR Description: putative ascorbate oxidase
  misc_feature (490)..(557): Homolog of NCBI NO: 34893990 NR Description: putative pollen-specific protein homolog
  misc_feature (8)..(490): Homolog of NCBI NO: 34893990 NR Description: putative pollen-specific protein homolog
  misc_feature (13)..(557): Homolog of NCBI NO: 7433000 NR Description: pollen-specific protein homolog F24A6.80 -
  misc_feature (5)..(588): Homolog of NCBI NO: 15242108 NR Description: pectinesterase (pectin methylesterase) family
  misc_feature (13)..(589): Homolog of NCBI NO: 22328918 NR Description: pectinesterase (pectin methylesterase) family
  misc_feature (326)..(590): Homolog of NCBI NO: 37535902 NR Description: putative ascorbate oxidase
  misc_feature (1)..(341): Homolog of NCBI NO: 37535902 NR Description: putative ascorbate oxidase
  misc_feature (21)..(592): Homolog of NCBI NO: 15234551 NR Description: pectinesterase (pectin methylesterase) family
  misc_feature (7)..(589): Homolog of NCBI NO: 27817921 NR Description: putative pectinesterase [Oryza sativa (japonica
  misc_feature (7)..(588): Homolog of NCBI NO: 34897712 NR Description: ESTs AU082304(C61278),C93463(C50982) correspond a region of the predicted gene.~Similar to Arabidopsis thaliana chromosome 4, BAC clone F24A6, Pollen-specific protein precursor
  misc_feature (490)..(557): Homolog of NCBI NO: 34893990 NR Description: putative pollen-specific protein homolog
  misc_feature (8)..(490): Homolog of NCBI NO: 34893990 NR Description: putative pollen-specific protein homolog
  misc_feature (13)..(557): Homolog of NCBI NO: 7433000 NR Description: pollen-specific protein homolog F24A6.80 -
  misc_feature (5)..(588): Homolog of NCBI NO: 15242108 NR Description: pectinesterase (pectin methylesterase) family
  misc_feature (13)..(589): Homolog of NCBI NO: 22328918 NR Description: pectinesterase (pectin methylesterase) family
  misc_feature (326)..(590): Homolog of NCBI NO: 37535902 NR Description: putative ascorbate oxidase
  misc_feature (1)..(341): Homolog of NCBI NO: 37535902 NR Description: putative ascorbate oxidase
  misc_feature (21)..(592): Homolog of NCBI NO: 15234551 NR Description: pectinesterase (pectin methylesterase) family
  misc_feature (7)..(589): Homolog of NCBI NO: 27817921 NR Description: putative pectinesterase [Oryza sativa (japonica
  misc_feature (7)..(588): Homolog of NCBI NO: 34897712 NR Description: ESTs AU082304(C61278),C93463(C50982) correspond a region of the predicted gene.~Similar to Arabidopsis thaliana chromosome 4, BAC clone F24A6, Pollen-specific protein precursor
  misc_feature (489)..(489): Xaa is any aa, unknown or other
MGPPFLAVAVIVAFLAAAAQAADPFAFFDWDVSYITASPLGVPQQVIAVNKQFPGPIMNVTTNYNVVVNVLNSLDEPLLITWDGIQQRKNCWQDGVLGTTCPIPPGWNWTYNFQVKDQIGSFFYFPPLGMQRAAGGFGGITVNNRAVISVPFDTPDGDITLFIGDWYKMNHTHLRKMLDDGKELGMPDGVLMNGKGPYRYNDSLVPDGIEHETIKVEPGKTYRFRVHNVGVSTSLNLRIQNHNMALVETEGSYTMKQNFTNLDIHVGQSYSFLVTMDQNASSDYYIVASARFVNESLWTRVTGVAILQYSNSKGKASGPLPDPPNDEYDKTFSMNQARSIRMNVSTGAARPNPQGSFHYGSINVSQVYKLRNEPPVIINGKKRTTLSGISYSPPDTPLRLADLYDKKDVYTLDFPTMPIDGPPVIRTSVINSTYKNFLEIVFQNNDSTVQTYHIDGYAFWVVGMDYGEWTENSRGTYNKWDGVSRCTTXVFPGAWTAVMLSLDSPGFWNVRTENLDTWYLGQETYIRVVDPNGGYNVTEMVAPDNMLYCGLLKDKQKAQKPHGSRSSASAAKLNYHVLAALVSLVVALVLGH

SEQ ID NO: 18262 - protein, 535 aa, Zea mays subsp. mays
  peptide (1)..(535): Ceres Seq. ID no. 13566660
  misc_feature (433)..(500): Homolog of NCBI NO: 34893990 NR Description: putative pollen-specific protein homolog
  misc_feature (1)..(433): Homolog of NCBI NO: 34893990 NR Description: putative pollen-specific protein homolog
  misc_feature (1)..(500): Homolog of NCBI NO: 7433000 NR Description: pollen-specific protein homolog F24A6.80 -
  misc_feature (1)..(531): Homolog of NCBI NO: 15242108 NR Description: pectinesterase (pectin methylesterase) family
  misc_feature (1)..(532): Homolog of NCBI NO: 22328918 NR Description: pectinesterase (pectin methylesterase) family
  misc_feature (269)..(533): Homolog of NCBI NO: 37535902 NR Description: putative ascorbate oxidase
  misc_feature (1)..(284): Homolog of NCBI NO: 37535902 NR Description: putative ascorbate oxidase
  misc_feature (1)..(535): Homolog of NCBI NO: 15234551 NR Description: pectinesterase (pectin methylesterase) family
  misc_feature (1)..(532): Homolog of NCBI NO: 27817921 NR Description: putative pectinesterase [Oryza sativa (japonica
  misc_feature (1)..(531): Homolog of NCBI NO: 34897712 NR Description: ESTs AU082304(C61278),C93463(C50982) correspond a region of the predicted gene.~Similar to Arabidopsis thaliana chromosome 4, BAC clone F24A6, Pollen-specific protein precursor
  misc_feature (433)..(500): Homolog of NCBI NO: 34893990 NR Description: putative pollen-specific protein homolog
  misc_feature (1)..(433): Homolog of NCBI NO: 34893990 NR Description: putative pollen-specific protein homolog
  misc_feature (1)..(500): Homolog of NCBI NO: 7433000 NR Description: pollen-specific protein homolog F24A6.80 -
  misc_feature (1)..(531): Homolog of NCBI NO: 15242108 NR Description: pectinesterase (pectin methylesterase) family
  misc_feature (1)..(532): Homolog of NCBI NO: 22328918 NR Description: pectinesterase (pectin methylesterase) family
  misc_feature (269)..(533): Homolog of NCBI NO: 37535902 NR Description: putative ascorbate oxidase
  misc_feature (1)..(284): Homolog of NCBI NO: 37535902 NR Description: putative ascorbate oxidase
  misc_feature (1)..(535): Homolog of NCBI NO: 15234551 NR Description: pectinesterase (pectin methylesterase) family
  misc_feature (1)..(532): Homolog of NCBI NO: 27817921 NR Description: putative pectinesterase [Oryza sativa (japonica
  misc_feature (1)..(531): Homolog of NCBI NO: 34897712 NR Description: ESTs AU082304(C61278),C93463(C50982) correspond a region of the predicted gene.~Similar to Arabidopsis thaliana chromosome 4, BAC clone F24A6, Pollen-specific protein precursor
  misc_feature (1)..(531): Homolog of NCBI NO: 34897712 NR Description: ESTs AU082304(C61278),C93463(C50982) correspond a region of the predicted gene.~Similar to Arabidopsis thaliana chromosome 4, BAC clone F24A6, Pollen-specific protein precursor
  misc_feature (433)..(500): Homolog of NCBI NO: 34893990 NR Description: putative pollen-specific protein homolog
  misc_feature (1)..(433): Homolog of NCBI NO: 34893990 NR Description: putative pollen-specific protein homolog
  misc_feature (1)..(500): Homolog of NCBI NO: 7433000 NR Description: pollen-specific protein homolog F24A6.80 -
  misc_feature (1)..(531): Homolog of NCBI NO: 15242108 NR Description: pectinesterase (pectin methylesterase) family
  misc_feature (1)..(532): Homolog of NCBI NO: 22328918 NR Description: pectinesterase (pectin methylesterase) family
  misc_feature (269)..(533): Homolog of NCBI NO: 37535902 NR Description: putative ascorbate oxidase
  misc_feature (1)..(284): Homolog of NCBI NO: 37535902 NR Description: putative ascorbate oxidase
  misc_feature (1)..(535): Homolog of NCBI NO: 15234551 NR Description: pectinesterase (pectin methylesterase) family
  misc_feature (1)..(532): Homolog of NCBI NO: 27817921 NR Description: putative pectinesterase [Oryza sativa (japonica
  misc_feature (432)..(432): Xaa is any aa, unknown or other
MNVTTNYNVVVNVLNSLDEPLLITWDGIQQRKNCWQDGVLGTTCPIPPGWNWTYNFQVKDQIGSFFYFPPLGMQRAAGGFGGITVNNRAVISVPFDTPDGDITLFIGDWYKMNHTHLRKMLDDGKELGMPDGVLMNGKGPYRYNDSLVPDGIEHETIKVEPGKTYRFRVHNVGVSTSLNLRIQNHNMALVETEGSYTMKQNFTNLDIHVGQSYSFLVTMDQNASSDYYIVASARFVNESLWTRVTGVAILQYSNSKGKASGPLPDPPNDEYDKTFSMNQARSIRMNVSTGAARPNPQGSFHYGSINVSQVYKLRNEPPVIINGKKRTTLSGISYSPPDTPLRLADLYDKKDVYTLDFPTMPIDGPPVIRTSVINSTYKNFLEIVFQNNDSTVQTYHIDGYAFWVVGMDYGEWTENSRGTYNKWDGVSRCTTXVFPGAWTAVMLSLDSPGFWNVRTENLDTWYLGQETYIRVVDPNGGYNVTEMVAPDNMLYCGLLKDKQKAQKPHGSRSSASAAKLNYHVLAALVSLVVALVLGH

SEQ ID NO: 18263 - protein, 463 aa, Zea mays subsp. mays
  peptide (1)..(463): Ceres Seq. ID no. 13566661
  misc_feature (361)..(428): Homolog of NCBI NO: 34893990 NR Description: putative pollen-specific protein homolog
  misc_feature (1)..(361): Homolog of NCBI NO: 34893990 NR Description: putative pollen-specific protein homolog
  misc_feature (1)..(428): Homolog of NCBI NO: 7433000 NR Description: pollen-specific protein homolog F24A6.80 -
  misc_feature (1)..(459): Homolog of NCBI NO: 15242108 NR Description: pectinesterase (pectin methylesterase) family
  misc_feature (1)..(460): Homolog of NCBI NO: 22328918 NR Description: pectinesterase (pectin methylesterase) family
  misc_feature (197)..(461): Homolog of NCBI NO: 37535902 NR Description: putative ascorbate oxidase
  misc_feature (1)..(212): Homolog of NCBI NO: 37535902 NR Description: putative ascorbate oxidase
  misc_feature (1)..(463): Homolog of NCBI NO: 15234551 NR Description: pectinesterase (pectin methylesterase) family
  misc_feature (1)..(460): Homolog of NCBI NO: 27817921 NR Description: putative pectinesterase [Oryza sativa (japonica
  misc_feature (1)..(459): Homolog of NCBI NO: 34897712 NR Description: ESTs AU082304(C61278),C93463(C50982) correspond a region of the predicted gene.~Similar to Arabidopsis thaliana chromosome 4, BAC clone F24A6, Pollen-specific protein precursor
  misc_feature (361)..(428): Homolog of NCBI NO: 34893990 NR Description: putative pollen-specific protein homolog
  misc_feature (1)..(361): Homolog of NCBI NO: 34893990 NR Description: putative pollen-specific protein homolog
  misc_feature (1)..(428): Homolog of NCBI NO: 7433000 NR Description: pollen-specific protein homolog F24A6.80 -
  misc_feature (1)..(459): Homolog of NCBI NO: 15242108 NR Description: pectinesterase (pectin methylesterase) family
  misc_feature (1)..(460): Homolog of NCBI NO: 22328918 NR Description: pectinesterase (pectin methylesterase) family
  misc_feature (197)..(461): Homolog of NCBI NO: 37535902 NR Description: putative ascorbate oxidase
  misc_feature (1)..(212): Homolog of NCBI NO: 37535902 NR Description: putative ascorbate oxidase
  misc_feature (1)..(463): Homolog of NCBI NO: 15234551 NR Description: pectinesterase (pectin methylesterase) family
  misc_feature (1)..(460): Homolog of NCBI NO: 27817921 NR Description: putative pectinesterase [Oryza sativa (japonica
  misc_feature (1)..(459): Homolog of NCBI NO: 34897712 NR Description: ESTs AU082304(C61278),C93463(C50982) correspond a region of the predicted gene.~Similar to Arabidopsis thaliana chromosome 4, BAC clone F24A6, Pollen-specific protein precursor
  misc_feature (361)..(428): Homolog of NCBI NO: 34893990 NR Description: putative pollen-specific protein homolog
  misc_feature (1)..(361): Homolog of NCBI NO: 34893990 NR Description: putative pollen-specific protein homolog
  misc_feature (1)..(428): Homolog of NCBI NO: 7433000 NR Description: pollen-specific protein homolog F24A6.80 -
  misc_feature (1)..(459): Homolog of NCBI NO: 15242108 NR Description: pectinesterase (pectin methylesterase) family
  misc_feature (1)..(460): Homolog of NCBI NO: 22328918 NR Description: pectinesterase (pectin methylesterase) family
  misc_feature (197)..(461): Homolog of NCBI NO: 37535902 NR Description: putative ascorbate oxidase
  misc_feature (1)..(212): Homolog of NCBI NO: 37535902 NR Description: putative ascorbate oxidase
  misc_feature (1)..(463): Homolog of NCBI NO: 15234551 NR Description: pectinesterase (pectin methylesterase) family
  misc_feature (1)..(460): Homolog of NCBI NO: 27817921 NR Description: putative pectinesterase [Oryza sativa (japonica
  misc_feature (1)..(459): Homolog of NCBI NO: 34897712 NR Description: ESTs AU082304(C61278),C93463(C50982) correspond a region of the predicted gene.~Similar to Arabidopsis thaliana chromosome 4, BAC clone F24A6, Pollen-specific protein precursor
  misc_feature (360)..(360): Xaa is any aa, unknown or other
MQRAAGGFGGITVNNRAVISVPFDTPDGDITLFIGDWYKMNHTHLRKMLDDGKELGMPDGVLMNGKGPYRYNDSLVPDGIEHETIKVEPGKTYRFRVHNVGVSTSLNLRIQNHNMALVETEGSYTMKQNFTNLDIHVGQSYSFLVTMDQNASSDYYIVASARFVNESLWTRVTGVAILQYSNSKGKASGPLPDPPNDEYDKTFSMNQARSIRMNVSTGAARPNPQGSFHYGSINVSQVYKLRNEPPVIINGKKRTTLSGISYSPPDTPLRLADLYDKKDVYTLDFPTMPIDGPPVIRTSVINSTYKNFLEIVFQNNDSTVQTYHIDGYAFWVVGMDYGEWTENSRGTYNKWDGVSRCTTXVFPGAWTAVMLSLDSPGFWNVRTENLDTWYLGQETYIRVVDPNGGYNVTEMVAPDNMLYCGLLKDKQKAQKPHGSRSSASAAKLNYHVLAALVSLVVALVLGH

SEQ ID NO: 18264 - DNA, 1403 bp, Zea mays subsp. mays
  misc_feature (1)..(1403): Ceres Seq. ID no. 12363423
  misc_feature: MA Experiment ID: 108559 Result: Down-regulated in Transcription
  misc_feature: MA Experiment 108559 PARAMETER Experiment Name: Zm_5mM_NO_P Parameter: Age (day) Value: 8
  misc_feature: MA Experiment 108559 PARAMETER Experiment Name: Zm_5mM_NO_P Parameter: Organism Value: Zea mays
  misc_feature: MA Experiment 108559 PARAMETER Experiment Name: Zm_5mM_NO_P Parameter: Plant Line Value: 35A19
  misc_feature: MA Experiment 108559 PARAMETER Experiment Name: Zm_5mM_NO_P Parameter: Timepoint (hr) Value: 12
  misc_feature: MA Experiment 108559 PARAMETER Experiment Name: Zm_5mM_NO_P Parameter: Tissue Value: Aerial
  misc_feature: MA Experiment 108559 PARAMETER Experiment Name: Zm_5mM_NO_P Parameter: Treatment Value: 5mM NO vs. No Treatment
  misc_feature: MA Experiment ID: 20000477 Result: Down-regulated in Transcription
  misc_feature: MA Experiment 20000477 PARAMETER Experiment Name: Zm_5mM_SA_P Parameter: Age (day) Value: 10
  misc_feature: MA Experiment 20000477 PARAMETER Experiment Name: Zm_5mM_SA_P Parameter: Organism Value: Zea mays
  misc_feature: MA Experiment 20000477 PARAMETER Experiment Name: Zm_5mM_SA_P Parameter: Plant Line Value: 35A19
  misc_feature: MA Experiment 20000477 PARAMETER Experiment Name: Zm_5mM_SA_P Parameter: Timepoint (hr) Value: 48
  misc_feature: MA Experiment 20000477 PARAMETER Experiment Name: Zm_5mM_SA_P Parameter: Tissue Value: Aerial
  misc_feature: MA Experiment 20000477 PARAMETER Experiment Name: Zm_5mM_SA_P Parameter: Treatment Value: 5mM SA vs. No Treatment
  misc_feature: MA Experiment ID: 20000478 Result: Down-regulated in Transcription
  misc_feature: MA Experiment 20000478 PARAMETER Experiment Name: Zm_5mM_SA_P Parameter: Age (day) Value: 11
  misc_feature: MA Experiment 20000478 PARAMETER Experiment Name: Zm_5mM_SA_P Parameter: Organism Value: Zea mays
  misc_feature: MA Experiment 20000478 PARAMETER Experiment Name: Zm_5mM_SA_P Parameter: Plant Line Value: 35A19
  misc_feature: MA Experiment 20000478 PARAMETER Experiment Name: Zm_5mM_SA_P Parameter: Timepoint (hr) Value: 72
  misc_feature: MA Experiment 20000478 PARAMETER Experiment Name: Zm_5mM_SA_P Parameter: Tissue Value: Aerial
  misc_feature: MA Experiment 20000478 PARAMETER Experiment Name: Zm_5mM_SA_P Parameter: Treatment Value: 5mM SA vs. No Treatment
  misc_feature: MA Experiment ID: 20000479 Result: Down-regulated in Transcription
  misc_feature: MA Experiment 20000479 PARAMETER Experiment Name: Zm_Drought_P Parameter: Age (day) Value: 10
  misc_feature: MA Experiment 20000479 PARAMETER Experiment Name: Zm_Drought_P Parameter: Organism Value: Zea mays
  misc_feature: MA Experiment 20000479 PARAMETER Experiment Name: Zm_Drought_P Parameter: Plant Line Value: 35A19
  misc_feature: MA Experiment 20000479 PARAMETER Experiment Name: Zm_Drought_P Parameter: Timepoint (hr) Value: 48
  misc_feature: MA Experiment 20000479 PARAMETER Experiment Name: Zm_Drought_P Parameter: Tissue Value: Aerial
  misc_feature: MA Experiment 20000479 PARAMETER Experiment Name: Zm_Drought_P Parameter: Treatment Value: Drought vs. No Drought
  misc_feature: MA Experiment ID: 20000480 Result: Down-regulated in Transcription
  misc_feature: MA Experiment 20000480 PARAMETER Experiment Name: Zm_Drought_P Parameter: Age (day) Value: 11
  misc_feature: MA Experiment 20000480 PARAMETER Experiment Name: Zm_Drought_P Parameter: Organism Value: Zea mays
  misc_feature: MA Experiment 20000480 PARAMETER Experiment Name: Zm_Drought_P Parameter: Plant Line Value: 35A19
  misc_feature: MA Experiment 20000480 PARAMETER Experiment Name: Zm_Drought_P Parameter: Timepoint (hr) Value: 72
  misc_feature: MA Experiment 20000480 PARAMETER Experiment Name: Zm_Drought_P Parameter: Tissue Value: Aerial
  misc_feature: MA Experiment 20000480 PARAMETER Experiment Name: Zm_Drought_P Parameter: Treatment Value: Drought vs. No Drought
  misc_feature: MA Experiment ID: 20000487 Result: Down-regulated in Transcription
  misc_feature: MA Experiment 20000487 PARAMETER Experiment Name: Zm_50mM_NH4NO3_L_to_H_P Parameter: Organism Value: Zea mays
  misc_feature: MA Experiment 20000487 PARAMETER Experiment Name: Zm_50mM_NH4NO3_L_to_H_P Parameter: Timepoint (hr) Value: 4
  misc_feature: MA Experiment 20000487 PARAMETER Experiment Name: Zm_50mM_NH4NO3_L_to_H_P Parameter: Tissue Value: Leaves
  misc_feature: MA Experiment 20000487 PARAMETER Experiment Name: Zm_50mM_NH4NO3_L_to_H_P Parameter: Treatment Value: 50mM NH4NO3 vs. 100mM Mannitol
  misc_feature: MA Experiment ID: 20000535 Result: Up-regulated in Transcription
  misc_feature: MA Experiment 20000535 PARAMETER Experiment Name: Zm_Hybrid_Seed_Dev_P Parameter: DAP Value: 30 vs. 12
  misc_feature: MA Experiment 20000535 PARAMETER Experiment Name: Zm_Hybrid_Seed_Dev_P Parameter: Organism Value: Zea mays
  misc_feature: MA Experiment 20000535 PARAMETER Experiment Name: Zm_Hybrid_Seed_Dev_P Parameter: Plant Line Value: 35A19
  misc_feature: MA Experiment 20000535 PARAMETER Experiment Name: Zm_Hybrid_Seed_Dev_P Parameter: Tissue Value: Embryo vs. Unfert Floret
gcacgagaccattacctagaacatcctaatcgaaaaatacatacccaccggccggcgtcacagacacgcgagcagagcacagacacagagcacacagcacagaggcagccaccaccacaggcactcacccgcaccgctcggtcaccgaggagtggaggagctttgcagtcgcagcagcagcagtacagtgtgtgagtgtgaagggactagagcagggcacacagcgcaggccgcatgggcgaggcggaggtggagaagcccaaggaggcggcagaggaggagaagaagaaggaagacaagcccatggacgccacggcggcggcggaggacaagcccaaggacgccgcggcggcggaggacaagcccaaggacggggaggagaagaaggacgacgcgccccctcccccgccgccgccgccgcctgaggaggtcgagatgcgggtctacatgcactgcgagggatgcgcccgcaaggtcaagaagatcctcaagcgcttcgacggagtggaggacgtggtcgccgactccaagtcgcacaaggtggtggtgaaggggaagaaggcggccgccgaccccatgagggtggtggagcgcgtgcagaagaagaccggccgcaaggtggagttgctgtcgccgatcccgccgccaacgccgccggaggagaagaaggcagaggaggagcccgagccgccaaagccggaggagaagaaggagccgccggtgatcgccgtggtgctgaaggtgcacatgcactgcgaggcctgcgcccaggggatcaggaagaggatcctcaagatgaaaggcgtgcaatctgcagagccagacctcaaggcgtcggaggtggcagtgaagggcgtgttcgaggagtccaagctggcggagtacgtgtacaagcgcaccggcaagcacgcggccgtcgtcaagtccgagccggtcccggcgccaccgccggagagcggcgccggcgacaacacgggggccaaggaggaggagaaggggcaggaggaggagaaggagaaggaaggaggaggcgatgncggtggcgaggagaagaagaaggaagggggcaaggaggaagagaagaaggacggcgagaagcaggaggaggagaaggagnncgncggtggcggcgagaaggtggaggaaaaggagggagataaagacgctgccgctgccgccgccgccagcatgtacatgcactacccgaggttcccgttcccgggaggctactacgcgccgcctccggggtacgtctaccagccggtgtacccggcgccggcgtacgcggcgtacgcgccgccgcaccaccagcccatggcgccgcagatcttcagcgacgagaaccccaacgcatgctccgtcatgtaactaaaaaacagaaggagccttggcgagagaggggg

SEQ ID NO: 18265 - protein, 377 aa, Zea mays subsp. mays
  peptide (1)..(377): Ceres Seq. ID no. 12363424
  misc_feature (1)..(67): Pfam Name: MARCKS family Pfam Description: MARCKS family
  misc_feature (40)..(307): Homolog of NCBI NO: 34394290 NR Description: putative heavy-metal-associated domain-containing
  misc_feature (1)..(287): Homolog of NCBI NO: 21594005 NR Description: unknown [Arabidopsis thaliana]
  misc_feature (10)..(309): Homolog of NCBI NO: 21594005 NR Description: unknown [Arabidopsis thaliana]
  misc_feature (10)..(309): Homolog of NCBI NO: 18420811 NR Description: expressed protein
  misc_feature (1)..(172): Homolog of NCBI NO: 24417342 NR Description: unknown [Arabidopsis thaliana]
  misc_feature (41)..(275): Homolog of NCBI NO: 37532382 NR Description: putative ATFP3 [Oryza sativa (japonica
  misc_feature (54)..(343): Homolog of NCBI NO: 4097547 NR Description: ATFP3 [Arabidopsis thaliana]
  misc_feature (5)..(339): Homolog of NCBI NO: 9758294 NR Description: contains similarity to ATFP3~gene_id:MLE2.16
  misc_feature (1)..(339): Homolog of NCBI NO: 18424719 NR Description: copper chaperone (CCH)-related
  misc_feature (1)..(377): Homolog of NCBI NO: 38344582 NR Description: OSJNBa0053B21.14 [Oryza sativa (japonica
  misc_feature (268)..(268): Xaa is any aa, unknown or other
  misc_feature (295)..(295): Xaa is any aa, unknown or other
  misc_feature (296)..(296): Xaa is any aa, unknown or other
MGEAEVEKPKEAAEEEKKKEDKPMDATAAAEDKPKDAAAAEDKPKDGEEKKDDAPPPPPPPPPEEVEMRVYMHCEGCARKVKKILKRFDGVEDVVADSKSHKVVVKGKKAAADPMRVVERVQKKTGRKVELLSPIPPPTPPEEKKAEEEPEPPKPEEKKEPPVIAVVLKVHMHCEACAQGIRKRILKMKGVQSAEPDLKASEVAVKGVFEESKLAEYVYKRTGKHAAVVKSEPVPAPPPESGAGDNTGAKEEEKGQEEEKEKEGGGDXGGEEKKKEGGKEEEKKDGEKQEEEKEXXGGGEKVEEKEGDKDAAAAAAASMYMHYPRFPFPGGYYAPPPGYVYQPVYPAPAYAAYAPPHHQPMAPQIFSDENPNACSVM

SEQ ID NO: 18266 - protein, 354 aa, Zea mays subsp. mays
  peptide (1)..(354): Ceres Seq. ID no. 12363425
  misc_feature (1)..(286): Pfam Name: Caldesmon Pfam Description: Caldesmon
  misc_feature (17)..(284): Homolog of NCBI NO: 34394290 NR Description: putative heavy-metal-associated domain-containing
  misc_feature (1)..(264): Homolog of NCBI NO: 21594005 NR Description: unknown [Arabidopsis thaliana]
  misc_feature (1)..(286): Homolog of NCBI NO: 21594005 NR Description: unknown [Arabidopsis thaliana]
  misc_feature (1)..(286): Homolog of NCBI NO: 18420811 NR Description: expressed protein
  misc_feature (1)..(149): Homolog of NCBI NO: 24417342 NR Description: unknown [Arabidopsis thaliana]
  misc_feature (18)..(252): Homolog of NCBI NO: 37532382 NR Description: putative ATFP3 [Oryza sativa (japonica
  misc_feature (31)..(320): Homolog of NCBI NO: 4097547 NR Description: ATFP3 [Arabidopsis thaliana]
  misc_feature (1)..(316): Homolog of NCBI NO: 9758294 NR Description: contains similarity to ATFP3~gene_id:MLE2.16
  misc_feature (1)..(316): Homolog of NCBI NO: 18424719 NR Description: copper chaperone (CCH)-related
  misc_feature (1)..(354): Homolog of NCBI NO: 38344582 NR Description: OSJNBa0053B21.14 [Oryza sativa (japonica
  misc_feature (245)..(245): Xaa is any aa, unknown or other
  misc_feature (272)..(272): Xaa is any aa, unknown or other
  misc_feature (273)..(273): Xaa is any aa, unknown or other
MDATAAAEDKPKDAAAAEDKPKDGEEKKDDAPPPPPPPPPEEVEMRVYMHCEGCARKVKKILKRFDGVEDVVADSKSHKVVVKGKKAAADPMRVVERVQKKTGRKVELLSPIPPPTPPEEKKAEEEPEPPKPEEKKEPPVIAVVLKVHMHCEACAQGIRKRILKMKGVQSAEPDLKASEVAVKGVFEESKLAEYVYKRTGKHAAVVKSEPVPAPPPESGAGDNTGAKEEEKGQEEEKEKEGGGDXGGEEKKKEGGKEEEKKDGEKQEEEKEXXGGGEKVEEKEGDKDAAAAAAASMYMHYPRFPFPGGYYAPPPGYVYQPVYPAPAYAAYAPPHHQPMAPQIFSDENPNACSVM

SEQ ID NO: 18267 - protein, 310 aa, Zea mays subsp. mays
  peptide (1)..(310): Ceres Seq. ID no. 12363426
  misc_feature (1)..(242): Pfam Name: Caldesmon Pfam Description: Caldesmon
  misc_feature (1)..(240): Homolog of NCBI NO: 34394290 NR Description: putative heavy-metal-associated domain-containing
  misc_feature (1)..(220): Homolog of NCBI NO: 21594005 NR Description: unknown [Arabidopsis thaliana]
  misc_feature (1)..(242): Homolog of NCBI NO: 21594005 NR Description: unknown [Arabidopsis thaliana]
  misc_feature (1)..(242): Homolog of NCBI NO: 18420811 NR Description: expressed protein
  misc_feature (1)..(105): Homolog of NCBI NO: 24417342 NR Description: unknown [Arabidopsis thaliana]
  misc_feature (1)..(208): Homolog of NCBI NO: 37532382 NR Description: putative ATFP3 [Oryza sativa (japonica
  misc_feature (1)..(276): Homolog of NCBI NO: 4097547 NR Description: ATFP3 [Arabidopsis thaliana]
  misc_feature (1)..(272): Homolog of NCBI NO: 9758294 NR Description: contains similarity to ATFP3~gene_id:MLE2.16
  misc_feature (1)..(272): Homolog of NCBI NO: 18424719 NR Description: copper chaperone (CCH)-related
  misc_feature (1)..(310): Homolog of NCBI NO: 38344582 NR Description: OSJNBa0053B21.14 [Oryza sativa (japonica
  misc_feature (201)..(201): Xaa is any aa, unknown or other
  misc_feature (228)..(228): Xaa is any aa, unknown or other
  misc_feature (229)..(229): Xaa is any aa, unknown or other
MRVYMHCEGCARKVKKILKRFDGVEDVVADSKSHKVVVKGKKAAADPMRVVERVQKKTGRKVELLSPIPPPTPPEEKKAEEEPEPPKPEEKKEPPVIAVVLKVHMHCEACAQGIRKRILKMKGVQSAEPDLKASEVAVKGVFEESKLAEYVYKRTGKHAAVVKSEPVPAPPPESGAGDNTGAKEEEKGQEEEKEKEGGGDXGGEEKKKEGGKEEEKKDGEKQEEEKEXXGGGEKVEEKEGDKDAAAAAAASMYMHYPRFPFPGGYYAPPPGYVYQPVYPAPAYAAYAPPHHQPMAPQIFSDENPNACSVM

SEQ ID NO: 18268 - DNA, 1293 bp, Zea mays subsp. mays
  misc_feature (1)..(1293): Ceres Seq. ID no. 12425298
  misc_feature: MA Experiment ID: 108504 Result: Up-regulated in Transcription
  misc_feature: MA Experiment 108504 PARAMETER Experiment Name: Zm_Drought_P Parameter: Age (day) Value: 8
  misc_feature: MA Experiment 108504 PARAMETER Experiment Name: Zm_Drought_P Parameter: Organism Value: Zea mays
  misc_feature: MA Experiment 108504 PARAMETER Experiment Name: Zm_Drought_P Parameter: Plant Line Value: 35A19
  misc_feature: MA Experiment 108504 PARAMETER Experiment Name: Zm_Drought_P Parameter: Timepoint (hr) Value: 12
  misc_feature: MA Experiment 108504 PARAMETER Experiment Name: Zm_Drought_P Parameter: Tissue Value: Aerial
  misc_feature: MA Experiment 108504 PARAMETER Experiment Name: Zm_Drought_P Parameter: Treatment Value: Drought vs. No Drought
  misc_feature: MA Experiment ID: 108526 Result: Up-regulated in Transcription
  misc_feature: MA Experiment 108526 PARAMETER Experiment Name: Zm_5mM_NO_P Parameter: Age (day) Value: 8
  misc_feature: MA Experiment 108526 PARAMETER Experiment Name: Zm_5mM_NO_P Parameter: Organism Value: Zea mays
  misc_feature: MA Experiment 108526 PARAMETER Experiment Name: Zm_5mM_NO_P Parameter: Plant Line Value: 35A19
  misc_feature: MA Experiment 108526 PARAMETER Experiment Name: Zm_5mM_NO_P Parameter: Timepoint (hr) Value: 1
  misc_feature: MA Experiment 108526 PARAMETER Experiment Name: Zm_5mM_NO_P Parameter: Tissue Value: Aerial
  misc_feature: MA Experiment 108526 PARAMETER Experiment Name: Zm_5mM_NO_P Parameter: Treatment Value: 5mM NO vs. No Treatment
  misc_feature: MA Experiment ID: 108527 Result: Up-regulated in Transcription
  misc_feature: MA Experiment 108527 PARAMETER Experiment Name: Zm_5mM_NO_P Parameter: Age (day) Value: 8
  misc_feature: MA Experiment 108527 PARAMETER Experiment Name: Zm_5mM_NO_P Parameter: Organism Value: Zea mays
  misc_feature: MA Experiment 108527 PARAMETER Experiment Name: Zm_5mM_NO_P Parameter: Plant Line Value: 35A19
  misc_feature: MA Experiment 108527 PARAMETER Experiment Name: Zm_5mM_NO_P Parameter: Timepoint (hr) Value: 6
  misc_feature: MA Experiment 108527 PARAMETER Experiment Name: Zm_5mM_NO_P Parameter: Tissue Value: Aerial
  misc_feature: MA Experiment 108527 PARAMETER Experiment Name: Zm_5mM_NO_P Parameter: Treatment Value: 5mM NO vs. No Treatment
  misc_feature: MA Experiment ID: 108529 Result: Up-regulated in Transcription
  misc_feature: MA Experiment 108529 PARAMETER Experiment Name: Zm_Imbibed_Seeds_P Parameter: Age (day) Value: 5 vs. 2
  misc_feature: MA Experiment 108529 PARAMETER Experiment Name: Zm_Imbibed_Seeds_P Parameter: Organism Value: Zea mays
  misc_feature: MA Experiment 108529 PARAMETER Experiment Name: Zm_Imbibed_Seeds_P Parameter: Plant Line Value: 35A19
  misc_feature: MA Experiment 108529 PARAMETER Experiment Name: Zm_Imbibed_Seeds_P Parameter: Tissue Value: Roots vs. Embryo
  misc_feature: MA Experiment ID: 108535 Result: Down-regulated in Transcription
  misc_feature: MA Experiment 108535 PARAMETER Experiment Name: Zm_Meristem_P Parameter: Age (day) Value: 8
  misc_feature: MA Experiment 108535 PARAMETER Experiment Name: Zm_Meristem_P Parameter: Organism Value: Zea mays
  misc_feature: MA Experiment 108535 PARAMETER Experiment Name: Zm_Meristem_P Parameter: Plant Line Value: 35A19
  misc_feature: MA Experiment 108535 PARAMETER Experiment Name: Zm_Meristem_P Parameter: Tissue Value: Root Meristem vs. Above Root Meristem
  misc_feature: MA Experiment ID: 108540 Result: Up-regulated in Transcription
  misc_feature: MA Experiment 108540 PARAMETER Experiment Name: Zm_20percent_PEG_P Parameter: Age (day) Value: 8
  misc_feature: MA Experiment 108540 PARAMETER Experiment Name: Zm_20percent_PEG_P Parameter: Organism Value: Zea mays
  misc_feature: MA Experiment 108540 PARAMETER Experiment Name: Zm_20percent_PEG_P Parameter: Plant Line Value: 35A19
  misc_feature: MA Experiment 108540 PARAMETER Experiment Name: Zm_20percent_PEG_P Parameter: Timepoint (hr) Value: 6
  misc_feature: MA Experiment 108540 PARAMETER Experiment Name: Zm_20percent_PEG_P Parameter: Tissue Value: Aerial
  misc_feature: MA Experiment 108540 PARAMETER Experiment Name: Zm_20percent_PEG_P Parameter: Treatment Value: 20percent PEG vs. No Treatment
  misc_feature: MA Experiment ID: 108556 Result: Up-regulated in Transcription
  misc_feature: MA Experiment 108556 PARAMETER Experiment Name: Zm_Drought_P Parameter: Age (day) Value: 9
  misc_feature: MA Experiment 108556 PARAMETER Experiment Name: Zm_Drought_P Parameter: Organism Value: Zea mays
  misc_feature: MA Experiment 108556 PARAMETER Experiment Name: Zm_Drought_P Parameter: Plant Line Value: 35A19
  misc_feature: MA Experiment 108556 PARAMETER Experiment Name: Zm_Drought_P Parameter: Timepoint (hr) Value: 24
  misc_feature: MA Experiment 108556 PARAMETER Experiment Name: Zm_Drought_P Parameter: Tissue Value: Aerial
  misc_feature: MA Experiment 108556 PARAMETER Experiment Name: Zm_Drought_P Parameter: Treatment Value: Drought vs. No Drought
  misc_feature: MA Experiment ID: 108559 Result: Up-regulated in Transcription
  misc_feature: MA Experiment 108559 PARAMETER Experiment Name: Zm_5mM_NO_P Parameter: Age (day) Value: 8
  misc_feature: MA Experiment 108559 PARAMETER Experiment Name: Zm_5mM_NO_P Parameter: Organism Value: Zea mays
  misc_feature: MA Experiment 108559 PARAMETER Experiment Name: Zm_5mM_NO_P Parameter: Plant Line Value: 35A19
  misc_feature: MA Experiment 108559 PARAMETER Experiment Name: Zm_5mM_NO_P Parameter: Timepoint (hr) Value: 12
  misc_feature: MA Experiment 108559 PARAMETER Experiment Name: Zm_5mM_NO_P Parameter: Tissue Value: Aerial
  misc_feature: MA Experiment 108559 PARAMETER Experiment Name: Zm_5mM_NO_P Parameter: Treatment Value: 5mM NO vs. No Treatment
  misc_feature: MA Experiment ID: 20000477 Result: Up-regulated in Transcription
  misc_feature: MA Experiment 20000477 PARAMETER Experiment Name: Zm_5mM_SA_P Parameter: Age (day) Value: 10
  misc_feature: MA Experiment 20000477 PARAMETER Experiment Name: Zm_5mM_SA_P Parameter: Organism Value: Zea mays
  misc_feature: MA Experiment 20000477 PARAMETER Experiment Name: Zm_5mM_SA_P Parameter: Plant Line Value: 35A19
  misc_feature: MA Experiment 20000477 PARAMETER Experiment Name: Zm_5mM_SA_P Parameter: Timepoint (hr) Value: 48
  misc_feature: MA Experiment 20000477 PARAMETER Experiment Name: Zm_5mM_SA_P Parameter: Tissue Value: Aerial
  misc_feature: MA Experiment 20000477 PARAMETER Experiment Name: Zm_5mM_SA_P Parameter: Treatment Value: 5mM SA vs. No Treatment
  misc_feature: MA Experiment ID: 20000478 Result: Up-regulated in Transcription
  misc_feature: MA Experiment 20000478 PARAMETER Experiment Name: Zm_5mM_SA_P Parameter: Age (day) Value: 11
  misc_feature: MA Experiment 20000478 PARAMETER Experiment Name: Zm_5mM_SA_P Parameter: Organism Value: Zea mays
  misc_feature: MA Experiment 20000478 PARAMETER Experiment Name: Zm_5mM_SA_P Parameter: Plant Line Value: 35A19
  misc_feature: MA Experiment 20000478 PARAMETER Experiment Name: Zm_5mM_SA_P Parameter: Timepoint (hr) Value: 72
  misc_feature: MA Experiment 20000478 PARAMETER Experiment Name: Zm_5mM_SA_P Parameter: Tissue Value: Aerial
  misc_feature: MA Experiment 20000478 PARAMETER Experiment Name: Zm_5mM_SA_P Parameter: Treatment Value: 5mM SA vs. No Treatment
  misc_feature: MA Experiment ID: 20000479 Result: Up-regulated in Transcription
  misc_feature: MA Experiment 20000479 PARAMETER Experiment Name: Zm_Drought_P Parameter: Age (day) Value: 10
  misc_feature: MA Experiment 20000479 PARAMETER Experiment Name: Zm_Drought_P Parameter: Organism Value: Zea mays
  misc_feature: MA Experiment 20000479 PARAMETER Experiment Name: Zm_Drought_P Parameter: Plant Line Value: 35A19
  misc_feature: MA Experiment 20000479 PARAMETER Experiment Name: Zm_Drought_P Parameter: Timepoint (hr) Value: 48
  misc_feature: MA Experiment 20000479 PARAMETER Experiment Name: Zm_Drought_P Parameter: Tissue Value: Aerial
  misc_feature: MA Experiment 20000479 PARAMETER Experiment Name: Zm_Drought_P Parameter: Treatment Value: Drought vs. No Drought
  misc_feature: MA Experiment ID: 20000533 Result: Up-regulated in Transcription
  misc_feature: MA Experiment 20000533 PARAMETER Experiment Name: Zm_0.001percent_MeJA_P Parameter: Age (day) Value: 11
  misc_feature: MA Experiment 20000533 PARAMETER Experiment Name: Zm_0.001percent_MeJA_P Parameter: Organism Value: Zea mays
  misc_feature: MA Experiment 20000533 PARAMETER Experiment Name: Zm_0.001percent_MeJA_P Parameter: Plant Line Value: 35A19
  misc_feature: MA Experiment 20000533 PARAMETER Experiment Name: Zm_0.001percent_MeJA_P Parameter: Timepoint (hr) Value: 72
  misc_feature: MA Experiment 20000533 PARAMETER Experiment Name: Zm_0.001percent_MeJA_P Parameter: Tissue Value: Aerial
  misc_feature: MA Experiment 20000533 PARAMETER Experiment Name: Zm_0.001percent_MeJA_P Parameter: Treatment Value: 0.001percent MeJA vs. No Treatment
  misc_feature: MA Experiment ID: 20000626 Result: Up-regulated in Transcription
  misc_feature: MA Experiment 20000626 PARAMETER Experiment Name: Zm_Herbicide-Treatments_P Parameter: Timepoint (hr) Value: 12
  misc_feature: MA Experiment 20000626 PARAMETER Experiment Name: Zm_Herbicide-Treatments_P Parameter: Tissue Value: Aerial
  misc_feature: MA Experiment 20000626 PARAMETER Experiment Name: Zm_Herbicide-Treatments_P Parameter: Treatment Value: Roundup vs. No Treatment
  misc_feature: MA Experiment ID: 20000627 Result: Up-regulated in Transcription
  misc_feature: MA Experiment 20000627 PARAMETER Experiment Name: Zm_Herbicide-Treatments_P Parameter: Timepoint (hr) Value: 12
  misc_feature: MA Experiment 20000627 PARAMETER Experiment Name: Zm_Herbicide-Treatments_P Parameter: Tissue Value: Aerial
  misc_feature: MA Experiment 20000627 PARAMETER Experiment Name: Zm_Herbicide-Treatments_P Parameter: Treatment Value: Finale vs. No Treatment
  misc_feature: MA Experiment ID: 20000630 Result: Up-regulated in Transcription
  misc_feature: MA Experiment 20000630 PARAMETER Experiment Name: Zm_Herbicide-Treatments_P Parameter: Timepoint (hr) Value: 4
  misc_feature: MA Experiment 20000630 PARAMETER Experiment Name: Zm_Herbicide-Treatments_P Parameter: Tissue Value: Aerial
  misc_feature: MA Experiment 20000630 PARAMETER Experiment Name: Zm_Herbicide-Treatments_P Parameter: Treatment Value: Roundup vs. No Treatment
gtgtgttctctgcgcggtcggcccggcaaacttcctctggttcctgatgatggatgtatcgcaagttgccgcagccgtggcgctgatggcgttcgcggtcgcgtttccggcgtcgggcttcccgtcaggcttcccgccagggacaccagcagcgttcccgaacccgtgggcggcgttccagaacctgtctggctgtcacatgggggaggagcggcagggcctggccgggctcaaggactacctcagccacttcggctacctcccgccgccgccgccgtcgtcccccttcagcgacgcgttcgaccagaacctggaggcggccatcgcgacgtaccagcgcaacttcggtctcaacgccaccggcgcgctggacccgtccaccgtctcgcagatggtcgcgcctcgctgcggcgtggccgacgtcatcaacggcacgtccaccatggcgaggagctcctccgccgacgcccacggcaggcacctgtacgcctacttccccggcgggccgacgtggccgccgttccggcgggacctcaagtacgcgatcaccgcgacctcggccgcgtccatcgaccggtccacgctgagcgacgtcttcgcgcgcgccttctcccggtgggccgcggccaccaacctgcggttcgcggagaccgcgtcggagtccgacgccgacatcaccatcggcttctactcgggctcgcacggcgacggcgagccgttcgacgggccgctgggaacgctggcgcacgccttctcgcccacggacggccggttccacctggacgccgcggaggcgtgggtggccggcagcgacgtgtcacgctcgtcggcgaccggggcggtggacctagagtccgtggcggtgcacgagatcggccacctcctggggctcggccactcctcggtgccggacgccatcatgtacccgacgatccggacggggacgaggaaggtggagctggaggccgacgacgtccaggggatacagagcctgtacgggagcaaccccaacttcaagggcgcgaccccgacttcgccggcgacgagcagccgcgagatggacagtagcgccggcgcgggatgccgaccagatagagtcttcgtcggagtagttgcggcagttggcctgctcctcctagtcctctagtgccgtagacctctagtgtttgccattttttttcggccacgtccttccttgtatcgatttgttgctcgattagctgattcttggatagattcttgtgtacataatatggttatcactattacagaataatataatatctgatacct

SEQ ID NO: 18269 - protein, 381 aa, Zea mays subsp. mays
  peptide (1)..(381): Ceres Seq. ID no. 12425299
  misc_feature (165)..(271): Pfam Name: Matrixin Pfam Description: Matrixin
  misc_feature (56)..(380): Homolog of NCBI NO: 21553383 NR Description: proteinase like protein [Arabidopsis thaliana]
  misc_feature (56)..(380): Homolog of NCBI NO: 28393482 NR Description: putative proteinase [Arabidopsis thaliana]
  misc_feature (56)..(380): Homolog of NCBI NO: 15235820 NR Description: proteinase like protein
  misc_feature (21)..(350): Homolog of NCBI NO: 37536782 NR Description: putative metalloproteinase
  misc_feature (51)..(381): Homolog of NCBI NO: 15218963 NR Description: metalloproteinase, putative; protein id:
  misc_feature (28)..(381): Homolog of NCBI NO: 15223067 NR Description: matrix metalloproteinase, putative; protein id:
  misc_feature (26)..(364): Homolog of NCBI NO: 30688744 NR Description: metallo proteinase -related [Arabidopsis thaliana]
  misc_feature (26)..(364): Homolog of NCBI NO: 7488435 NR Description: zinc metalloproteinase homolog F3I6.6 -
CVLCAVGPANFLWFLMMDVSQVAAAVALMAFAVAFPASGFPSGFPPGTPAAFPNPWAAFQNLSGCHMGEERQGLAGLKDYLSHFGYLPPPPPSSPFSDAFDQNLEAAIATYQRNFGLNATGALDPSTVSQMVAPRCGVADVINGTSTMARSSSADAHGRHLYAYFPGGPTWPPFRRDLKYAITATSAASIDRSTLSDVFARAFSRWAAATNLRFAETASESDADITIGFYSGSHGDGEPFDGPLGTLAHAFSPTDGRFHLDAAEAWVAGSDVSRSSATGAVDLESVAVHEIGHLLGLGHSSVPDAIMYPTIRTGTRKVELEADDVQGIQSLYGSNPNFKGATPTSPATSSREMDSSAGAGCRPDRVFVGVVAAVGLLLLVL

SEQ ID NO: 18270 - protein, 366 aa, Zea mays subsp. mays
  peptide (1)..(366): Ceres Seq. ID no. 12425300
  misc_feature (150)..(256): Pfam Name: Matrixin Pfam Description: Matrixin
  misc_feature (41)..(365): Homolog of NCBI NO: 21553383 NR Description: proteinase like protein [Arabidopsis thaliana]
  misc_feature (41)..(365): Homolog of NCBI NO: 28393482 NR Description: putative proteinase [Arabidopsis thaliana]
  misc_feature (41)..(365): Homolog of NCBI NO: 15235820 NR Description: proteinase like protein
  misc_feature (6)..(335): Homolog of NCBI NO: 37536782 NR Description: putative metalloproteinase
  misc_feature (36)..(366): Homolog of NCBI NO: 15218963 NR Description: metalloproteinase, putative; protein id:
  misc_feature (13)..(366): Homolog of NCBI NO: 15223067 NR Description: matrix metalloproteinase, putative; protein id:
  misc_feature (11)..(349): Homolog of NCBI NO: 30688744 NR Description: metallo proteinase -related [Arabidopsis thaliana]
  misc_feature (11)..(349): Homolog of NCBI NO: 7488435 NR Description: zinc metalloproteinase homolog F3I6.6 -
MMDVSQVAAAVALMAFAVAFPASGFPSGFPPGTPAAFPNPWAAFQNLSGCHMGEERQGLAGLKDYLSHFGYLPPPPPSSPFSDAFDQNLEAAIATYQRNFGLNATGALDPSTVSQMVAPRCGVADVINGTSTMARSSSADAHGRHLYAYFPGGPTWPPFRRDLKYAITATSAASIDRSTLSDVFARAFSRWAAATNLRFAETASESDADITIGFYSGSHGDGEPFDGPLGTLAHAFSPTDGRFHLDAAEAWVAGSDVSRSSATGAVDLESVAVHEIGHLLGLGHSSVPDAIMYPTIRTGTRKVELEADDVQGIQSLYGSNPNFKGATPTSPATSSREMDSSAGAGCRPDRVFVGVVAAVGLLLLVL

SEQ ID NO: 18271 - protein, 365 aa, Zea mays subsp. mays
  peptide (1)..(365): Ceres Seq. ID no. 12425301
  misc_feature (149)..(255): Pfam Name: Matrixin Pfam Description: Matrixin
  misc_feature (12)..(365): Homolog of NCBI NO: 15223067 NR Description: matrix metalloproteinase, putative; protein id:
  misc_feature (10)..(348): Homolog of NCBI NO: 30688744 NR Description: metallo proteinase -related [Arabidopsis thaliana]
  misc_feature (40)..(364): Homolog of NCBI NO: 21553383 NR Description: proteinase like protein [Arabidopsis thaliana]
  misc_feature (5)..(334): Homolog of NCBI NO: 37536782 NR Description: putative metalloproteinase
  misc_feature (35)..(365): Homolog of NCBI NO: 15218963 NR Description: metalloproteinase, putative; protein id:
  misc_feature (40)..(364): Homolog of NCBI NO: 15235820 NR Description: proteinase like protein
  misc_feature (40)..(364): Homolog of NCBI NO: 28393482 NR Description: putative proteinase [Arabidopsis thaliana]
  misc_feature (10)..(348): Homolog of NCBI NO: 7488435 NR Description: zinc metalloproteinase homolog F3I6.6 -
MDVSQVAAAVALMAFAVAFPASGFPSGFPPGTPAAFPNPWAAFQNLSGCHMGEERQGLAGLKDYLSHFGYLPPPPPSSPFSDAFDQNLEAAIATYQRNFGLNATGALDPSTVSQMVAPRCGVADVINGTSTMARSSSADAHGRHLYAYFPGGPTWPPFRRDLKYAITATSAASIDRSTLSDVFARAFSRWAAATNLRFAETASESDADITIGFYSGSHGDGEPFDGPLGTLAHAFSPTDGRFHLDAAEAWVAGSDVSRSSATGAVDLESVAVHEIGHLLGLGHSSVPDAIMYPTIRTGTRKVELEADDVQGIQSLYGSNPNFKGATPTSPATSSREMDSSAGAGCRPDRVFVGVVAAVGLLLLVL

SEQ ID NO: 18272 - DNA, 2506 bp, Zea mays subsp. mays
  misc_feature (1)..(2506): Ceres Seq. ID no. 12375134
  misc_feature: MA Experiment ID: 108529 Result: Up-regulated in Transcription
  misc_feature: MA Experiment 108529 PARAMETER Experiment Name: Zm_Imbibed_Seeds_P Parameter: Age (day) Value: 5 vs. 2
  misc_feature: MA Experiment 108529 PARAMETER Experiment Name: Zm_Imbibed_Seeds_P Parameter: Organism Value: Zea mays
  misc_feature: MA Experiment 108529 PARAMETER Experiment Name: Zm_Imbibed_Seeds_P Parameter: Plant Line Value: 35A19
  misc_feature: MA Experiment 108529 PARAMETER Experiment Name: Zm_Imbibed_Seeds_P Parameter: Tissue Value: Roots vs. Embryo
  misc_feature: MA Experiment ID: 108544 Result: Down-regulated in Transcription
  misc_feature: MA Experiment ID: 108546 Result: Up-regulated in Transcription
  misc_feature: MA Experiment 108546 PARAMETER Experiment Name: Zm_Imbibed_Seeds_P Parameter: Age (day) Value: 3 vs. 2
  misc_feature: MA Experiment 108546 PARAMETER Experiment Name: Zm_Imbibed_Seeds_P Parameter: Organism Value: Zea mays
  misc_feature: MA Experiment 108546 PARAMETER Experiment Name: Zm_Imbibed_Seeds_P Parameter: Plant Line Value: 35A19
  misc_feature: MA Experiment 108546 PARAMETER Experiment Name: Zm_Imbibed_Seeds_P Parameter: Tissue Value: Roots vs. Embryo
  misc_feature: MA Experiment ID: 20000535 Result: Down-regulated in Transcription
  misc_feature: MA Experiment 20000535 PARAMETER Experiment Name: Zm_Hybrid_Seed_Dev_P Parameter: DAP Value: 30 vs. 12
  misc_feature: MA Experiment 20000535 PARAMETER Experiment Name: Zm_Hybrid_Seed_Dev_P Parameter: Organism Value: Zea mays
  misc_feature: MA Experiment 20000535 PARAMETER Experiment Name: Zm_Hybrid_Seed_Dev_P Parameter: Plant Line Value: 35A19
  misc_feature: MA Experiment 20000535 PARAMETER Experiment Name: Zm_Hybrid_Seed_Dev_P Parameter: Tissue Value: Embryo vs. Unfert Floret
gcacgagaccattacctagaacatcctaatcgaaaaagaagagcacgcccactcctccggctcttcttctccaccggcaccagtccaccacctcctgccaccgcgcggccccaaccaaccacaccgcagcgcagcaatggcgggcaacggcgccatcgtggagagcgacccgctgaactggggcgcggcggcggcggagctggccgggagccacctggacgaggtgaagcgcatggtggcgcaggcccggcagcccgtggtgaagatcgagggctccaccctccgcgtcggccaggtggccgccgtcgcctccgccaaggacgcgtccggcgtcgccgtcgagctcgacgaggaggcccgcccccgcgtcaaggccagcagcgagtggatcctcgactgcatcgcccacggcggcgacatctacggcgtcaccaccggcttcggcggcacctcccaccgccgcaccaaggacgggcccgcgctccaggtcgagctgctcaggcatctcaacgccggaatcttcggcaccggcagcgacgggcacacgctgccgtcggaggtcacccgcgcggcgatgctggtgcgcatcaacaccctcctccagggctactccggcatccgcttcgagatcctcgaggccatcacgaagctgctcaacaccggtgtcagcccctgcctgccgctccggggcaccatcaccgcgtcgggcgacctggtcccgctctcctacatcgccggcctcatcacgggccgccccaacgcgcaggccgtcaccgtcgacggaaggaaggtggacgccgccgaggcgttcaagatcgccggcatcgagggcggcttcttcaagctcaaccccaaggagggcctcgccatcgtcaacggcacgtccgtgggctccgcgctcgcggccaccgtgatgtacgacgccaacgtcctggccgtcctgtcggaggtcctgtccgccgtcttctgcgaggtcatgaacggcaagcccgagtacacggaccacctgacccacaagctgaagcaccacccggggtccatcgaggccgcggccatcatggagcacatcctggatggcagctccttcatgaagcaggccaagaaggtgaacgagctggacccgctgctgaagcccaagcaggacaggtacgcgctccgcacgtcgccgcagtggctgggcccccagatcgaggtcatccgcgccgccaccaagtccatcgagcgcgaggtcaactccgtgaacgacaacccggtcatcgacgtccaccgcggcaaggcgctgcacggcggcaacttccagggcacccccatcggcgtgtccatggacaacgcccgcctcgccatcgccaacatcggcaagctcatgttcgcgcagttctccgagctcgtcaacgagttctacaacaacgggctcacctccaacctggccggcagccgcaaccccagcctggactacggcttcaagggcaccgagatcgccatggcctcctactgctccgagctccagtacctgggcaaccccatcaccaaccacgtgcagagcgcggagcagcacaaccaggacgtgaactccctgggcctcgtctcggccaggaagaccgccgaggcgatcgacatcctgaagctcatgtcgtccacctacatcgtggcgctgtgccaggccgtggacctgcgccacctcgaggagaacatcaaggcgtcggtgaagaacaccgtgacccaggtggccaagaaggtgctgaccatgaacccctcgggcgagctctccagcgcccgcttcagcgagaaggagctgatcagcgccatcgaccgcgaggccgtgttcacgtacgcggaggacgcggccagcgccagcctgccgctgatgcagaagctgcgcgccgtgctggtggaccacgccctcagcagcggcgacgcggagcgggagccctccatgttctccaagatcaccaggttcgaggaggagctccgcgcggtgctgccccaggaggtggaggccgcccgcgtggcggtcgccgagggcaccgcccccgtggcgaaccggatcgcggacagccggtcgttcccgctgtaccgcttcgtgcgcgaggagctcggctgcgtgttcctgaccggcgagaggctcaagtcccccggcgaggagtgcaacaaggtgttcgtcggcatcagccagggcaagctcgtggaccccatgctcgagtgcctcaaggagtgggacggcaagccgctgcccatcaacgtcaagtaaaagaacgccaaggagaagaggagggaggggaggaaatacgtgaaaaaaaataaaacctgtacacgtgtctgtccagatcgtgccgtcgatcgctcttcgttgttgatttttggttgtattgatcgatccgtatgtgtgcgtgcgtgtgtggcgttgctctttcttcttttgtgtagctgtgccctgccaccggccgacgtgcgtgcatgccatggtggcgggcagcgttttctaaggtcatatactgttgttgtgttt

SEQ ID NO: 18273 - protein, 766 aa, Zea mays subsp. mays
  peptide (1)..(766): Ceres Seq. ID no. 12375135
  misc_feature (18)..(685): Pfam Name: High molecular weight glutenin subunit Pfam Description: High molecular weight glutenin subunit
  misc_feature (9)..(179): Homolog of NCBI NO: 19923466 NR Description: splicing coactivator subunit SRm300
ARDHYLEHPNRKRRARPLLRLFFSTGTSPPPPATARPQPTTPQRSNGGQRRHRGERPAELGRGGGGAGREPPGRGEAHGGAGPAARGEDRGLHPPRRPGGRRRLRQGRVRRRRRARRGGPPPRQGQQRVDPRLHRPRRRHLRRHHRLRRHLPPPHQGRARAPGRAAQASQRRNLRHRQRRAHAAVGGHPRGDAGAHQHPPPGLLRHPLRDPRGHHEAAQHRCQPLPAAPGHHHRVGRPGPALLHRRPHHGPPQRAGRHRRRKEGGRRRGVQDRRHRGRLLQAQPQGGPRHRQRHVRGLRARGHRDVRRQRPGRPVGGPVRRLLRGHERQARVHGPPDPQAEAPPGVHRGRGHHGAHPGWQLLHEAGQEGERAGPAAEAQAGQVRAPHVAAVAGPPDRGHPRRHQVHRARGQLRERQPGHRRPPRQGAARRQLPGHPHRRVHGQRPPRHRQHRQAHVRAVLRARQRVLQQRAHLQPGRQPQPQPGLRLQGHRDRHGLLLLRAPVPGQPHHQPRAERGAAQPGRELPGPRLGQEDRRGDRHPEAHVVHLHRGAVPGRGPAPPRGEHQGVGEEHRDPGGQEGADHEPLGRALQRPLQREGADQRHRPRGRVHVRGGRGQRQPAADAEAARRAGGPRPQQRRRGAGALHVLQDHQVRGGAPRGAAPGGGGRPRGGRRGHRPRGEPDRGQPVVPAVPLRARGARLRVPDRREAQVPRRGVQQGVRRHQPGQARGPHARVPQGVGRQAAAHQRQVKERQGEEEGGEEIREKK

SEQ ID NO: 18274 - protein, 703 aa, Zea mays subsp. mays
  peptide (1)..(703): Ceres Seq. ID no. 12375136
  misc_feature (41)..(540): Pfam Name: Phenylalanine and histidine ammonia-lyase Pfam Description: Phenylalanine and histidine ammonia-lyase
  misc_feature (138)..(519): Homolog of NCBI NO: 30580484 NR Description: Phenylalanine ammonia-lyase
  misc_feature (42)..(654): Homolog of NCBI NO: 30580473 NR Description: Phenylalanine ammonia-lyase
  misc_feature (1)..(700): Homolog of NCBI NO: 129585 NR Description: Phenylalanine ammonia-lyase class II
  misc_feature (1)..(700): Homolog of NCBI NO: 6647711 NR Description: Phenylalanine ammonia-lyase 1
  misc_feature (11)..(700): Homolog of NCBI NO: 3123241 NR Description: Phenylalanine ammonia-lyase
  misc_feature (4)..(700): Homolog of NCBI NO: 12240240 NR Description: phenylalanine ammonia-lyase [Ipomoea nil]
  misc_feature (8)..(700): Homolog of NCBI NO: 1171997 NR Description: Phenylalanine ammonia-lyase
  misc_feature (10)..(700): Homolog of NCBI NO: 129594 NR Description: Phenylalanine ammonia-lyase
  misc_feature (10)..(700): Homolog of NCBI NO: 3024363 NR Description: Phenylalanine ammonia-lyase
  misc_feature (33)..(700): Homolog of NCBI NO: 29367609 NR Description: phenylalanine ammonia-lyase
MAGNGAIVESDPLNWGAAAAELAGSHLDEVKRMVAQARQPVVKIEGSTLRVGQVAAVASAKDASGVAVELDEEARPRVKASSEWILDCIAHGGDIYGVTTGFGGTSHRRTKDGPALQVELLRHLNAGIFGTGSDGHTLPSEVTRAAMLVRINTLLQGYSGIRFEILEAITKLLNTGVSPCLPLRGTITASGDLVPLSYIAGLITGRPNAQAVTVDGRKVDAAEAFKIAGIEGGFFKLNPKEGLAIVNGTSVGSALAATVMYDANVLAVLSEVLSAVFCEVMNGKPEYTDHLTHKLKHHPGSIEAAAIMEHILDGSSFMKQAKKVNELDPLLKPKQDRYALRTSPQWLGPQIEVIRAATKSIEREVNSVNDNPVIDVHRGKALHGGNFQGTPIGVSMDNARLAIANIGKLMFAQFSELVNEFYNNGLTSNLAGSRNPSLDYGFKGTEIAMASYCSELQYLGNPITNHVQSAEQHNQDVNSLGLVSARKTAEAIDILKLMSSTYIVALCQAVDLRHLEENIKASVKNTVTQVAKKVLTMNPSGELSSARFSEKELISAIDREAVFTYAEDAASASLPLMQKLRAVLVDHALSSGDAEREPSMFSKITRFEEELRAVLPQEVEAARVAVAEGTAPVANRIADSRSFPLYRFVREELGCVFLTGERLKSPGEECNKVFVGISQGKLVDPMLECLKEWDGKPLPINVK

SEQ ID NO: 18275 - protein, 671 aa, Zea mays subsp. mays
  peptide (1)..(671): Ceres Seq. ID no. 12375137
  misc_feature (9)..(508): Pfam Name: Phenylalanine and histidine ammonia-lyase Pfam Description: Phenylalanine and histidine ammonia-lyase
  misc_feature (106)..(487): Homolog of NCBI NO: 30580484 NR Description: Phenylalanine ammonia-lyase
  misc_feature (10)..(622): Homolog of NCBI NO: 30580473 NR Description: Phenylalanine ammonia-lyase
  misc_feature (1)..(668): Homolog of NCBI NO: 129585 NR Description: Phenylalanine ammonia-lyase class II
  misc_feature (1)..(668): Homolog of NCBI NO: 6647711 NR Description: Phenylalanine ammonia-lyase 1
  misc_feature (1)..(668): Homolog of NCBI NO: 3123241 NR Description: Phenylalanine ammonia-lyase
  misc_feature (1)..(668): Homolog of NCBI NO: 12240240 NR Description: phenylalanine ammonia-lyase [Ipomoea nil]
  misc_feature (1)..(668): Homolog of NCBI NO: 1171997 NR Description: Phenylalanine ammonia-lyase
  misc_feature (1)..(668): Homolog of NCBI NO: 129594 NR Description: Phenylalanine ammonia-lyase
  misc_feature (1)..(668): Homolog of NCBI NO: 3024363 NR Description: Phenylalanine ammonia-lyase
  misc_feature (1)..(668): Homolog of NCBI NO: 29367609 NR Description: phenylalanine ammonia-lyase
MVAQARQPVVKIEGSTLRVGQVAAVASAKDASGVAVELDEEARPRVKASSEWILDCIAHGGDIYGVTTGFGGTSHRRTKDGPALQVELLRHLNAGIFGTGSDGHTLPSEVTRAAMLVRINTLLQGYSGIRFEILEAITKLLNTGVSPCLPLRGTITASGDLVPLSYIAGLITGRPNAQAVTVDGRKVDAAEAFKIAGIEGGFFKLNPKEGLAIVNGTSVGSALAATVMYDANVLAVLSEVLSAVFCEVMNGKPEYTDHLTHKLKHHPGSIEAAAIMEHILDGSSFMKQAKKVNELDPLLKPKQDRYALRTSPQWLGPQIEVIRAATKSIEREVNSVNDNPVIDVHRGKALHGGNFQGTPIGVSMDNARLAIANIGKLMFAQFSELVNEFYNNGLTSNLAGSRNPSLDYGFKGTEIAMASYCSELQYLGNPITNHVQSAEQHNQDVNSLGLVSARKTAEAIDILKLMSSTYIVALCQAVDLRHLEENIKASVKNTVTQVAKKVLTMNPSGELSSARFSEKELISAIDREAVFTYAEDAASASLPLMQKLRAVLVDHALSSGDAEREPSMFSKITRFEEELRAVLPQEVEAARVAVAEGTAPVANRIADSRSFPLYRFVREELGCVFLTGERLKSPGEECNKVFVGISQGKLVDPMLECLKEWDGKPLPINVK

SEQ ID NO: 18276 - DNA, 1870 bp, Zea mays subsp. mays
  misc_feature (1)..(1870): Ceres Seq. ID no. 12361130
  misc_feature: MA Experiment ID: 108535 Result: Up-regulated in Transcription
  misc_feature: MA Experiment 108535 PARAMETER Experiment Name: Zm_Meristem_P Parameter: Age (day) Value: 8
  misc_feature: MA Experiment 108535 PARAMETER Experiment Name: Zm_Meristem_P Parameter: Organism Value: Zea mays
  misc_feature: MA Experiment 108535 PARAMETER Experiment Name: Zm_Meristem_P Parameter: Plant Line Value: 35A19
  misc_feature: MA Experiment 108535 PARAMETER Experiment Name: Zm_Meristem_P Parameter: Tissue Value: Root Meristem vs. Above Root Meristem
  misc_feature: MA Experiment ID: 20000477 Result: Down-regulated in Transcription
  misc_feature: MA Experiment 20000477 PARAMETER Experiment Name: Zm_5mM_SA_P Parameter: Age (day) Value: 10
  misc_feature: MA Experiment 20000477 PARAMETER Experiment Name: Zm_5mM_SA_P Parameter: Organism Value: Zea mays
  misc_feature: MA Experiment 20000477 PARAMETER Experiment Name: Zm_5mM_SA_P Parameter: Plant Line Value: 35A19
  misc_feature: MA Experiment 20000477 PARAMETER Experiment Name: Zm_5mM_SA_P Parameter: Timepoint (hr) Value: 48
  misc_feature: MA Experiment 20000477 PARAMETER Experiment Name: Zm_5mM_SA_P Parameter: Tissue Value: Aerial
  misc_feature: MA Experiment 20000477 PARAMETER Experiment Name: Zm_5mM_SA_P Parameter: Treatment Value: 5mM SA vs. No Treatment
  misc_feature: MA Experiment ID: 20000535 Result: Up-regulated in Transcription
  misc_feature: MA Experiment 20000535 PARAMETER Experiment Name: Zm_Hybrid_Seed_Dev_P Parameter: DAP Value: 30 vs. 12
  misc_feature: MA Experiment 20000535 PARAMETER Experiment Name: Zm_Hybrid_Seed_Dev_P Parameter: Organism Value: Zea mays
  misc_feature: MA Experiment 20000535 PARAMETER Experiment Name: Zm_Hybrid_Seed_Dev_P Parameter: Plant Line Value: 35A19
  misc_feature: MA Experiment 20000535 PARAMETER Experiment Name: Zm_Hybrid_Seed_Dev_P Parameter: Tissue Value: Embryo vs. Unfert Floret
ctctaaaaccccaaccgtcgacgttcactcctcaccccctgcggccctgctcttttgagcctcactcctcagtcttcacgccgccggggcagtgctaagatccaggacacgcgctgtcccgctagcaccacgcctccccttgtcatcgtcctcctcccacgtgctgctgtgggggtgcagacgggagacacatccggacctgattgatttcttcgttttgttctgctggtttacatggctgcaagaaagaaaaagcctttgcttattgcttgccaagcaaccagtgccagaataacaagatctcaggctgctgcaaatagtacaagatctgggctggctccttctgtaccagtacctctgaaaacggagcataaccatgcagcgaaaaaaaagatgaaaagggaagcttcagatgaaaatgcttctgctgatgctggagcttcagctcctctgcctaaaaggcgtacagttctcaagaatgtaactaacataagctgtgctaaaatttccaaaaggtgcactgctgtgactgggctgaagttgggtccctcccagaaggctgggcagagcataaacaagcaatgcacaaacaagatctccatgcttctccctctggctgttggagggagttcacttgtggatgattctaataatgctgaagaaacacaaatggtagaccttttggcacagaaagagaagcagattgttttgcttaaggaggctcagccattacagaatactgaacaaaacaaaggcggtgcttgtgatgaggcatctgttgaggaaagaaatgccatgaatgtacacgaaactgctgccttaaaggctggggtctctaatggtttaaacattgtagatattgacaaaaataatggtgatcctcaaatgtgtgttacctacgttgcagagatatacagaaatctaatggcctcagagcttataagaagacctaggtcaaattacatggagactttgcaacaggacatcacagctagcatgcgaggtgttctaattgattggcttgttgaggtttcggacgaatataagcttgtggcagatacactttaccttacagtatatcttattgaccaatttctttctcagaactgtatccaaacgcacaagctgcaacttcttgggataactagtatgctgattgcctcgaaatatgaagagtattctgctcctagtgctgaagaattttgtaacataacggctggtacatatgcaaaggctgaggttctggaaatggagcaacaagtgcttaatgatctgggctttcatttatctgttccaacaacaaacacatttctcaggagattccttagagcagcacaggcttctcgtacagctcatctgaccactttgaattatctggcgagttatcttgccgagttgactttaatcagttacgatttcatgaaatttcttccctcagaggtggcagcatcttcgattttccttgcaaaatggacacttgaccaatctgaccatccttggaaccctactcttgagcactacacgtcttacaaaagcttcgatattagaacttgcgtgcgggctctacaggaactgcagcacaacaccagtaattgccccctcaacgccatccgtgagaagtatgggcagcagaagttcgagtgcgttgccaacctcaggtcaccggagctgctgcggtcgctcttcagttgatgtgctcccctgcactctgctgattcactcgccatttgctgcaacgatcctgacactgtataaaatatttcttcagtttctgttccatttccaaactttcttcagtttgaacatgcattctgtgacttgggtcaccgacaaaagaggcgcgacacactaatatatcaatttgtaactc

SEQ ID NO: 18277 - protein, 485 aa, Zea mays subsp. mays
  peptide (1)..(485): Ceres Seq. ID no. 12361131
  misc_feature (354)..(480): Pfam Name: Cyclin, C-terminal domain Pfam Description: Cyclin, C-terminal domain
  misc_feature (19)..(484): Homolog of NCBI NO: 5420276 NR Description: cyclin A2 [Lycopersicon esculentum]
MAARKKKPLLIACQATSARITRSQAAANSTRSGLAPSVPVPLKTEHNHAAKKKMKREASDENASADAGASAPLPKRRTVLKNVTNISCAKISKRCTAVTGLKLGPSQKAGQSINKQCTNKISMLLPLAVGGSSLVDDSNNAEETQMVDLLAQKEKQIVLLKEAQPLQNTEQNKGGACDEASVEERNAMNVHETAALKAGVSNGLNIVDIDKNNGDPQMCVTYVAEIYRNLMASELIRRPRSNYMETLQQDITASMRGVLIDWLVEVSDEYKLVADTLYLTVYLIDQFLSQNCIQTHKLQLLGITSMLIASKYEEYSAPSAEEFCNITAGTYAKAEVLEMEQQVLNDLGFHLSVPTTNTFLRRFLRAAQASRTAHLTTLNYLASYLAELTLISYDFMKFLPSEVAASSIFLAKWTLDQSDHPWNPTLEHYTSYKSFDIRTCVRALQELQHNTSNCPLNAIREKYGQQKFECVANLRSPELLRSLFS

SEQ ID NO: 18278 - protein, 432 aa, Zea mays subsp. mays
  peptide (1)..(432): Ceres Seq. ID no. 12361132
  misc_feature (301)..(427): Pfam Name: Cyclin, C-terminal domain Pfam Description: Cyclin, C-terminal domain
  misc_feature (1)..(431): Homolog of NCBI NO: 5420276 NR Description: cyclin A2 [Lycopersicon esculentum]
MKREASDENASADAGASAPLPKRRTVLKNVTNISCAKISKRCTAVTGLKLGPSQKAGQSINKQCTNKISMLLPLAVGGSSLVDDSNNAEETQMVDLLAQKEKQIVLLKEAQPLQNTEQNKGGACDEASVEERNAMNVHETAALKAGVSNGLNIVDIDKNNGDPQMCVTYVAEIYRNLMASELIRRPRSNYMETLQQDITASMRGVLIDWLVEVSDEYKLVADTLYLTVYLIDQFLSQNCIQTHKLQLLGITSMLIASKYEEYSAPSAEEFCNITAGTYAKAEVLEMEQQVLNDLGFHLSVPTTNTFLRRFLRAAQASRTAHLTTLNYLASYLAELTLISYDFMKFLPSEVAASSIFLAKWTLDQSDHPWNPTLEHYTSYKSFDIRTCVRALQELQHNTSNCPLNAIREKYGQQKFECVANLRSPELLRSLFS

SEQ ID NO: 18279 - protein, 363 aa, Zea mays subsp. mays
  peptide (1)..(363): Ceres Seq. ID no. 12361133
  misc_feature (232)..(358): Pfam Name: Cyclin, C-terminal domain Pfam Description: Cyclin, C-terminal domain
  misc_feature (1)..(362): Homolog of NCBI NO: 5420276 NR Description: cyclin A2 [Lycopersicon esculentum]
MLLPLAVGGSSLVDDSNNAEETQMVDLLAQKEKQIVLLKEAQPLQNTEQNKGGACDEASVEERNAMNVHETAALKAGVSNGLNIVDIDKNNGDPQMCVTYVAEIYRNLMASELIRRPRSNYMETLQQDITASMRGVLIDWLVEVSDEYKLVADTLYLTVYLIDQFLSQNCIQTHKLQLLGITSMLIASKYEEYSAPSAEEFCNITAGTYAKAEVLEMEQQVLNDLGFHLSVPTTNTFLRRFLRAAQASRTAHLTTLNYLASYLAELTLISYDFMKFLPSEVAASSIFLAKWTLDQSDHPWNPTLEHYTSYKSFDIRTCVRALQELQHNTSNCPLNAIREKYGQQKFECVANLRSPELLRSLFS

SEQ ID NO: 18280 - DNA, 677 bp, Zea mays subsp. mays
  misc_feature (1)..(677): Ceres Seq. ID no. 13493127
  misc_feature: MA Experiment ID: 108535 Result: Up-regulated in Transcription
  misc_feature: MA Experiment 108535 PARAMETER Experiment Name: Zm_Meristem_P Parameter: Age (day) Value: 8
  misc_feature: MA Experiment 108535 PARAMETER Experiment Name: Zm_Meristem_P Parameter: Organism Value: Zea mays
  misc_feature: MA Experiment 108535 PARAMETER Experiment Name: Zm_Meristem_P Parameter: Plant Line Value: 35A19
  misc_feature: MA Experiment 108535 PARAMETER Experiment Name: Zm_Meristem_P Parameter: Tissue Value: Root Meristem vs. Above Root Meristem
  misc_feature: MA Experiment ID: 108544 Result: Down-regulated in Transcription
  misc_feature: MA Experiment ID: 20000492 Result: Up-regulated in Transcription
  misc_feature: MA Experiment 20000492 PARAMETER Experiment Name: Zm_Hybrid_Seed_Dev_P Parameter: DAP Value: 12
  misc_feature: MA Experiment 20000492 PARAMETER Experiment Name: Zm_Hybrid_Seed_Dev_P Parameter: Organism Value: Zea mays
  misc_feature: MA Experiment 20000492 PARAMETER Experiment Name: Zm_Hybrid_Seed_Dev_P Parameter: Plant Line Value: 35A19
  misc_feature: MA Experiment 20000492 PARAMETER Experiment Name: Zm_Hybrid_Seed_Dev_P Parameter: Tissue Value: Fert Kernel vs. Unfert Floret
  misc_feature: MA Experiment ID: 20000632 Result: Down-regulated in Transcription
  misc_feature: MA Experiment 20000632 PARAMETER Experiment Name: Zm_Herbicide-Treatments_P Parameter: Timepoint (hr) Value: 4
  misc_feature: MA Experiment 20000632 PARAMETER Experiment Name: Zm_Herbicide-Treatments_P Parameter: Tissue Value: Aerial
  misc_feature: MA Experiment 20000632 PARAMETER Experiment Name: Zm_Herbicide-Treatments_P Parameter: Treatment Value: Glean vs. No Treatment
atagaaatcgaccgagcgaatcctcgcttcgcagtcgcagcctttcctgcatcacaccaccgcgaaaccccagcagccgcatcgatggcgcccaaggcggagaagaagcccgctgcgaagaagccagcggaggaggagcccgctgccgcgaaggccccggcggggaagaagcccaaggccgagaagcgcctcccggcggccaagtcgtccggcaaagaaggcggcgacaagaagggcaagaagaaggcgaagaagtcggtggagacctacaagatctacatcttcaaggtgctgaagcaggtccaccccgacatcggcatctcttccaaggccatgtccatcatgaactccttcatcaacgacatcttcgagaagctcgccggcgaggctgccaagcttgcgcgctacaacaagaagcccaccatcacctctcgggagattcaaacctctgttcgccttgtccttcccggcgagctcgccaagcacgctgtctctgagggcaccaaggccgtcactaagttcacatcatcttagatttgaggtagtagctattgggtggcgttggtagttgtgtctcaatttgtctgctactaatagtggtaggagtatccatgtgtagttgggttgcggtaagaattgtgttaaactggtaatatgtttgaaattgctttttgtgg

SEQ ID NO: 18281 - protein, 177 aa, Zea mays subsp. mays
  peptide (1)..(177): Ceres Seq. ID no. 13493128
  misc_feature (49)..(177): Pfam Name: Core histone H2A/H2B/H3/H4 Pfam Description: Core histone H2A/H2B/H3/H4
  misc_feature (2)..(173): Homolog of NCBI NO: 18596433 NR Description: similar to bA370B6.1 (similar to histone H2B)
  misc_feature (30)..(174): Homolog of NCBI NO: 15223150 NR Description: histone H2B family [Arabidopsis thaliana]
  misc_feature (32)..(177): Homolog of NCBI NO: 34876159 NR Description: similar to Histone H2B 291B [Rattus norvegicus]
  misc_feature (22)..(177): Homolog of NCBI NO: 122041 NR Description: Histone H2B-IV
  misc_feature (29)..(177): Homolog of NCBI NO: 34895838 NR Description: putative histone H2B [Oryza sativa (japonica
  misc_feature (29)..(177): Homolog of NCBI NO: 399853 NR Description: Histone H2B.1
  misc_feature (29)..(177): Homolog of NCBI NO: 3913804 NR Description: Histone H2B.3
  misc_feature (29)..(177): Homolog of NCBI NO: 1708107 NR Description: Histone H2B
  misc_feature (29)..(177): Homolog of NCBI NO: 399854 NR Description: Histone H2B.2
  misc_feature (29)..(177): Homolog of NCBI NO: 122022 NR Description: Histone H2B
IEIDRANPRFAVAAFPASHHRETPAAASMAPKAEKKPAAKKPAEEEPAAAKAPAGKKPKAEKRLPAAKSSGKEGGDKKGKKKAKKSVETYKIYIFKVLKQVHPDIGISSKAMSIMNSFINDIFEKLAGEAAKLARYNKKPTITSREIQTSVRLVLPGELAKHAVSEGTKAVTKFTSS

SEQ ID NO: 18282 - protein, 164 aa, Zea mays subsp. mays
  peptide (1)..(164): Ceres Seq. ID no. 13493129
  misc_feature (55)..(164): Homolog of NCBI NO: 17505204 NR Description: histone 1, H2bc; H2B histone family, member S
RNRPSESSLRSRSLSCITPPRNPSSRIDGAQGGEEARCEEASGGGARCREGPGGEEAQGREAPPGGQVVRQRRRRQEGQEEGEEVGGDLQDLHLQGAEAGPPRHRHLFQGHVHHELLHQRHLREARRRGCQACALQQEAHHHLSGDSNLCSPCPSRRARQARCL

SEQ ID NO: 18283 - protein, 149 aa, Zea mays subsp. mays; identical to SEQ ID NO: 2361
  peptide (1)..(149): Ceres Seq. ID no. 13493130
  misc_feature (21)..(149): Pfam Name: Core histone H2A/H2B/H3/H4 Pfam Description: Core histone H2A/H2B/H3/H4
  misc_feature (1)..(145): Homolog of NCBI NO: 18596433 NR Description: similar to bA370B6.1 (similar to histone H2B)
  misc_feature (2)..(146): Homolog of NCBI NO: 15223150 NR Description: histone H2B family [Arabidopsis thaliana]
  misc_feature (4)..(149): Homolog of NCBI NO: 34876159 NR Description: similar to Histone H2B 291B [Rattus norvegicus]
  misc_feature (1)..(149): Homolog of NCBI NO: 122041 NR Description: Histone H2B-IV
  misc_feature (1)..(149): Homolog of NCBI NO: 34895838 NR Description: putative histone H2B [Oryza sativa (japonica
  misc_feature (1)..(149): Homolog of NCBI NO: 399853 NR Description: Histone H2B.1
  misc_feature (1)..(149): Homolog of NCBI NO: 3913804 NR Description: Histone H2B.3
  misc_feature (1)..(149): Homolog of NCBI NO: 1708107 NR Description: Histone H2B
  misc_feature (1)..(149): Homolog of NCBI NO: 399854 NR Description: Histone H2B.2
  misc_feature (1)..(149): Homolog of NCBI NO: 122022 NR Description: Histone H2B

SEQ ID NO: 18284 - DNA, 2706 bp, Zea mays subsp. mays
  misc_feature (1)..(2706): Ceres Seq. ID no. 12361500
  misc_feature: MA Experiment ID: 108523 Result: Up-regulated in Transcription
  misc_feature: MA Experiment 108523 PARAMETER Experiment Name: Zm_42deg_Heat_P Parameter: Age (day) Value: 8
  misc_feature: MA Experiment 108523 PARAMETER Experiment Name: Zm_42deg_Heat_P Parameter: Organism Value: Zea mays
  misc_feature: MA Experiment 108523 PARAMETER Experiment Name: Zm_42deg_Heat_P Parameter: Plant Line Value: 35A19
  misc_feature: MA Experiment 108523 PARAMETER Experiment Name: Zm_42deg_Heat_P Parameter: Temperature (deg C) Value: 42 vs. 22
  misc_feature: MA Experiment 108523 PARAMETER Experiment Name: Zm_42deg_Heat_P Parameter: Timepoint (hr) Value: 6
  misc_feature: MA Experiment 108523 PARAMETER Experiment Name: Zm_42deg_Heat_P Parameter: Tissue Value: Aerial
gcacgagaccattacctagaacatcctaatcgaaaaattatcgatcccagccccaggccatggcgacgaggtggaggaggtcgctgctctgggtcgccgtcgtccagttcctgaccctgtgcgtcgccgagcatctcgtagtggaagcatacaaaaagtcctacattgtgtatctgggatcacatgcatatggccgtgatgcgtcggcggaggagcatgctcgcgcaacccagtctcaccaccacctcctggcatcgatcctcggcggcgacgacgaccaccaccatgagacggcgcggcagtccatcttctactcctacaccaagagcagcatcaatggcttcgcggcgcacctggaggagtcggtcgcgcagcagatcgcggagcaccctgaggtggtggcggtgctggagagcaagatgctcaagctgcacaccacgcggtcctgggacttcatggacctggagcgcgacggtcacgtcctccctggctccatctggaaccacgctaggttcggacaggacgtcatcatcgccagtctcgacagcggagtgtggcccgagtcccacagcttccaagacgacggcggccaagtgccagctcgctggaagggctcctgtcaagacaccgttaagtacggtgtcgcctgcaaccgcaaactcatcggcgctaggttcttcaacaaagacatgctctttagcaacccagccgtggtgaacgccaactggacgcgcgacaccgagggccacggcacccacacgctctccaccgccgccggtggctttgtgccccgtgccagtctcttcggctatgccactggcacagccaaaggcggcgcgccgcgtgcgcgcgtcgccgcttataaggtttgctggtcgggagagtgcgccgccgccgacgtccttgcgggcttcgagtccgccatccatgacggcgccgacgtcatttccgtctccttcggtcaggacgcgcccctcgccgatgacgtcaagtcactcttccacgagcctgtcatgctcggctcgctccacgccgccatccacggtgtctccgtcatctgctccgccggcaactccggcccgtacgatgacaccgtcgtcaatgccgcgccatgggtcaccacagtcgccgccaccaccgtcgacagagacttccccaacgttctcaccctcggcaatagcgtgcgccttaggggaacgagcctcgagtctactacgctgcactccagcatgctctacccgatgatcgacgccgcgcgcgccgcgcgcaccacctctaacccgtacgacgcggccagctgcgggctcggcaccctcgaccctgctgccatcaggggcaagatcgtcgtgtgtcgccgcggcggcggaggcggaggcgacgtctcccgagtcagcaaggggatggccgtgctcgaggccgggggagccgggatgatcctcgccaacgacaggatggacggtgacgacatcgtcgcagacccgcacgtcctcccggccaccatgatcacctacagcgaggccgtctctctgtacggctacatggagtccaccagcaaccccgtcgccaacatctcacccgccaagacggaggtgggcgtcaagaactcgccgtccgtggcgggcttctcctcccgcgggcccagcgggactctgccgtacgtgctcaagcccgacatcgccgcgccgggggtcgacatcctggccgccttcaccgagtacgtcggccccacggagctcgcctccgacaagcgccgctccgagtacgccatcctgtccggcacgtccatggcctgcccacacgtctccggcgtcatcgctctcctcaaggcggcgcgccccgagtggagccccgccgcgatgcgctccgcgatcatgaccacggcgcgcacccaggacaacacgggagcgcccatgcgcgaccacgacggcaaggaggccaacgccttcgcctacggcgccggcaacgtgcaccccaaccgcgccgtcgacccgggcctcgtgtacgacgccggccccgacgactacttcaccttcctctgcgccatgggcatctccgcggcagacatgaagcggctcagcgccggcaagttcgcgtgcccagctaatagcgctaaggaggcgcccgccatggaggacctcaactacccgtccatcgtggtgccgtcgctgcgcggcacgcagacggtgacgcgacggctgaagaacgtcggccgtccggccaagtacctcgcgtcctggcgcgcgccggttgggatcaccatggaggtgaagccgagggtgcttgagttcagcaaggtcggtgaggaaaaggagttcaaggtgacggtgacgtcgcagcaggacaagctcgggatgggctacgtctttgggaggctcgtctggacagacgggacccactatgtcagaagccccgtcgtcgtcaacgccctcgcatgatctatccagttcgtgctaactagagtacactacctactactactacttgagggccttgtggatttttgtgacatcttagataagtagtaaggctctaaaatatatttttatttcttcttgttattattagtaaagaaatgagataggtttttttttgcttagctaaaagacatatcatctataataaattttggctctttgcatgggaacttgaattaatggtaaaaaactgcatataatataatgaagggaaaagggcacttctagtttc

SEQ ID NO: 18285 - protein, 791 aa, Zea mays subsp. mays
  peptide (1)..(791): Ceres Seq. ID no. 12361501
  misc_feature (386)..(494): Pfam Name: PA domain Pfam Description: PA domain
  misc_feature (83)..(788): Homolog of NCBI NO: 18425181 NR Description: subtilisin-like serine protease ARA12
  misc_feature (82)..(785): Homolog of NCBI NO: 7435657 NR Description: subtilisin-like proteinase (EC 3.4.21.-) 1 -
  misc_feature (74)..(790): Homolog of NCBI NO: 18418552 NR Description: subtilisin-like serine protease
  misc_feature (87)..(786): Homolog of NCBI NO: 34911518 NR Description: putative subtilisin-like protease
  misc_feature (30)..(769): Homolog of NCBI NO: 26451139 NR Description: putative subtilisin-like protease [Arabidopsis
  misc_feature (23)..(772): Homolog of NCBI NO: 20198252 NR Description: subtilisin-like serine protease AIR3 [Arabidopsis
  misc_feature (34)..(787): Homolog of NCBI NO: 9757901 NR Description: serine protease-like protein [Arabidopsis
  misc_feature (23)..(787): Homolog of NCBI NO: 11358862 NR Description: subtilisin-like proteinase AIR3, auxin-induced
  misc_feature (23)..(787): Homolog of NCBI NO: 22325457 NR Description: subtilisin-like serine protease AIR3; protein id:
  misc_feature (35)..(790): Homolog of NCBI NO: 24414066 NR Description: subtilisin-like serine protease
MATRWRRSLLWVAVVQFLTLCVAEHLVVEAYKKSYIVYLGSHAYGRDASAEEHARATQSHHHLLASILGGDDDHHHETARQSIFYSYTKSSINGFAAHLEESVAQQIAEHPEVVAVLESKMLKLHTTRSWDFMDLERDGHVLPGSIWNHARFGQDVIIASLDSGVWPESHSFQDDGGQVPARWKGSCQDTVKYGVACNRKLIGARFFNKDMLFSNPAVVNANWTRDTEGHGTHTLSTAAGGFVPRASLFGYATGTAKGGAPRARVAAYKVCWSGECAAADVLAGFESAIHDGADVISVSFGQDAPLADDVKSLFHEPVMLGSLHAAIHGVSVICSAGNSGPYDDTVVNAAPWVTTVAATTVDRDFPNVLTLGNSVRLRGTSLESTTLHSSMLYPMIDAARAARTTSNPYDAASCGLGTLDPAAIRGKIVVCRRGGGGGGDVSRVSKGMAVLEAGGAGMILANDRMDGDDIVADPHVLPATMITYSEAVSLYGYMESTSNPVANISPAKTEVGVKNSPSVAGFSSRGPSGTLPYVLKPDIAAPGVDILAAFTEYVGPTELASDKRRSEYAILSGTSMACPHVSGVIALLKAARPEWSPAAMRSAIMTTARTQDNTGAPMRDHDGKEANAFAYGAGNVHPNRAVDPGLVYDAGPDDYFTFLCAMGISAADMKRLSAGKFACPANSAKEAPAMEDLNYPSIVVPSLRGTQTVTRRLKNVGRPAKYLASWRAPVGITMEVKPRVLEFSKVGEEKEFKVTVTSQQDKLGMGYVFGRLVWTDGTHYVRSPVVVNALA

SEQ ID NO: 18286 - protein, 671 aa, Zea mays subsp. mays
  peptide (1)..(671): Ceres Seq. ID no. 12361502
  misc_feature (266)..(374): Pfam Name: PA domain Pfam Description: PA domain
  misc_feature (1)..(668): Homolog of NCBI NO: 18425181 NR Description: subtilisin-like serine protease ARA12
  misc_feature (1)..(665): Homolog of NCBI NO: 7435657 NR Description: subtilisin-like proteinase (EC 3.4.21.-) 1 -
  misc_feature (1)..(670): Homolog of NCBI NO: 18418552 NR Description: subtilisin-like serine protease
  misc_feature (1)..(666): Homolog of NCBI NO: 34911518 NR Description: putative subtilisin-like protease
  misc_feature (1)..(649): Homolog of NCBI NO: 26451139 NR Description: putative subtilisin-like protease [Arabidopsis
  misc_feature (1)..(652): Homolog of NCBI NO: 20198252 NR Description: subtilisin-like serine protease AIR3 [Arabidopsis
  misc_feature (1)..(667): Homolog of NCBI NO: 9757901 NR Description: serine protease-like protein [Arabidopsis
  misc_feature (1)..(667): Homolog of NCBI NO: 11358862 NR Description: subtilisin-like proteinase AIR3, auxin-induced
  misc_feature (1)..(667): Homolog of NCBI NO: 22325457 NR Description: subtilisin-like serine protease AIR3; protein id:
  misc_feature (1)..(670): Homolog of NCBI NO: 24414066 NR Description: subtilisin-like serine protease
MLKLHTTRSWDFMDLERDGHVLPGSIWNHARFGQDVIIASLDSGVWPESHSFQDDGGQVPARWKGSCQDTVKYGVACNRKLIGARFFNKDMLFSNPAVVNANWTRDTEGHGTHTLSTAAGGFVPRASLFGYATGTAKGGAPRARVAAYKVCWSGECAAADVLAGFESAIHDGADVISVSFGQDAPLADDVKSLFHEPVMLGSLHAAIHGVSVICSAGNSGPYDDTVVNAAPWVTTVAATTVDRDFPNVLTLGNSVRLRGTSLESTTLHSSMLYPMIDAARAARTTSNPYDAASCGLGTLDPAAIRGKIVVCRRGGGGGGDVSRVSKGMAVLEAGGAGMILANDRMDGDDIVADPHVLPATMITYSEAVSLYGYMESTSNPVANISPAKTEVGVKNSPSVAGFSSRGPSGTLPYVLKPDIAAPGVDILAAFTEYVGPTELASDKRRSEYAILSGTSMACPHVSGVIALLKAARPEWSPAAMRSAIMTTARTQDNTGAPMRDHDGKEANAFAYGAGNVHPNRAVDPGLVYDAGPDDYFTFLCAMGISAADMKRLSAGKFACPANSAKEAPAMEDLNYPSIVVPSLRGTQTVTRRLKNVGRPAKYLASWRAPVGITMEVKPRVLEFSKVGEEKEFKVTVTSQQDKLGMGYVFGRLVWTDGTHYVRSPVVVNALA

SEQ ID NO: 18287 - protein, 659 aa, Zea mays subsp. mays
  peptide (1)..(659): Ceres Seq. ID no. 12361503
  misc_feature (254)..(362): Pfam Name: PA domain Pfam Description: PA domain
  misc_feature (1)..(656): Homolog of NCBI NO: 18425181 NR Description: subtilisin-like serine protease ARA12
  misc_feature (1)..(653): Homolog of NCBI NO: 7435657 NR Description: subtilisin-like proteinase (EC 3.4.21.-) 1 -
  misc_feature (1)..(658): Homolog of NCBI NO: 18418552 NR Description: subtilisin-like serine protease
  misc_feature (1)..(654): Homolog of NCBI NO: 34911518 NR Description: putative subtilisin-like protease
  misc_feature (1)..(637): Homolog of NCBI NO: 26451139 NR Description: putative subtilisin-like protease [Arabidopsis
  misc_feature (1)..(640): Homolog of NCBI NO: 20198252 NR Description: subtilisin-like serine protease AIR3 [Arabidopsis
  misc_feature (1)..(655): Homolog of NCBI NO: 9757901 NR Description: serine protease-like protein [Arabidopsis
  misc_feature (1)..(655): Homolog of NCBI NO: 11358862 NR Description: subtilisin-like proteinase AIR3, auxin-induced
  misc_feature (1)..(655): Homolog of NCBI NO: 22325457 NR Description: subtilisin-like serine protease AIR3; protein id:
  misc_feature (1)..(658): Homolog of NCBI NO: 24414066 NR Description: subtilisin-like serine protease
MDLERDGHVLPGSIWNHARFGQDVIIASLDSGVWPESHSFQDDGGQVPARWKGSCQDTVKYGVACNRKLIGARFFNKDMLFSNPAVVNANWTRDTEGHGTHTLSTAAGGFVPRASLFGYATGTAKGGAPRARVAAYKVCWSGECAAADVLAGFESAIHDGADVISVSFGQDAPLADDVKSLFHEPVMLGSLHAAIHGVSVICSAGNSGPYDDTVVNAAPWVTTVAATTVDRDFPNVLTLGNSVRLRGTSLESTTLHSSMLYPMIDAARAARTTSNPYDAASCGLGTLDPAAIRGKIVVCRRGGGGGGDVSRVSKGMAVLEAGGAGMILANDRMDGDDIVADPHVLPATMITYSEAVSLYGYMESTSNPVANISPAKTEVGVKNSPSVAGFSSRGPSGTLPYVLKPDIAAPGVDILAAFTEYVGPTELASDKRRSEYAILSGTSMACPHVSGVIALLKAARPEWSPAAMRSAIMTTARTQDNTGAPMRDHDGKEANAFAYGAGNVHPNRAVDPGLVYDAGPDDYFTFLCAMGISAADMKRLSAGKFACPANSAKEAPAMEDLNYPSIVVPSLRGTQTVTRRLKNVGRPAKYLASWRAPVGITMEVKPRVLEFSKVGEEKEFKVTVTSQQDKLGMGYVFGRLVWTDGTHYVRSPVVVNALA

SEQ ID NO: 18288 - DNA, 1885 bp, Zea mays subsp. mays; identical to SEQ ID NO: 13952
  misc_feature (1)..(1885): Ceres Seq. ID no. 12435283
  misc_feature: MA Experiment ID: 108504 Result: Down-regulated in Transcription
  misc_feature: MA Experiment 108504 PARAMETER Experiment Name: Zm_Drought_P Parameter: Age (day) Value: 8
  misc_feature: MA Experiment 108504 PARAMETER Experiment Name: Zm_Drought_P Parameter: Organism Value: Zea mays
  misc_feature: MA Experiment 108504 PARAMETER Experiment Name: Zm_Drought_P Parameter: Plant Line Value: 35A19
  misc_feature: MA Experiment 108504 PARAMETER Experiment Name: Zm_Drought_P Parameter: Timepoint (hr) Value: 12
  misc_feature: MA Experiment 108504 PARAMETER Experiment Name: Zm_Drought_P Parameter: Tissue Value: Aerial
  misc_feature: MA Experiment 108504 PARAMETER Experiment Name: Zm_Drought_P Parameter: Treatment Value: Drought vs. No Drought
  misc_feature: MA Experiment ID: 108535 Result: Down-regulated in Transcription
  misc_feature: MA Experiment 108535 PARAMETER Experiment Name: Zm_Meristem_P Parameter: Age (day) Value: 8
  misc_feature: MA Experiment 108535 PARAMETER Experiment Name: Zm_Meristem_P Parameter: Organism Value: Zea mays
  misc_feature: MA Experiment 108535 PARAMETER Experiment Name: Zm_Meristem_P Parameter: Plant Line Value: 35A19
  misc_feature: MA Experiment 108535 PARAMETER Experiment Name: Zm_Meristem_P Parameter: Tissue Value: Root Meristem vs. Above Root Meristem
  misc_feature: MA Experiment ID: 108544 Result: Down-regulated in Transcription
  misc_feature: MA Experiment ID: 108687 Result: Down-regulated in Transcription
  misc_feature: MA Experiment 108687 PARAMETER Experiment Name: Zm_Embryos-Flowers__P Parameter: Tissue Value: Embryo vs. Aerial+
  misc_feature: MA Experiment ID: 108689 Result: Down-regulated in Transcription
  misc_feature: MA Experiment 108689 PARAMETER Experiment Name: Zm_Drought_Roots_P Parameter: Age (day) Value: 9
  misc_feature: MA Experiment 108689 PARAMETER Experiment Name: Zm_Drought_Roots_P Parameter: Organism Value: Zea mays
  misc_feature: MA Experiment 108689 PARAMETER Experiment Name: Zm_Drought_Roots_P Parameter: Plant Line Value: 35A19
  misc_feature: MA Experiment 108689 PARAMETER Experiment Name: Zm_Drought_Roots_P Parameter: Timepoint (hr) Value: 24
  misc_feature: MA Experiment 108689 PARAMETER Experiment Name: Zm_Drought_Roots_P Parameter: Tissue Value: Roots
  misc_feature: MA Experiment 108689 PARAMETER Experiment Name: Zm_Drought_Roots_P Parameter: Treatment Value: Drought vs. No Drought
  misc_feature: MA Experiment ID: 20000477 Result: Down-regulated in Transcription
  misc_feature: MA Experiment 20000477 PARAMETER Experiment Name: Zm_5mM_SA_P Parameter: Age (day) Value: 10
  misc_feature: MA Experiment 20000477 PARAMETER Experiment Name: Zm_5mM_SA_P Parameter: Organism Value: Zea mays
  misc_feature: MA Experiment 20000477 PARAMETER Experiment Name: Zm_5mM_SA_P Parameter: Plant Line Value: 35A19
  misc_feature: MA Experiment 20000477 PARAMETER Experiment Name: Zm_5mM_SA_P Parameter: Timepoint (hr) Value: 48
  misc_feature: MA Experiment 20000477 PARAMETER Experiment Name: Zm_5mM_SA_P Parameter: Tissue Value: Aerial
  misc_feature: MA Experiment 20000477 PARAMETER Experiment Name: Zm_5mM_SA_P Parameter: Treatment Value: 5mM SA vs. No Treatment
  misc_feature: MA Experiment ID: 20000478 Result: Down-regulated in Transcription
  misc_feature: MA Experiment 20000478 PARAMETER Experiment Name: Zm_5mM_SA_P Parameter: Age (day) Value: 11
  misc_feature: MA Experiment 20000478 PARAMETER Experiment Name: Zm_5mM_SA_P Parameter: Organism Value: Zea mays
  misc_feature: MA Experiment 20000478 PARAMETER Experiment Name: Zm_5mM_SA_P Parameter: Plant Line Value: 35A19
  misc_feature: MA Experiment 20000478 PARAMETER Experiment Name: Zm_5mM_SA_P Parameter: Timepoint (hr) Value: 72
  misc_feature: MA Experiment 20000478 PARAMETER Experiment Name: Zm_5mM_SA_P Parameter: Tissue Value: Aerial
  misc_feature: MA Experiment 20000478 PARAMETER Experiment Name: Zm_5mM_SA_P Parameter: Treatment Value: 5mM SA vs. No Treatment
  misc_feature: MA Experiment ID: 20000535 Result: Down-regulated in Transcription
  misc_feature: MA Experiment 20000535 PARAMETER Experiment Name: Zm_Hybrid_Seed_Dev_P Parameter: DAP Value: 30 vs. 12
  misc_feature: MA Experiment 20000535 PARAMETER Experiment Name: Zm_Hybrid_Seed_Dev_P Parameter: Organism Value: Zea mays
  misc_feature: MA Experiment 20000535 PARAMETER Experiment Name: Zm_Hybrid_Seed_Dev_P Parameter: Plant Line Value: 35A19
  misc_feature: MA Experiment 20000535 PARAMETER Experiment Name: Zm_Hybrid_Seed_Dev_P Parameter: Tissue Value: Embryo vs. Unfert Floret
  misc_feature: MA Experiment ID: 20001613 Result: Down-regulated in Transcription
  misc_feature: MA Experiment 20001613 PARAMETER Experiment Name: Zm_50ppm_KNO3_L-to-H_P Parameter: Age (day) Value: 20
  misc_feature: MA Experiment 20001613 PARAMETER Experiment Name: Zm_50ppm_KNO3_L-to-H_P Parameter: Organism Value: Zea mays
  misc_feature: MA Experiment 20001613 PARAMETER Experiment Name: Zm_50ppm_KNO3_L-to-H_P Parameter: Plant Line Value: 35A19
  misc_feature: MA Experiment 20001613 PARAMETER Experiment Name: Zm_50ppm_KNO3_L-to-H_P Parameter: Timepoint (hr) Value: 24
  misc_feature: MA Experiment 20001613 PARAMETER Experiment Name: Zm_50ppm_KNO3_L-to-H_P Parameter: Tissue Value: Roots
  misc_feature: MA Experiment 20001613 PARAMETER Experiment Name: Zm_50ppm_KNO3_L-to-H_P Parameter: Treatment Value: 50ppm KNO3 vs. 50ppm KCl

SEQ ID NO: 18289 - protein, 548 aa, Zea mays subsp. mays; identical to SEQ ID NO: 13953
  peptide (1)..(548): Ceres Seq. ID no. 12435284
  misc_feature (100)..(328): Pfam Name: HlyD family secretion protein Pfam Description: HlyD family secretion protein
  misc_feature (1)..(35): Homolog of NCBI NO: 11991110 NR Description: monosaccharide transporter 1 [Oryza sativa]

SEQ ID NO: 18290 - protein, 534 aa, Zea mays subsp. mays; identical to SEQ ID NO: 13954
  peptide (1)..(534): Ceres Seq. ID no. 12435285
  misc_feature (86)..(314): Pfam Name: HlyD family secretion protein Pfam Description: HlyD family secretion protein
  misc_feature (1)..(21): Homolog of NCBI NO: 11991110 NR Description: monosaccharide transporter 1 [Oryza sativa]

SEQ ID NO: 18291 - protein, 458 aa, Zea mays subsp. mays; identical to SEQ ID NO: 13955
  peptide (1)..(458): Ceres Seq. ID no. 12435286
  misc_feature (1)..(437): Pfam Name: Sugar (and other) transporter Pfam Description: Sugar (and other) transporter
  misc_feature (1)..(448): Homolog of NCBI NO: 32489200 NR Description: OSJNBa0027G07.27 [Oryza sativa (japonica
  misc_feature (1)..(458): Homolog of NCBI NO: 11991110 NR Description: monosaccharide transporter 1 [Oryza sativa]
  misc_feature (1)..(449): Homolog of NCBI NO: 21741620 NR Description: OSJNBa0027G07.12 [Oryza sativa (japonica
  misc_feature (1)..(447): Homolog of NCBI NO: 21740734 NR Description: OSJNBa0086B14.28 [Oryza sativa (japonica
  misc_feature (1)..(448): Homolog of NCBI NO: 15218693 NR Description: monosaccharide transporter, putative; protein id: [Arabidopsis thaliana] >gi|16945177|emb|CAC69071.2| STP5 protein thaliana] >gi|26452050|dbj|BAC43115.1| putative monosaccharide
  misc_feature (1)..(453): Homolog of NCBI NO: 30349813 NR Description: putative monosaccharide-H+ symporter [Medicago
  misc_feature (1)..(450): Homolog of NCBI NO: 34915514 NR Description: monosaccharide transporter 3 [Oryza sativa
  misc_feature (1)..(449): Homolog of NCBI NO: 30349804 NR Description: monosaccharide-H+ symporter [Datisca glomerata]
  misc_feature (1)..(449): Homolog of NCBI NO: 3915039 NR Description: Sugar carrier protein C >gi|7446731|pir||T10122
  misc_feature (1)..(449): Homolog of NCBI NO: 81619 NR Description: glucose transport protein STP1 - Arabidopsis >gi|16520|emb|CAA39037.1| glucose transporter [Arabidopsis

SEQ ID NO: 18292 - DNA, 1889 bp, Zea mays subsp. mays
  misc_feature (1)..(1889): Ceres Seq. ID no. 12359044
  misc_feature: MA Experiment ID: 108527 Result: Up-regulated in Transcription
  misc_feature: MA Experiment 108527 PARAMETER Experiment Name: Zm_5mM_NO_P Parameter: Age (day) Value: 8
  misc_feature: MA Experiment 108527 PARAMETER Experiment Name: Zm_5mM_NO_P Parameter: Organism Value: Zea mays
  misc_feature: MA Experiment 108527 PARAMETER Experiment Name: Zm_5mM_NO_P Parameter: Plant Line Value: 35A19
  misc_feature: MA Experiment 108527 PARAMETER Experiment Name: Zm_5mM_NO_P Parameter: Timepoint (hr) Value: 6
  misc_feature: MA Experiment 108527 PARAMETER Experiment Name: Zm_5mM_NO_P Parameter: Tissue Value: Aerial
  misc_feature: MA Experiment 108527 PARAMETER Experiment Name: Zm_5mM_NO_P Parameter: Treatment Value: 5mM NO vs. No Treatment
  misc_feature: MA Experiment ID: 108535 Result: Up-regulated in Transcription
  misc_feature: MA Experiment 108535 PARAMETER Experiment Name: Zm_Meristem_P Parameter: Age (day) Value: 8
  misc_feature: MA Experiment 108535 PARAMETER Experiment Name: Zm_Meristem_P Parameter: Organism Value: Zea mays
  misc_feature: MA Experiment 108535 PARAMETER Experiment Name: Zm_Meristem_P Parameter: Plant Line Value: 35A19
  misc_feature: MA Experiment 108535 PARAMETER Experiment Name: Zm_Meristem_P Parameter: Tissue Value: Root Meristem vs. Above Root Meristem
cccggtttattttttcttcgtcctggatgcgtcggtcgcgtgtttgatctgactaagccgcggaggagggtgctagatgtccgtgcggtgggcggtggctcccgagggcgaccggagttaggtccttgccgccttcagtgcggtggggaagcgagacattgaaggcgcagaacccaaagaatgggtaagagaggaaagtggtttagtgcggtgaagaaagtcttcagctcctccgatccagatggaaaggaagccaaggcccagaaggcagacaaatcgaaatccaagaggagatggccatttggaaagtccaagcactcggagccttccatatcgacggtgccaggcactgctccagcagtagctccgttgccatcaccaccagcaactcagccccactctctgggagatcaaagatgtcaatccagttgaaacagacagtgagcagaacaagcatgcctactccgttgcgcttgcgtctgctgtcgctgctgaagctgcagcagttgctgcccaggctgctgcggaagttgtccgcctcacagcagttaccacggctgcaccaaagatgcctgttagttcgagggaataacttgccgccaccaagattcagactgccttcaggggttatctggcaaggagagcattgcgtgcactaagagggctagttagattgaagtcgcttgttgatggaaatgctgtcaaacgccaaaccgctcacaccttgcaatgcacacaagcaatgacaagagttcaaactcaaatctactctagaagggtgaagttggaggaggagaaacaggctcttcaaagacaactccaattgaaacatcaaagggaacttgagaaaatgaagattgatgaagattgggatcacagccatcaatccaaagagcaaattgaggccaacctaatgatgaaacaggaagctgcactgaggcgagagagagcacttgcatatgcattttctcaccagtggaggaattctggtcgaactataacccctacttttacggaacctgggaaccccaactggggctggagctggatggagcgctggatgacagcaagaccatgggagagtcggttggcggcggcatcggacaaggaccctaaagaacgtgctgtgacaaagaatgcgagcaccagtgctgttcgagtacctgtatcccgtgccatctcgattcagagaccagcaacaccaaacaagtcgagccgcccaccaagccggcagtcactttcaaccccgccatcgaagaccccgtcagcctcaggaaaggccaggccggcaagtccaaggaacagttggctgtacaaggaggatgacctgaggagcatcacgagcatccgctccgagcgcccaaggaggcagagcacgggtggaggctcggtccgggacgataccagcctgaccagcacaccacctctccccagctacatgcagtcgaccgagtctgcacgggccaagtctcggtaccgcagtctactactgactgagaagcttgaggttcctgagagagcgcctctggcccactccgttgtcaagaagcgcctgtcgttccccgtcgtcgagaagccaagcgttgtgccgacagagaagcccagggaaagagtgaggcgccattccgaccctccgaaggtcgatcctgcgacgctcaaggatgcccctgctgcctgaccagtgaccaggccttatgtgattgttaggtttcgtgctcttttaacaccgtgatgtattatctgagttaggttgctttgttcgtgtcatcgtatgatctgtccgggttgattttgagacagttctaactgtgtttacagacaatgcgtgatgctaaatgtatgtgtggttggttggctttaaatgtactgatatgatagtatttgatttc

SEQ ID NO: 18293 - protein, 311 aa, Zea mays subsp. mays
  peptide (1)..(311): Ceres Seq. ID no. 12359045
  misc_feature (1)..(288): Homolog of NCBI NO: 15225258 NR Description: putative SF16 protein {Helianthus annuus}
  misc_feature (1)..(278): Homolog of NCBI NO: 11994738 NR Description: contains similarity to SF16
  misc_feature (1)..(211): Homolog of NCBI NO: 15233296 NR Description: unknown protein; protein id: At3g22190.1
  misc_feature (1)..(224): Homolog of NCBI NO: 11292162 NR Description: hypothetical protein F15A17.70 - Arabidopsis
  misc_feature (1)..(204): Homolog of NCBI NO: 15225299 NR Description: putative SF16 protein {Helianthus annuus}
  misc_feature (1)..(306): Homolog of NCBI NO: 15232741 NR Description: putative SF16 protein; protein id: At3g09710.1
  misc_feature (1)..(127): Homolog of NCBI NO: 18414094 NR Description: putative protein
  misc_feature (1)..(188): Homolog of NCBI NO: 15231175 NR Description: unknown protein; protein id: At3g52290.1
  misc_feature (1)..(288): Homolog of NCBI NO: 15982840 NR Description: AT5g03040/F15A17_70 [Arabidopsis thaliana]
  misc_feature (1)..(38): Homolog of NCBI NO: 34908016 NR Description: P0460C04.18 [Oryza sativa (japonica
MTRVQTQIYSRRVKLEEEKQALQRQLQLKHQRELEKMKIDEDWDHSHQSKEQIEANLMMKQEAALRRERALAYAFSHQWRNSGRTITPTFTEPGNPNWGWSWMERWMTARPWESRLAAASDKDPKERAVTKNASTSAVRVPVSRAISIQRPATPNKSSRPPSRQSLSTPPSKTPSASGKARPASPRNSWLYKEDDLRSITSIRSERPRRQSTGGGSVRDDTSLTSTPPLPSYMQSTESARAKSRYRSLLLTEKLEVPERAPLAHSVVKKRLSFPVVEKPSVVPTEKPRERVRRHSDPPKVDPATLKDAPAA

SEQ ID NO: 18294 - protein, 275 aa, Zea mays subsp. mays
  peptide (1)..(275): Ceres Seq. ID no. 12359046
  misc_feature (1)..(208): Homolog of NCBI NO: 34903518 NR Description: P0001B06.11 [Oryza sativa (japonica
  misc_feature (1)..(252): Homolog of NCBI NO: 15225258 NR Description: putative SF16 protein {Helianthus annuus}
  misc_feature (1)..(242): Homolog of NCBI NO: 11994738 NR Description: contains similarity to SF16
  misc_feature (1)..(175): Homolog of NCBI NO: 15233296 NR Description: unknown protein; protein id: At3g22190.1
  misc_feature (1)..(188): Homolog of NCBI NO: 11292162 NR Description: hypothetical protein F15A17.70 - Arabidopsis
  misc_feature (1)..(168): Homolog of NCBI NO: 15225299 NR Description: putative SF16 protein {Helianthus annuus}
  misc_feature (1)..(270): Homolog of NCBI NO: 15232741 NR Description: putative SF16 protein; protein id: At3g09710.1
  misc_feature (1)..(91): Homolog of NCBI NO: 18414094 NR Description: putative protein
  misc_feature (1)..(152): Homolog of NCBI NO: 15231175 NR Description: unknown protein; protein id: At3g52290.1
  misc_feature (1)..(252): Homolog of NCBI NO: 15982840 NR Description: AT5g03040/F15A17_70 [Arabidopsis thaliana]
MKIDEDWDHSHQSKEQIEANLMMKQEAALRRERALAYAFSHQWRNSGRTITPTFTEPGNPNWGWSWMERWMTARPWESRLAAASDKDPKERAVTKNASTSAVRVPVSRAISIQRPATPNKSSRPPSRQSLSTPPSKTPSASGKARPASPRNSWLYKEDDLRSITSIRSERPRRQSTGGGSVRDDTSLTSTPPLPSYMQSTESARAKSRYRSLLLTEKLEVPERAPLAHSVVKKRLSFPVVEKPSVVPTEKPRERVRRHSDPPKVDPATLKDAPAA

SEQ ID NO: 18295 - protein, 254 aa, Zea mays subsp. mays
  peptide (1)..(254): Ceres Seq. ID no. 12359047
  misc_feature (1)..(187): Homolog of NCBI NO: 34903518 NR Description: P0001B06.11 [Oryza sativa (japonica
  misc_feature (1)..(231): Homolog of NCBI NO: 15225258 NR Description: putative SF16 protein {Helianthus annuus}
  misc_feature (1)..(221): Homolog of NCBI NO: 11994738 NR Description: contains similarity to SF16
  misc_feature (1)..(154): Homolog of NCBI NO: 15233296 NR Description: unknown protein; protein id: At3g22190.1
  misc_feature (1)..(167): Homolog of NCBI NO: 11292162 NR Description: hypothetical protein F15A17.70 - Arabidopsis
  misc_feature (1)..(147): Homolog of NCBI NO: 15225299 NR Description: putative SF16 protein {Helianthus annuus}
  misc_feature (1)..(249): Homolog of NCBI NO: 15232741 NR Description: putative SF16 protein; protein id: At3g09710.1
  misc_feature (1)..(70): Homolog of NCBI NO: 18414094 NR Description: putative protein
  misc_feature (1)..(131): Homolog of NCBI NO: 15231175 NR Description: unknown protein; protein id: At3g52290.1
  misc_feature (1)..(231): Homolog of NCBI NO: 15982840 NR Description: AT5g03040/F15A17_70 [Arabidopsis thaliana]
MMKQEAALRRERALAYAFSHQWRNSGRTITPTFTEPGNPNWGWSWMERWMTARPWESRLAAASDKDPKERAVTKNASTSAVRVPVSRAISIQRPATPNKSSRPPSRQSLSTPPSKTPSASGKARPASPRNSWLYKEDDLRSITSIRSERPRRQSTGGGSVRDDTSLTSTPPLPSYMQSTESARAKSRYRSLLLTEKLEVPERAPLAHSVVKKRLSFPVVEKPSVVPTEKPRERVRRHSDPPKVDPATLKDAPAA

SEQ ID NO: 18296 - DNA, 1718 bp, Zea mays subsp. mays
  misc_feature (1)..(1718): Ceres Seq. ID no. 12368120
  misc_feature: MA Experiment ID: 108543 Result: Down-regulated in Transcription
gaggaagccttggcctgccgaccaaaccatgcttgcgcgccgactcgcggcccccgacggcggtaggctgttctctgcggcgtcctccgcctccgcccgaggcggtcacgcgggtggcgacacactagggaagcgcctgctgaagctcatctacccgaagcggagcgcggtggtggtgctgcagcggtgggcggacgaaggccgcaccgtgcagaagtaccagctcaaccgcgtcgtcagggagcttcggaagtacggtcgcttcaagcacgccctggagatatgcgagtggatgcggacccagccggagatgcggctgcttccgggggatcacgcggtgcaccttgacctcgtcgccaaggtcaggggactcgccagtgccaccaagttcttcgaggacatgccggagcgcgccaaggggccgtccacctgcaacgcgctgctgcacgcgtacgtacagaatggcgcaagagagaaggccgaggccatgctggcggagatggcccgtgttgggtacctcacctgtgccctgcccttcaaccacatgatgtcgctctacatggcgactggtgagctcgagcgggtgccagaaatgatcaaggagctaaggaggtacacactccccgacctcgttacctacaacatatggctgacatactgctccaaaaaggacagcgtgaagagtgccgaaaaggtctttggtctgatgaaggatgactgcgtggttcctgattggatgaccttcagcttgctcggtagcatttacatcaacgccggactccatgtggaaggtcggaacgcgttggtggagatggagaagagggcctccaggaaggagcgagctgcttactcatcgctcctcaccctgtatgcaagcttgtcagatagaggtaacttggacagagtatggaataagatgagaggaaccttcaggaagttcagtgacacagagtacaagtgcatgctcacttccctcttgaggtttgacgacatagcagcagcagaaagcatttttagtgagtgggaatcaacatctggaacacgtgattcaaggatcccaaacacgatcctttcatattacatcaagaatggcatgataaaaaaggcagagagctttcttgaccacattgtggagaaaggagtcaagcccagctatagcacatgggaggcattcgtctggggttatctcggtgacaagacggacaaagtccttgagtgcatgaagaaagccctgtcatgcttggagaaatgggagccgaaccatgagctcgctaccgcgatcttttctcagatcgagaagacaggtgacattgaagctgcagagaagctcctggtcatattccgggatgcagagtatgttaccactgagatgtacaactcagtcttgcgcacttatgcagaggccaagctcatgcctctgatagttgacgaacgcatggagcaggataaggtggccatggatgtggaaaccaagagattgttgaggttgaccagcaaatatccaatcggtgaggtttcagtatcgatgtcttgaggtgtgccaacaatagaagggtgtttcaggatgcaatgtgtactagcccttacgttttcatgcactttagttctgaagtacaatgcaatgcaaataacaaacatttagttttgaagtgcaatacagatggttgtgattttttttgcatacttatctaacttgttggactgtattgtctctatct

SEQ ID NO: 18297 - protein, 510 aa, Zea mays subsp. mays
  peptide (1)..(510): Ceres Seq. ID no. 12368121
  misc_feature (177)..(210): Pfam Name: PPR repeat Pfam Description: PPR repeat
  misc_feature (40)..(476): Homolog of NCBI NO: 15225409 NR Description: hypothetical protein; protein id: At2g20710.1
  misc_feature (22)..(463): Homolog of NCBI NO: 34393591 NR Description: putative DNA-binding protein
  misc_feature (41)..(498): Homolog of NCBI NO: 22328859 NR Description: unknown protein; protein id: At4g21705.1
  misc_feature (38)..(494): Homolog of NCBI NO: 37535776 NR Description: putative leaf protein [Oryza sativa (japonica
  misc_feature (22)..(484): Homolog of NCBI NO: 15240937 NR Description: putative protein; protein id: At5g27460.1
  misc_feature (70)..(494): Homolog of NCBI NO: 15219808 NR Description: hypothetical protein; protein id: At1g60770.1
  misc_feature (44)..(462): Homolog of NCBI NO: 20453085 NR Description: At1g02150/T7I23.8 [Arabidopsis thaliana]
  misc_feature (44)..(462): Homolog of NCBI NO: 22329290 NR Description: hypothetical protein
  misc_feature (20)..(510): Homolog of NCBI NO: 17064738 NR Description: Unknown protein [Arabidopsis thaliana]
  misc_feature (20)..(510): Homolog of NCBI NO: 15235508 NR Description: hypothetical protein
RKPWPADQTMLARRLAAPDGGRLFSAASSASARGGHAGGDTLGKRLLKLIYPKRSAVVVLQRWADEGRTVQKYQLNRVVRELRKYGRFKHALEICEWMRTQPEMRLLPGDHAVHLDLVAKVRGLASATKFFEDMPERAKGPSTCNALLHAYVQNGAREKAEAMLAEMARVGYLTCALPFNHMMSLYMATGELERVPEMIKELRRYTLPDLVTYNIWLTYCSKKDSVKSAEKVFGLMKDDCVVPDWMTFSLLGSIYINAGLHVEGRNALVEMEKRASRKERAAYSSLLTLYASLSDRGNLDRVWNKMRGTFRKFSDTEYKCMLTSLLRFDDIAAAESIFSEWESTSGTRDSRIPNTILSYYIKNGMIKKAESFLDHIVEKGVKPSYSTWEAFVWGYLGDKTDKVLECMKKALSCLEKWEPNHELATAIFSQIEKTGDIEAAEKLLVIFRDAEYVTTEMYNSVLRTYAEAKLMPLIVDERMEQDKVAMDVETKRLLRLTSKYPIGEVSVSMS

SEQ ID NO: 18298 - protein, 501 aa, Zea mays subsp. mays
  peptide (1)..(501): Ceres Seq. ID no. 12368122
  misc_feature (168)..(201): Pfam Name: PPR repeat Pfam Description: PPR repeat
  misc_feature (31)..(467): Homolog of NCBI NO: 15225409 NR Description: hypothetical protein; protein id: At2g20710.1
  misc_feature (13)..(454): Homolog of NCBI NO: 34393591 NR Description: putative DNA-binding protein
  misc_feature (32)..(489): Homolog of NCBI NO: 22328859 NR Description: unknown protein; protein id: At4g21705.1
  misc_feature (29)..(485): Homolog of NCBI NO: 37535776 NR Description: putative leaf protein [Oryza sativa (japonica
  misc_feature (13)..(475): Homolog of NCBI NO: 15240937 NR Description: putative protein; protein id: At5g27460.1
  misc_feature (61)..(485): Homolog of NCBI NO: 15219808 NR Description: hypothetical protein; protein id: At1g60770.1
  misc_feature (35)..(453): Homolog of NCBI NO: 20453085 NR Description: At1g02150/T7I23.8 [Arabidopsis thaliana]
  misc_feature (35)..(453): Homolog of NCBI NO: 22329290 NR Description: hypothetical protein
  misc_feature (11)..(501): Homolog of NCBI NO: 17064738 NR Description: Unknown protein [Arabidopsis thaliana]
  misc_feature (11)..(501): Homolog of NCBI NO: 15235508 NR Description: hypothetical protein
MLARRLAAPDGGRLFSAASSASARGGHAGGDTLGKRLLKLIYPKRSAVVVLQRWADEGRTVQKYQLNRVVRELRKYGRFKHALEICEWMRTQPEMRLLPGDHAVHLDLVAKVRGLASATKFFEDMPERAKGPSTCNALLHAYVQNGAREKAEAMLAEMARVGYLTCALPFNHMMSLYMATGELERVPEMIKELRRYTLPDLVTYNIWLTYCSKKDSVKSAEKVFGLMKDDCVVPDWMTFSLLGSIYINAGLHVEGRNALVEMEKRASRKERAAYSSLLTLYASLSDRGNLDRVWNKMRGTFRKFSDTEYKCMLTSLLRFDDIAAAESIFSEWESTSGTRDSRIPNTILSYYIKNGMIKKAESFLDHIVEKGVKPSYSTWEAFVWGYLGDKTDKVLECMKKALSCLEKWEPNHELATAIFSQIEKTGDIEAAEKLLVIFRDAEYVTTEMYNSVLRTYAEAKLMPLIVDERMEQDKVAMDVETKRLLRLTSKYPIGEVSVSMS

SEQ ID NO: 18299 - protein, 413 aa, Zea mays subsp. mays
  peptide (1)..(413): Ceres Seq. ID no. 12368123
  misc_feature (80)..(113): Pfam Name: PPR repeat Pfam Description: PPR repeat
  misc_feature (1)..(379): Homolog of NCBI NO: 15225409 NR Description: hypothetical protein; protein id: At2g20710.1
  misc_feature (1)..(366): Homolog of NCBI NO: 34393591 NR Description: putative DNA-binding protein
  misc_feature (1)..(401): Homolog of NCBI NO: 22328859 NR Description: unknown protein; protein id: At4g21705.1
  misc_feature (1)..(397): Homolog of NCBI NO: 37535776 NR Description: putative leaf protein [Oryza sativa (japonica
  misc_feature (1)..(387): Homolog of NCBI NO: 15240937 NR Description: putative protein; protein id: At5g27460.1
  misc_feature (1)..(397): Homolog of NCBI NO: 15219808 NR Description: hypothetical protein; protein id: At1g60770.1
  misc_feature (1)..(365): Homolog of NCBI NO: 20453085 NR Description: At1g02150/T7I23.8 [Arabidopsis thaliana]
  misc_feature (1)..(365): Homolog of NCBI NO: 22329290 NR Description: hypothetical protein
  misc_feature (1)..(413): Homolog of NCBI NO: 17064738 NR Description: Unknown protein [Arabidopsis thaliana]
  misc_feature (1)..(413): Homolog of NCBI NO: 15235508 NR Description: hypothetical protein
MRTQPEMRLLPGDHAVHLDLVAKVRGLASATKFFEDMPERAKGPSTCNALLHAYVQNGAREKAEAMLAEMARVGYLTCALPFNHMMSLYMATGELERVPEMIKELRRYTLPDLVTYNIWLTYCSKKDSVKSAEKVFGLMKDDCVVPDWMTFSLLGSIYINAGLHVEGRNALVEMEKRASRKERAAYSSLLTLYASLSDRGNLDRVWNKMRGTFRKFSDTEYKCMLTSLLRFDDIAAAESIFSEWESTSGTRDSRIPNTILSYYIKNGMIKKAESFLDHIVEKGVKPSYSTWEAFVWGYLGDKTDKVLECMKKALSCLEKWEPNHELATAIFSQIEKTGDIEAAEKLLVIFRDAEYVTTEMYNSVLRTYAEAKLMPLIVDERMEQDKVAMDVETKRLLRLTSKYPIGEVSVSMS

SEQ ID NO: 18300 - DNA, 1041 bp, Zea mays subsp. mays
  misc_feature (1)..(1041): Ceres Seq. ID no. 14301986
  misc_feature: MA Experiment ID: 20000534 Result: Up-regulated in Transcription
  misc_feature: MA Experiment 20000534 PARAMETER Experiment Name: Zm_Hybrid_Pollen_P Parameter: Age (day) Value: 8
  misc_feature: MA Experiment 20000534 PARAMETER Experiment Name: Zm_Hybrid_Pollen_P Parameter: Organism Value: Zea mays
  misc_feature: MA Experiment 20000534 PARAMETER Experiment Name: Zm_Hybrid_Pollen_P Parameter: Plant Line Value: 35A19
  misc_feature: MA Experiment 20000534 PARAMETER Experiment Name: Zm_Hybrid_Pollen_P Parameter: Tissue Value: Pollen vs. Aerial
accgcctccattcctctctgctctgttctgctccaccaccctgatgacgacgaggccagacggcagcgcctccacgcccgcggacaagcagctcgtggcggcctccaacggcaacggcaacggcaacccgctggccgtccgcaaggcgccctccaaggaccggcacagcaaggtggacgggcgaggccggcgcatccgcatgcccatcatctgcgccgctcgcgtgttccagctcacgagggagctcgggcacaagtccgacggacagaccatcgagtggctgctcaggcaggccgagccctccatcatcgccgccaccggcaccggcaccacgccggcctccttctccacctcgtccccgtcatcgctccgctcctcctcgtcctccacagccggcgtccacccgcacgccgccccggcccaggggttctgggcgctgccggcgcgggccgacttcggacagctctggagcttcgcggccgcgccggagatgatggtcgccgcggctgcagcagcagcgccgggcatggccggggaggcgtccgccgccagggtcggcaactacctccccgtcgcgcagggcaacctcaacctgctggcctccttctccggcgggcctgctcccacagcggccgccggacgggccgaggaggagaccgcccgctaagggtcgtcaattcccagtctctctgtgtgtggctcaatccgggatagacagtgtcactctcacccaactctccatttctttttttggggttcagttcagatcagtgttggccacccgaattgggtggccttccactccatcccagtgagcaatcaagcaaggaggagctgcatcagctctccctcccgtcctatctatctatatgattttttttctttctttttgagcattggattagtgctctcaactacccacaagtgtttattagtcagccagctccttcagtgctactagcagctcagttcagtccatggtatgtgtccggattgtttgctgatgtgcttgttgatcaattaatggacataatggttgcg

SEQ ID NO: 18301 - protein, 237 aa, Zea mays subsp. mays
  peptide (1)..(237): Ceres Seq. ID no. 14301987
TASIPLCSVLLHHPDDDEARRQRLHARGQAARGGLQRQRQRQPAGRPQGALQGPAQQGGRARPAHPHAHHLRRSRVPAHEGARAQVRRTDHRVAAQAGRALHHRRHRHRHHAGLLLHLVPVIAPLLLVLHSRRPPARRPGPGVLGAAGAGRLRTALELRGRAGDDGRRGCSSSAGHGRGGVRRQGRQLPPRRAGQPQPAGLLLRRACSHSGRRTGRGGDRPLRVVNSQSLCVWLNPG

SEQ ID NO: 18302 - protein, 221 aa, Zea mays subsp. mays
  peptide (1)..(221): Ceres Seq. ID no. 14301988
  misc_feature (44)..(134): Pfam Name: TCP family transcription factor Pfam Description: TCP family transcription factor
  misc_feature (142)..(218): Homolog of NCBI NO: 15241596 NR Description: TCP family transcription factor, putative
  misc_feature (33)..(132): Homolog of NCBI NO: 15241596 NR Description: TCP family transcription factor, putative
  misc_feature (139)..(218): Homolog of NCBI NO: 26452377 NR Description: unknown protein [Arabidopsis thaliana]
  misc_feature (46)..(129): Homolog of NCBI NO: 11357581 NR Description: hypothetical protein F1P2.170 - Arabidopsis
  misc_feature (11)..(130): Homolog of NCBI NO: 15218305 NR Description: TCP family transcription factor, putative
  misc_feature (20)..(213): Homolog of NCBI NO: 18409345 NR Description: TCP family transcription factor, putative
  misc_feature (24)..(142): Homolog of NCBI NO: 15217857 NR Description: TCP family transcription factor, putative
  misc_feature (31)..(134): Homolog of NCBI NO: 26452377 NR Description: unknown protein [Arabidopsis thaliana]
  misc_feature (139)..(218): Homolog of NCBI NO: 15237274 NR Description: TCP family transcription factor, putative
  misc_feature (31)..(134): Homolog of NCBI NO: 15237274 NR Description: TCP family transcription factor, putative
PPPFLSALFCSTTLMTTRPDGSASTPADKQLVAASNGNGNGNPLAVRKAPSKDRHSKVDGRGRRIRMPIICAARVFQLTRELGHKSDGQTIEWLLRQAEPSIIAATGTGTTPASFSTSSPSSLRSSSSSTAGVHPHAAPAQGFWALPARADFGQLWSFAAAPEMMVAAAAAAAPGMAGEASAARVGNYLPVAQGNLNLLASFSGGPAPTAAAGRAEEETAR

SEQ ID NO: 18303 - protein, 207 aa, Zea mays subsp. mays
  peptide (1)..(207): Ceres Seq. ID no. 14301989
  misc_feature (30)..(120): Pfam Name: TCP family transcription factor Pfam Description: TCP family transcription factor
  misc_feature (32)..(115): Homolog of NCBI NO: 11357581 NR Description: hypothetical protein F1P2.170 - Arabidopsis
  misc_feature (10)..(128): Homolog of NCBI NO: 15217857 NR Description: TCP family transcription factor, putative
  misc_feature (1)..(116): Homolog of NCBI NO: 15218305 NR Description: TCP family transcription factor, putative
  misc_feature (6)..(199): Homolog of NCBI NO: 18409345 NR Description: TCP family transcription factor, putative
  misc_feature (128)..(204): Homolog of NCBI NO: 15241596 NR Description: TCP family transcription factor, putative
  misc_feature (19)..(118): Homolog of NCBI NO: 15241596 NR Description: TCP family transcription factor, putative
  misc_feature (125)..(204): Homolog of NCBI NO: 26452377 NR Description: unknown protein [Arabidopsis thaliana]
  misc_feature (17)..(120): Homolog of NCBI NO: 26452377 NR Description: unknown protein [Arabidopsis thaliana]
  misc_feature (125)..(204): Homolog of NCBI NO: 15237274 NR Description: TCP family transcription factor, putative
  misc_feature (17)..(120): Homolog of NCBI NO: 15237274 NR Description: TCP family transcription factor, putative
MTTRPDGSASTPADKQLVAASNGNGNGNPLAVRKAPSKDRHSKVDGRGRRIRMPIICAARVFQLTRELGHKSDGQTIEWLLRQAEPSIIAATGTGTTPASFSTSSPSSLRSSSSSTAGVHPHAAPAQGFWALPARADFGQLWSFAAAPEMMVAAAAAAAPGMAGEASAARVGNYLPVAQGNLNLLASFSGGPAPTAAAGRAEEETAR

SEQ ID NO: 18304 - DNA, 942 bp, Zea mays subsp. mays
  misc_feature (1)..(942): Ceres Seq. ID no. 12358481
  misc_feature: MA Experiment ID: 20000534 Result: Down-regulated in Transcription
  misc_feature: MA Experiment 20000534 PARAMETER Experiment Name: Zm_Hybrid_Pollen_P Parameter: Age (day) Value: 8
  misc_feature: MA Experiment 20000534 PARAMETER Experiment Name: Zm_Hybrid_Pollen_P Parameter: Organism Value: Zea mays
  misc_feature: MA Experiment 20000534 PARAMETER Experiment Name: Zm_Hybrid_Pollen_P Parameter: Plant Line Value: 35A19
  misc_feature: MA Experiment 20000534 PARAMETER Experiment Name: Zm_Hybrid_Pollen_P Parameter: Tissue Value: Pollen vs. Aerial
catgttcacaacttaagaactgtttattctggtgtcagtgacagcactgcatttgccactccattccccttccctgggaaacaacagttatctgggatgcatgcacaaggggctaccaatgaaaagacatggcaagatttccgtctttttgagccttcaaaacagaacatgctccaaaattaccaccaaagaaatcagcaaaatggtcaaatagctgaacaagagccagaaaattctgtctggtctagcagttaccatgtgtgattcagtaacttgtaccaggatgattgctggagttgctggggactattggattaagtggcacagcctgatctattgagcttggcccatacctgcagcactctgttaaatttcttttgagcatggtggtctttgaagcatgacaatggctgctcttaggtttgggattgccaccatcttctgggacaaagagggagtggaggttgattgatctgtcggcagtctgatggggatgaattatacgaggtcttcaacgctgacacaaagggttaatgaaacaaactcgaatccattgattataggcgctccgcacggaccatatgattcatctctcgttggacatgtagctacaagaatggtgtcagtgggcggttgctgccgcaactaaaagtccattcagtgtggatgtcagttgggctacgctatctaagaataaaaagtttgaggaacaacgagcatgttgccaagtagtttctcaagtataagttactgcgtctagttatattgttcctttcctttcggcaacaatgtgtcatgttgctgtcgcgctagttgcaagttgcaattaaacgtttggaacagtttgtcatgttatttgtgtggcttctatatggctatatgtttgctggaactgtatggaccaaccctcagtgctacctacaaaagtttatgatttgactg

SEQ ID NO: 18305 - protein, 87 aa, Zea mays subsp. mays
  peptide (1)..(87): Ceres Seq. ID no. 12358482
  misc_feature (1)..(87): Homolog of NCBI NO: 34015261 NR Description: putative cytokinin inducibl protein
  misc_feature (1)..(87): Homolog of NCBI NO: 35215104 NR Description: putative cig3 [Oryza sativa (japonica
HVHNLRTVYSGVSDSTAFATPFPFPGKQQLSGMHAQGATNEKTWQDFRLFEPSKQNMLQNYHQRNQQNGQIAEQEPENSVWSSSYHV

SEQ ID NO: 18306 - protein, 55 aa, Zea mays subsp. mays
  peptide (1)..(55): Ceres Seq. ID no. 12358483
  misc_feature (1)..(55): Homolog of NCBI NO: 34015261 NR Description: putative cytokinin inducibl protein
  misc_feature (1)..(55): Homolog of NCBI NO: 35215104 NR Description: putative cig3 [Oryza sativa (japonica
MHAQGATNEKTWQDFRLFEPSKQNMLQNYHQRNQQNGQIAEQEPENSVWSSSYHV

SEQ ID NO: 18307 - protein, 53 aa, Zea mays subsp. mays
  peptide (1)..(53): Ceres Seq. ID no. 12358484
MGMNYTRSSTLTQRVNETNSNPLIIGAPHGPYDSSLVGHVATRMVSVGGCCRN

SEQ ID NO: 18308 - DNA, 2125 bp, Zea mays subsp. mays; identical to SEQ ID NO: 17397
  misc_feature (1)..(2125): Ceres Seq. ID no. 12366165
  misc_feature: MA Experiment ID: 108535 Result: Up-regulated in Transcription
  misc_feature: MA Experiment 108535 PARAMETER Experiment Name: Zm_Meristem_P Parameter: Age (day) Value: 8
  misc_feature: MA Experiment 108535 PARAMETER Experiment Name: Zm_Meristem_P Parameter: Organism Value: Zea mays
  misc_feature: MA Experiment 108535 PARAMETER Experiment Name: Zm_Meristem_P Parameter: Plant Line Value: 35A19
  misc_feature: MA Experiment 108535 PARAMETER Experiment Name: Zm_Meristem_P Parameter: Tissue Value: Root Meristem vs. Above Root Meristem
  misc_feature: MA Experiment ID: 108543 Result: Up-regulated in Transcription
  misc_feature: MA Experiment ID: 108556 Result: Down-regulated in Transcription
  misc_feature: MA Experiment 108556 PARAMETER Experiment Name: Zm_Drought_P Parameter: Age (day) Value: 9
  misc_feature: MA Experiment 108556 PARAMETER Experiment Name: Zm_Drought_P Parameter: Organism Value: Zea mays
  misc_feature: MA Experiment 108556 PARAMETER Experiment Name: Zm_Drought_P Parameter: Plant Line Value: 35A19
  misc_feature: MA Experiment 108556 PARAMETER Experiment Name: Zm_Drought_P Parameter: Timepoint (hr) Value: 24
  misc_feature: MA Experiment 108556 PARAMETER Experiment Name: Zm_Drought_P Parameter: Tissue Value: Aerial
  misc_feature: MA Experiment 108556 PARAMETER Experiment Name: Zm_Drought_P Parameter: Treatment Value: Drought vs. No Drought
  misc_feature: MA Experiment ID: 20000479 Result: Down-regulated in Transcription
  misc_feature: MA Experiment 20000479 PARAMETER Experiment Name: Zm_Drought_P Parameter: Age (day) Value: 10
  misc_feature: MA Experiment 20000479 PARAMETER Experiment Name: Zm_Drought_P Parameter: Organism Value: Zea mays
  misc_feature: MA Experiment 20000479 PARAMETER Experiment Name: Zm_Drought_P Parameter: Plant Line Value: 35A19
  misc_feature: MA Experiment 20000479 PARAMETER Experiment Name: Zm_Drought_P Parameter: Timepoint (hr) Value: 48
  misc_feature: MA Experiment 20000479 PARAMETER Experiment Name: Zm_Drought_P Parameter: Tissue Value: Aerial
  misc_feature: MA Experiment 20000479 PARAMETER Experiment Name: Zm_Drought_P Parameter: Treatment Value: Drought vs. No Drought
  misc_feature: MA Experiment ID: 20000492 Result: Up-regulated in Transcription
  misc_feature: MA Experiment 20000492 PARAMETER Experiment Name: Zm_Hybrid_Seed_Dev_P Parameter: DAP Value: 12
  misc_feature: MA Experiment 20000492 PARAMETER Experiment Name: Zm_Hybrid_Seed_Dev_P Parameter: Organism Value: Zea mays
  misc_feature: MA Experiment 20000492 PARAMETER Experiment Name: Zm_Hybrid_Seed_Dev_P Parameter: Plant Line Value: 35A19
  misc_feature: MA Experiment 20000492 PARAMETER Experiment Name: Zm_Hybrid_Seed_Dev_P Parameter: Tissue Value: Fert Kernel vs. Unfert Floret

SEQ ID NO: 18309 - protein, 547 aa, Zea mays subsp. mays; identical to SEQ ID NO: 17398
  peptide (1)..(547): Ceres Seq. ID no. 12366166
  misc_feature (53)..(81): Pfam Name: EF hand Pfam Description: EF hand
  misc_feature (53)..(81): Pfam Name: EF hand Pfam Description: EF hand
  misc_feature (139)..(543): Homolog of NCBI NO: 34861835 NR Description: similar to EH-domain containing 1 [Rattus
  misc_feature (118)..(542): Homolog of NCBI NO: 17565132 NR Description: Receptor Mediated Endocytosis 1 RME-1 isoform 2,
  misc_feature (118)..(542): Homolog of NCBI NO: 7206819 NR Description: Receptor mediated endocytosis protein 1, isoform
  misc_feature (126)..(542): Homolog of NCBI NO: 17565130 NR Description: Receptor Mediated Endocytosis 1 isoform 1,
  misc_feature (129)..(542): Homolog of NCBI NO: 39594267 NR Description: Hypothetical protein CBG18887 [Caenorhabditis
  misc_feature (139)..(543): Homolog of NCBI NO: 34861835 NR Description: similar to EH-domain containing 1 [Rattus
  misc_feature (118)..(542): Homolog of NCBI NO: 7206819 NR Description: Receptor mediated endocytosis protein 1, isoform
  misc_feature (129)..(542): Homolog of NCBI NO: 39594267 NR Description: Hypothetical protein CBG18887 [Caenorhabditis
  misc_feature (1)..(547): Homolog of NCBI NO: 18402561 NR Description: expressed protein
  misc_feature (123)..(547): Homolog of NCBI NO: 9294546 NR Description: contains similarity to EH domain containing
  misc_feature (1)..(110): Homolog of NCBI NO: 9294546 NR Description: contains similarity to EH domain containing
  misc_feature (14)..(547): Homolog of NCBI NO: 38345297 NR Description: OSJNBa0043A12.19 [Oryza sativa (japonica
  misc_feature (11)..(493): Homolog of NCBI NO: 18412957 NR Description: score=11.7, E=0.66,N=1; protein id: At4g05520.1
  misc_feature (126)..(542): Homolog of NCBI NO: 17565130 NR Description: Receptor Mediated Endocytosis 1 isoform 1,
  misc_feature (118)..(542): Homolog of NCBI NO: 17565132 NR Description: Receptor Mediated Endocytosis 1 RME-1 isoform 2,
  misc_feature (11)..(493): Homolog of NCBI NO: 18412957 NR Description: score=11.7, E=0.66,N=1; protein id: At4g05520.1
  misc_feature (14)..(547): Homolog of NCBI NO: 38345297 NR Description: OSJNBa0043A12.19 [Oryza sativa (japonica
  misc_feature (1)..(110): Homolog of NCBI NO: 9294546 NR Description: contains similarity to EH domain containing
  misc_feature (123)..(547): Homolog of NCBI NO: 9294546 NR Description: contains similarity to EH domain containing
  misc_feature (1)..(547): Homolog of NCBI NO: 18402561 NR Description: expressed protein

SEQ ID NO: 18310 - protein, 502 aa, Zea mays subsp. mays; identical to SEQ ID NO: 17399
  peptide (1)..(502): Ceres Seq. ID no. 12366167
  misc_feature (8)..(36): Pfam Name: EF hand Pfam Description: EF hand
  misc_feature (8)..(36): Pfam Name: EF hand Pfam Description: EF hand
  misc_feature (94)..(498): Homolog of NCBI NO: 34861835 NR Description: similar to EH-domain containing 1 [Rattus
  misc_feature (73)..(497): Homolog of NCBI NO: 17565132 NR Description: Receptor Mediated Endocytosis 1 RME-1 isoform 2,
  misc_feature (73)..(497): Homolog of NCBI NO: 7206819 NR Description: Receptor mediated endocytosis protein 1, isoform
  misc_feature (81)..(497): Homolog of NCBI NO: 17565130 NR Description: Receptor Mediated Endocytosis 1 isoform 1,
  misc_feature (84)..(497): Homolog of NCBI NO: 39594267 NR Description: Hypothetical protein CBG18887 [Caenorhabditis
  misc_feature (94)..(498): Homolog of NCBI NO: 34861835 NR Description: similar to EH-domain containing 1 [Rattus
  misc_feature (73)..(497): Homolog of NCBI NO: 7206819 NR Description: Receptor mediated endocytosis protein 1, isoform
  misc_feature (84)..(497): Homolog of NCBI NO: 39594267 NR Description: Hypothetical protein CBG18887 [Caenorhabditis
  misc_feature (1)..(502): Homolog of NCBI NO: 18402561 NR Description: expressed protein
  misc_feature (78)..(502): Homolog of NCBI NO: 9294546 NR Description: contains similarity to EH domain containing
  misc_feature (1)..(65): Homolog of NCBI NO: 9294546 NR Description: contains similarity to EH domain containing
  misc_feature (1)..(502): Homolog of NCBI NO: 38345297 NR Description: OSJNBa0043A12.19 [Oryza sativa (japonica
  misc_feature (1)..(448): Homolog of NCBI NO: 18412957 NR Description: score=11.7, E=0.66,N=1; protein id: At4g05520.1
  misc_feature (81)..(497): Homolog of NCBI NO: 17565130 NR Description: Receptor Mediated Endocytosis 1 isoform 1,
  misc_feature (73)..(497): Homolog of NCBI NO: 17565132 NR Description: Receptor Mediated Endocytosis 1 RME-1 isoform 2,
  misc_feature (1)..(448): Homolog of NCBI NO: 18412957 NR Description: score=11.7, E=0.66,N=1; protein id: At4g05520.1
  misc_feature (1)..(502): Homolog of NCBI NO: 38345297 NR Description: OSJNBa0043A12.19 [Oryza sativa (japonica
  misc_feature (1)..(65): Homolog of NCBI NO: 9294546 NR Description: contains similarity to EH domain containing
  misc_feature (78)..(502): Homolog of NCBI NO: 9294546 NR Description: contains similarity to EH domain containing
  misc_feature (1)..(502): Homolog of NCBI NO: 18402561 NR Description: expressed protein

SEQ ID NO: 18311 - protein, 470 aa, Zea mays subsp. mays; identical to SEQ ID NO: 17400
  peptide (1)..(470): Ceres Seq. ID no. 12366168
  misc_feature (62)..(466): Homolog of NCBI NO: 34861835 NR Description: similar to EH-domain containing 1 [Rattus
  misc_feature (41)..(465): Homolog of NCBI NO: 17565132 NR Description: Receptor Mediated Endocytosis 1 RME-1 isoform 2,
  misc_feature (41)..(465): Homolog of NCBI NO: 7206819 NR Description: Receptor mediated endocytosis protein 1, isoform
  misc_feature (49)..(465): Homolog of NCBI NO: 17565130 NR Description: Receptor Mediated Endocytosis 1 isoform 1,
  misc_feature (52)..(465): Homolog of NCBI NO: 39594267 NR Description: Hypothetical protein CBG18887 [Caenorhabditis
  misc_feature (1)..(416): Homolog of NCBI NO: 18412957 NR Description: score=11.7, E=0.66,N=1; protein id: At4g05520.1
  misc_feature (1)..(470): Homolog of NCBI NO: 38345297 NR Description: OSJNBa0043A12.19 [Oryza sativa (japonica
  misc_feature (1)..(33): Homolog of NCBI NO: 9294546 NR Description: contains similarity to EH domain containing
  misc_feature (46)..(470): Homolog of NCBI NO: 9294546 NR Description: contains similarity to EH domain containing
  misc_feature (1)..(470): Homolog of NCBI NO: 18402561 NR Description: expressed protein
  misc_feature (62)..(466): Homolog of NCBI NO: 34861835 NR Description: similar to EH-domain containing 1 [Rattus
  misc_feature (41)..(465): Homolog of NCBI NO: 17565132 NR Description: Receptor Mediated Endocytosis 1 RME-1 isoform 2,
  misc_feature (41)..(465): Homolog of NCBI NO: 7206819 NR Description: Receptor mediated endocytosis protein 1, isoform
  misc_feature (49)..(465): Homolog of NCBI NO: 17565130 NR Description: Receptor Mediated Endocytosis 1 isoform 1,
  misc_feature (52)..(465): Homolog of NCBI NO: 39594267 NR Description: Hypothetical protein CBG18887 [Caenorhabditis
  misc_feature (1)..(416): Homolog of NCBI NO: 18412957 NR Description: score=11.7, E=0.66,N=1; protein id: At4g05520.1
  misc_feature (1)..(470): Homolog of NCBI NO: 38345297 NR Description: OSJNBa0043A12.19 [Oryza sativa (japonica
  misc_feature (1)..(33): Homolog of NCBI NO: 9294546 NR Description: contains similarity to EH domain containing
  misc_feature (46)..(470): Homolog of NCBI NO: 9294546 NR Description: contains similarity to EH domain containing
  misc_feature (1)..(470): Homolog of NCBI NO: 18402561 NR Description: expressed protein

SEQ ID NO: 18312 - DNA, 979 bp, Zea mays subsp. mays
  misc_feature (1)..(979): Ceres Seq. ID no. 12443269
  misc_feature: MA Experiment ID: 108687 Result: Up-regulated in Transcription
  misc_feature: MA Experiment 108687 PARAMETER Experiment Name: Zm_Embryos-Flowers__P Parameter: Tissue Value: Embryo vs. Aerial+
agaatctcgtctgtatcccacccctcttttttgaccctgagctcctagaagccatccccaaatcgccctacgcccacggttccacctcctcgtccacgaggtgaggaaaccctagcgaccgaccatggcgttgctcccgcgcaccgcgcggctggccctcctttccaccccgcgggcgtactccgctgccgctgctgcgggcgcctccccgacgtccccagcgccatacgggggcgcccccccaccggcgatgtcgaagacggccgagttcgtggtctctaaggtggacgacctgatgaactgggcgcgtaagggctcgatctggcccatgaccttcgggctcgcctgctgcgcggtggagatgatgcacgccggcgcgtcccgctacgacttcgaccggttcggcgtcatcttccgtccgtcgccgcgccagtccgattgcatgatcgtcgccggcacgctcaccaacaagatggctccggccctccgcaaggtttatgaccaaatgcctgagcctaggtgggttatttcaatgggcagctgtgccaacggtggtggatactaccattactcctactctgttgtacgtggatgtgaccgtatagtccctgtggacatctacgtccctgggtgcccaccaactgctgaggcactgctgtacggcgttcttcagctccaaaagaagatcaacaggcgtaaggatttccttcactggtggaccaagtgaagcatgctcctgctatttctcggtcgctatgttttctttgcatttgacctgcttgtcacatctgaaataaggacacactttgctcggatttgcaagttctctctttttttttcttggtgtgtctggaaggatgtatgtccaggttgtttgatgaaacatataactcgtgtaccagcagacttgctgtgaatctattttcgagcttctagtcttccactgtaatacagcaaatacaccatctccttgtctgcc

SEQ ID NO: 18313 - protein, 200 aa, Zea mays subsp. mays
  peptide (1)..(200): Ceres Seq. ID no. 12443270
  misc_feature (78)..(185): Pfam Name: NADH ubiquinone oxidoreductase, 20 Kd subunit Pfam Description: NADH ubiquinone oxidoreductase, 20 Kd subunit
  misc_feature (44)..(200): Homolog of NCBI NO: 11466535 NR Description: NADH dehydrogenase, subunit 10 [Reclinomonas
  misc_feature (40)..(200): Homolog of NCBI NO: 34328788 NR Description: NADH:ubiquinone oxidoreductase subunit 10;
  misc_feature (43)..(200): Homolog of NCBI NO: 11466592 NR Description: NADH dehydrogenase subunit 10 [Rhodomonas salina]
  misc_feature (28)..(200): Homolog of NCBI NO: 9652190 NR Description: NADH-ubiquinone oxidoreductase subunit PSST
  misc_feature (1)..(200): Homolog of NCBI NO: 2499328 NR Description: NADH-ubiquinone oxidoreductase 20 kDa subunit,
  misc_feature (1)..(200): Homolog of NCBI NO: 9652180 NR Description: NADH-ubiquinone oxidoreductase subunit PSST
  misc_feature (1)..(200): Homolog of NCBI NO: 15239782 NR Description: NADH dehydrogenase (ubiquinone)
  misc_feature (1)..(200): Homolog of NCBI NO: 11277624 NR Description: NADH2 dehydrogenase (ubiquinone) (EC 1.6.5.3)
  misc_feature (6)..(200): Homolog of NCBI NO: 1171866 NR Description: NADH-ubiquinone oxidoreductase 20 kDa subunit,
  misc_feature (1)..(200): Homolog of NCBI NO: 34910678 NR Description: putative NADH dehydrogenase (ubiquinone) chain
MALLPRTARLALLSTPRAYSAAAAAGASPTSPAPYGGAPPPAMSKTAEFVVSKVDDLMNWARKGSIWPMTFGLACCAVEMMHAGASRYDFDRFGVIFRPSPRQSDCMIVAGTLTNKMAPALRKVYDQMPEPRWVISMGSCANGGGYYHYSYSVVRGCDRIVPVDIYVPGCPPTAEALLYGVLQLQKKINRRKDFLHWWTK

SEQ ID NO: 18314 - protein, 158 aa, Zea mays subsp. mays; identical to SEQ ID NO: 2807
  peptide (1)..(158): Ceres Seq. ID no. 12443271
  misc_feature (36)..(143): Pfam Name: NADH ubiquinone oxidoreductase, 20 Kd subunit Pfam Description: NADH ubiquinone oxidoreductase, 20 Kd subunit
  misc_feature (2)..(158): Homolog of NCBI NO: 11466535 NR Description: NADH dehydrogenase, subunit 10 [Reclinomonas
  misc_feature (1)..(158): Homolog of NCBI NO: 34328788 NR Description: NADH:ubiquinone oxidoreductase subunit 10;
  misc_feature (1)..(158): Homolog of NCBI NO: 11466592 NR Description: NADH dehydrogenase subunit 10 [Rhodomonas salina]
  misc_feature (1)..(158): Homolog of NCBI NO: 9652190 NR Description: NADH-ubiquinone oxidoreductase subunit PSST
  misc_feature (1)..(158): Homolog of NCBI NO: 2499328 NR Description: NADH-ubiquinone oxidoreductase 20 kDa subunit,
  misc_feature (1)..(158): Homolog of NCBI NO: 9652180 NR Description: NADH-ubiquinone oxidoreductase subunit PSST
  misc_feature (1)..(158): Homolog of NCBI NO: 15239782 NR Description: NADH dehydrogenase (ubiquinone)
  misc_feature (1)..(158): Homolog of NCBI NO: 11277624 NR Description: NADH2 dehydrogenase (ubiquinone) (EC 1.6.5.3)
  misc_feature (1)..(158): Homolog of NCBI NO: 1171866 NR Description: NADH-ubiquinone oxidoreductase 20 kDa subunit,
  misc_feature (1)..(158): Homolog of NCBI NO: 34910678 NR Description: putative NADH dehydrogenase (ubiquinone) chain

SEQ ID NO: 18315 - protein, 143 aa, Zea mays subsp. mays; identical to SEQ ID NO: 2808
  peptide (1)..(143): Ceres Seq. ID no. 12443272
  misc_feature (21)..(128): Pfam Name: NADH ubiquinone oxidoreductase, 20 Kd subunit Pfam Description: NADH ubiquinone oxidoreductase, 20 Kd subunit
  misc_feature (1)..(143): Homolog of NCBI NO: 9652180 NR Description: NADH-ubiquinone oxidoreductase subunit PSST
  misc_feature (1)..(143): Homolog of NCBI NO: 15239782 NR Description: NADH dehydrogenase (ubiquinone)
  misc_feature (1)..(143): Homolog of NCBI NO: 11277624 NR Description: NADH2 dehydrogenase (ubiquinone) (EC 1.6.5.3)
  misc_feature (1)..(143): Homolog of NCBI NO: 34328788 NR Description: NADH:ubiquinone oxidoreductase subunit 10;
  misc_feature (1)..(143): Homolog of NCBI NO: 9652190 NR Description: NADH-ubiquinone oxidoreductase subunit PSST
  misc_feature (1)..(143): Homolog of NCBI NO: 2499328 NR Description: NADH-ubiquinone oxidoreductase 20 kDa subunit,
  misc_feature (1)..(143): Homolog of NCBI NO: 11466592 NR Description: NADH dehydrogenase subunit 10 [Rhodomonas salina]
  misc_feature (1)..(143): Homolog of NCBI NO: 11466535 NR Description: NADH dehydrogenase, subunit 10 [Reclinomonas
  misc_feature (1)..(143): Homolog of NCBI NO: 1171866 NR Description: NADH-ubiquinone oxidoreductase 20 kDa subunit,
  misc_feature (1)..(143): Homolog of NCBI NO: 34910678 NR Description: putative NADH dehydrogenase (ubiquinone) chain

SEQ ID NO: 18316 - DNA, 2197 bp, Zea mays subsp. mays
  misc_feature (1)..(2197): Ceres Seq. ID no. 12424079
  misc_feature: MA Experiment ID: 108535 Result: Down-regulated in Transcription
  misc_feature: MA Experiment 108535 PARAMETER Experiment Name: Zm_Meristem_P Parameter: Age (day) Value: 8
  misc_feature: MA Experiment 108535 PARAMETER Experiment Name: Zm_Meristem_P Parameter: Organism Value: Zea mays
  misc_feature: MA Experiment 108535 PARAMETER Experiment Name: Zm_Meristem_P Parameter: Plant Line Value: 35A19
  misc_feature: MA Experiment 108535 PARAMETER Experiment Name: Zm_Meristem_P Parameter: Tissue Value: Root Meristem vs. Above Root Meristem
  misc_feature: MA Experiment ID: 20000492 Result: Down-regulated in Transcription
  misc_feature: MA Experiment 20000492 PARAMETER Experiment Name: Zm_Hybrid_Seed_Dev_P Parameter: DAP Value: 12
  misc_feature: MA Experiment 20000492 PARAMETER Experiment Name: Zm_Hybrid_Seed_Dev_P Parameter: Organism Value: Zea mays
  misc_feature: MA Experiment 20000492 PARAMETER Experiment Name: Zm_Hybrid_Seed_Dev_P Parameter: Plant Line Value: 35A19
  misc_feature: MA Experiment 20000492 PARAMETER Experiment Name: Zm_Hybrid_Seed_Dev_P Parameter: Tissue Value: Fert Kernel vs. Unfert Floret
  misc_feature: MA Experiment ID: 20000534 Result: Down-regulated in Transcription
  misc_feature: MA Experiment 20000534 PARAMETER Experiment Name: Zm_Hybrid_Pollen_P Parameter: Age (day) Value: 8
  misc_feature: MA Experiment 20000534 PARAMETER Experiment Name: Zm_Hybrid_Pollen_P Parameter: Organism Value: Zea mays
  misc_feature: MA Experiment 20000534 PARAMETER Experiment Name: Zm_Hybrid_Pollen_P Parameter: Plant Line Value: 35A19
  misc_feature: MA Experiment 20000534 PARAMETER Experiment Name: Zm_Hybrid_Pollen_P Parameter: Tissue Value: Pollen vs. Aerial
gttgggtgccgtgcgagctccaagtacccctgtctccctcccgtcttgcgggcttgcctttgcctgttccatttccggctcctccagttggtagtgtcgtttcaatgcgagacgccgtccttcacgagcttgattgcccttgaaagcgaagttggtgttggtgtcgttgccggtgaggaggaagaggggatatatggctcccacggaagaggcagcaggggaggacgagcggctgctgaaggatcttctcgcttcttcgtcagataaggaaggagaggatgaagagagtacaaagacacagtccgatgaatctactaggggggattgtgataacggcgggtccgtagccgccttatcgagtgaagatgtcaatgataggcatggtagtgacagcaacagccaatgtgctgaatctgatggtgcttgcagtcaagtgcctggaacaggctccaagagcagcaacgatgagtgcggtgctgaagtgcctcaaaccggatccaagagcagtaatgatgaagatgacgggtgtgctgatgaaatgccaggagccctctccaagagcagtagcaatgacagcagtgagtgcgctgaccggagctctccgcgagctgtcctagatatctcagtatctggcagcatggactcggatgacagtgtttcagtcgagcagtcagcagaatcaaaccaaaatgtgcagtggaggaacctgatcagcagtctaatactcagaagaaagaagtccatgggcagcgcagtgacgttccctcagagacccaagagcaaagggcttagagggtacttggagaggatgaggagtggtaagaaccaaatggactgcagcgccattgctcctgagatcctccctcagatcgggaaatggaggccatcatggcggagctttgactacaatgagctttgtgctgcaactgacagttttggttcagagaaaatgattgggaagggagggcatgcagaggtatacaaaggacagcttgctgatggacaatttgtggcagtgaagagattaacaaaaggcggtaacaaagaggacagagttagcgatttcttatctgagcttggaataatagcccatgttaaccacccaaacgcagcacagctcctggggtttagcgtggaagggggtctgcacttggttcttcagttctcacctcatggaagccttgcttctgttctacatggtacaaaggagcccctgaagtggaaagtcaggttcaaaattgcacttggaattgctgaagggctgctttatctacatgaaggctgccatcgccgcataattcacagagacatcaaggcatctaatatccttctaactgaagactaccaacctcagatatcagattttgggcttgcaaagtggctccctgacaaattgacccatcatgttgtgtatcccattgaaggcacattcgggtatatggccccagaatacttcatgcatgggatcataaatgagaagaccgatgtgttcgcatatggagttctacttcttgaactagttaccgggcggaaagcggtggactcatccagacagagcctagtgatatgggcaaaaccgctgcttgatgcgaacaacatccaagagctggtggatccttcccttggtaacgagtatgaccctgaagagatggtgtacacactagcagtggcatccttgtgcatccaccacagctcaacctcgaggcctagtatgaaatcggtagtctgtttcttgaagggtgaccgggagtcacttgagctggtgagaaggcctaaaatcgtgaagcccctgatgtttgactcgggcgattcagaagattacacgcgctcgagctacctcagcgatctcaaccggcacaagcagctcgcgctggagcagtgaacatcgaattgagtttgaacagattcactgtaattttgtacatcatttacgctgtacccatgcacactgtgatcctcccacctttccacataggttttaaaaattgtatggattgatgtgggggggtcagctatcattcactacatggttgctgatctatgctgtaactttgcccagagtttcagcgcatgttacggccctgcgatcatctgtatcatccggactgtccgattgtaatgtcaggtgatgcagccactagcgaccagtctgctatactgttcgtgaaatggtgattgttagcatggttgtgtcctg

SEQ ID NO: 18317 - protein, 562 aa, Zea mays subsp. mays
  peptide (1)..(562): Ceres Seq. ID no. 12424080
  misc_feature (230)..(550): Homolog of NCBI NO: 15224251 NR Description: putative protein kinase; protein id: At2g18890.1
  misc_feature (230)..(546): Homolog of NCBI NO: 40253745 NR Description: SERK1 protein-like [Oryza sativa (japonica
  misc_feature (130)..(560): Homolog of NCBI NO: 22330852 NR Description: putative serine/threonine protein kinase
  misc_feature (133)..(529): Homolog of NCBI NO: 15239245 NR Description: serine/threonine protein kinase-like; protein id:
  misc_feature (67)..(560): Homolog of NCBI NO: 30687061 NR Description: protein kinase family [Arabidopsis thaliana]
  misc_feature (108)..(561): Homolog of NCBI NO: 11358733 NR Description: Pto kinase interactor-like protein - Arabidopsis
  misc_feature (108)..(561): Homolog of NCBI NO: 18416299 NR Description: Pto kinase interactor - like protein
  misc_feature (108)..(561): Homolog of NCBI NO: 15810235 NR Description: putative Pto kinase interactor [Arabidopsis
  misc_feature (126)..(561): Homolog of NCBI NO: 30698132 NR Description: protein kinase, putative [Arabidopsis thaliana]
  misc_feature (126)..(561): Homolog of NCBI NO: 26452369 NR Description: unknown protein [Arabidopsis thaliana]
MAPTEEAAGEDERLLKDLLASSSDKEGEDEESTKTQSDESTRGDCDNGGSVAALSSEDVNDRHGSDSNSQCAESDGACSQVPGTGSKSSNDECGAEVPQTGSKSSNDEDDGCADEMPGALSKSSSNDSSECADRSSPRAVLDISVSGSMDSDDSVSVEQSAESNQNVQWRNLISSLILRRKKSMGSAVTFPQRPKSKGLRGYLERMRSGKNQMDCSAIAPEILPQIGKWRPSWRSFDYNELCAATDSFGSEKMIGKGGHAEVYKGQLADGQFVAVKRLTKGGNKEDRVSDFLSELGIIAHVNHPNAAQLLGFSVEGGLHLVLQFSPHGSLASVLHGTKEPLKWKVRFKIALGIAEGLLYLHEGCHRRIIHRDIKASNILLTEDYQPQISDFGLAKWLPDKLTHHVVYPIEGTFGYMAPEYFMHGIINEKTDVFAYGVLLLELVTGRKAVDSSRQSLVIWAKPLLDANNIQELVDPSLGNEYDPEEMVYTLAVASLCIHHSSTSRPSMKSVVCFLKGDRESLELVRRPKIVKPLMFDSGDSEDYTRSSYLSDLNRHKQLALEQ

SEQ ID NO: 18318 - protein, 447 aa, Zea mays subsp. mays
  peptide (1)..(447): Ceres Seq. ID no. 12424081
  misc_feature (115)..(435): Homolog of NCBI NO: 15224251 NR Description: putative protein kinase; protein id: At2g18890.1
  misc_feature (115)..(431): Homolog of NCBI NO: 40253745 NR Description: SERK1 protein-like [Oryza sativa (japonica
  misc_feature (15)..(445): Homolog of NCBI NO: 22330852 NR Description: putative serine/threonine protein kinase
  misc_feature (18)..(414): Homolog of NCBI NO: 15239245 NR Description: serine/threonine protein kinase-like; protein id:
  misc_feature (1)..(445): Homolog of NCBI NO: 30687061 NR Description: protein kinase family [Arabidopsis thaliana]
  misc_feature (1)..(446): Homolog of NCBI NO: 11358733 NR Description: Pto kinase interactor-like protein - Arabidopsis
  misc_feature (1)..(446): Homolog of NCBI NO: 18416299 NR Description: Pto kinase interactor - like protein
  misc_feature (1)..(446): Homolog of NCBI NO: 15810235 NR Description: putative Pto kinase interactor [Arabidopsis
  misc_feature (11)..(446): Homolog of NCBI NO: 30698132 NR Description: protein kinase, putative [Arabidopsis thaliana]
  misc_feature (11)..(446): Homolog of NCBI NO: 26452369 NR Description: unknown protein [Arabidopsis thaliana]
MPGALSKSSSNDSSECADRSSPRAVLDISVSGSMDSDDSVSVEQSAESNQNVQWRNLISSLILRRKKSMGSAVTFPQRPKSKGLRGYLERMRSGKNQMDCSAIAPEILPQIGKWRPSWRSFDYNELCAATDSFGSEKMIGKGGHAEVYKGQLADGQFVAVKRLTKGGNKEDRVSDFLSELGIIAHVNHPNAAQLLGFSVEGGLHLVLQFSPHGSLASVLHGTKEPLKWKVRFKIALGIAEGLLYLHEGCHRRIIHRDIKASNILLTEDYQPQISDFGLAKWLPDKLTHHVVYPIEGTFGYMAPEYFMHGIINEKTDVFAYGVLLLELVTGRKAVDSSRQSLVIWAKPLLDANNIQELVDPSLGNEYDPEEMVYTLAVASLCIHHSSTSRPSMKSVVCFLKGDRESLELVRRPKIVKPLMFDSGDSEDYTRSSYLSDLNRHKQLALEQ

SEQ ID NO: 18319 - protein, 414 aa, Zea mays subsp. mays
  peptide (1)..(414): Ceres Seq. ID no. 12424082
  misc_feature (82)..(402): Homolog of NCBI NO: 15224251 NR Description: putative protein kinase; protein id: At2g18890.1
  misc_feature (82)..(398): Homolog of NCBI NO: 40253745 NR Description: SERK1 protein-like [Oryza sativa (japonica
  misc_feature (1)..(412): Homolog of NCBI NO: 22330852 NR Description: putative serine/threonine protein kinase
  misc_feature (1)..(381): Homolog of NCBI NO: 15239245 NR Description: serine/threonine protein kinase-like; protein id:
  misc_feature (1)..(412): Homolog of NCBI NO: 30687061 NR Description: protein kinase family [Arabidopsis thaliana]
  misc_feature (1)..(413): Homolog of NCBI NO: 11358733 NR Description: Pto kinase interactor-like protein - Arabidopsis
  misc_feature (1)..(413): Homolog of NCBI NO: 18416299 NR Description: Pto kinase interactor - like protein
  misc_feature (1)..(413): Homolog of NCBI NO: 15810235 NR Description: putative Pto kinase interactor [Arabidopsis
  misc_feature (1)..(413): Homolog of NCBI NO: 30698132 NR Description: protein kinase, putative [Arabidopsis thaliana]
  misc_feature (1)..(413): Homolog of NCBI NO: 26452369 NR Description: unknown protein [Arabidopsis thaliana]
MDSDDSVSVEQSAESNQNVQWRNLISSLILRRKKSMGSAVTFPQRPKSKGLRGYLERMRSGKNQMDCSAIAPEILPQIGKWRPSWRSFDYNELCAATDSFGSEKMIGKGGHAEVYKGQLADGQFVAVKRLTKGGNKEDRVSDFLSELGIIAHVNHPNAAQLLGFSVEGGLHLVLQFSPHGSLASVLHGTKEPLKWKVRFKIALGIAEGLLYLHEGCHRRIIHRDIKASNILLTEDYQPQISDFGLAKWLPDKLTHHVVYPIEGTFGYMAPEYFMHGIINEKTDVFAYGVLLLELVTGRKAVDSSRQSLVIWAKPLLDANNIQELVDPSLGNEYDPEEMVYTLAVASLCIHHSSTSRPSMKSVVCFLKGDRESLELVRRPKIVKPLMFDSGDSEDYTRSSYLSDLNRHKQLALEQ

SEQ ID NO: 18320 - DNA, 988 bp, Zea mays subsp. mays
  misc_feature (1)..(988): Ceres Seq. ID no. 12360539
  misc_feature: MA Experiment ID: 108527 Result: Up-regulated in Transcription
  misc_feature: MA Experiment 108527 PARAMETER Experiment Name: Zm_5mM_NO_P Parameter: Age (day) Value: 8
  misc_feature: MA Experiment 108527 PARAMETER Experiment Name: Zm_5mM_NO_P Parameter: Organism Value: Zea mays
  misc_feature: MA Experiment 108527 PARAMETER Experiment Name: Zm_5mM_NO_P Parameter: Plant Line Value: 35A19
  misc_feature: MA Experiment 108527 PARAMETER Experiment Name: Zm_5mM_NO_P Parameter: Timepoint (hr) Value: 6
  misc_feature: MA Experiment 108527 PARAMETER Experiment Name: Zm_5mM_NO_P Parameter: Tissue Value: Aerial
  misc_feature: MA Experiment 108527 PARAMETER Experiment Name: Zm_5mM_NO_P Parameter: Treatment Value: 5mM NO vs. No Treatment
  misc_feature: MA Experiment ID: 108534 Result: Up-regulated in Transcription
  misc_feature: MA Experiment 108534 PARAMETER Experiment Name: Zm_4deg_Cold_P Parameter: Age (hr) Value: 8
  misc_feature: MA Experiment 108534 PARAMETER Experiment Name: Zm_4deg_Cold_P Parameter: Organism Value: Zea mays
  misc_feature: MA Experiment 108534 PARAMETER Experiment Name: Zm_4deg_Cold_P Parameter: Plant Line Value: 35A19
  misc_feature: MA Experiment 108534 PARAMETER Experiment Name: Zm_4deg_Cold_P Parameter: Temperature (deg C) Value: 4 vs. 22
  misc_feature: MA Experiment 108534 PARAMETER Experiment Name: Zm_4deg_Cold_P Parameter: Timepoint (hr) Value: 6
  misc_feature: MA Experiment 108534 PARAMETER Experiment Name: Zm_4deg_Cold_P Parameter: Tissue Value: Aerial
  misc_feature: MA Experiment ID: 108535 Result: Down-regulated in Transcription
  misc_feature: MA Experiment 108535 PARAMETER Experiment Name: Zm_Meristem_P Parameter: Age (day) Value: 8
  misc_feature: MA Experiment 108535 PARAMETER Experiment Name: Zm_Meristem_P Parameter: Organism Value: Zea mays
  misc_feature: MA Experiment 108535 PARAMETER Experiment Name: Zm_Meristem_P Parameter: Plant Line Value: 35A19
  misc_feature: MA Experiment 108535 PARAMETER Experiment Name: Zm_Meristem_P Parameter: Tissue Value: Root Meristem vs. Above Root Meristem
  misc_feature: MA Experiment ID: 20000492 Result: Down-regulated in Transcription
  misc_feature: MA Experiment 20000492 PARAMETER Experiment Name: Zm_Hybrid_Seed_Dev_P Parameter: DAP Value: 12
  misc_feature: MA Experiment 20000492 PARAMETER Experiment Name: Zm_Hybrid_Seed_Dev_P Parameter: Organism Value: Zea mays
  misc_feature: MA Experiment 20000492 PARAMETER Experiment Name: Zm_Hybrid_Seed_Dev_P Parameter: Plant Line Value: 35A19
  misc_feature: MA Experiment 20000492 PARAMETER Experiment Name: Zm_Hybrid_Seed_Dev_P Parameter: Tissue Value: Fert Kernel vs. Unfert Floret
  misc_feature: MA Experiment ID: 20000533 Result: Up-regulated in Transcription
  misc_feature: MA Experiment 20000533 PARAMETER Experiment Name: Zm_0.001percent_MeJA_P Parameter: Age (day) Value: 11
  misc_feature: MA Experiment 20000533 PARAMETER Experiment Name: Zm_0.001percent_MeJA_P Parameter: Organism Value: Zea mays
  misc_feature: MA Experiment 20000533 PARAMETER Experiment Name: Zm_0.001percent_MeJA_P Parameter: Plant Line Value: 35A19
  misc_feature: MA Experiment 20000533 PARAMETER Experiment Name: Zm_0.001percent_MeJA_P Parameter: Timepoint (hr) Value: 72
  misc_feature: MA Experiment 20000533 PARAMETER Experiment Name: Zm_0.001percent_MeJA_P Parameter: Tissue Value: Aerial
  misc_feature: MA Experiment 20000533 PARAMETER Experiment Name: Zm_0.001percent_MeJA_P Parameter: Treatment Value: 0.001percent MeJA vs. No Treatment
  misc_feature: MA Experiment ID: 20000535 Result: Down-regulated in Transcription
  misc_feature: MA Experiment 20000535 PARAMETER Experiment Name: Zm_Hybrid_Seed_Dev_P Parameter: DAP Value: 30 vs. 12
  misc_feature: MA Experiment 20000535 PARAMETER Experiment Name: Zm_Hybrid_Seed_Dev_P Parameter: Organism Value: Zea mays
  misc_feature: MA Experiment 20000535 PARAMETER Experiment Name: Zm_Hybrid_Seed_Dev_P Parameter: Plant Line Value: 35A19
  misc_feature: MA Experiment 20000535 PARAMETER Experiment Name: Zm_Hybrid_Seed_Dev_P Parameter: Tissue Value: Embryo vs. Unfert Floret
gcacgagaccattacctagaacatcctaatcgaaaacaaggactacccttacgccgtggacgggctggtcatctggtgggcgatcgagcggtgggtcaaggagtacctggacgtctactaccccaacgacggcgagctccagcgcgacgtggagctgcaggcgtggtggaaggaggtgcgcgaggaggcgcacggcgacctcaaggaccgagactggtggcccaggatggacgccgtccagcggctggccagggcgtgcacgaccgtcatctgggtagcgtccgcgctgcacgcggccgtcaacttcgggcagtacccgtacgccgggtacctgccgaaccggccgaccgtgagccggcggccgatgccggagccgggcagcgacgactacaagaagctggaggcggggcagaaggaggcggacgcggtgttcatccgcaccatcaccagccagttccagaccatcctgggcatctcgctcatcgagatcctctccaagcactcctccgacgaggtgtacctcggccagcgcgacgagcctgagcgctggacgtcggacgccagggcgctggacgcgttcagaaggttcggaagccggctggtggagatcgagaagcggatcaggacgatgaacgacagcccgacgttgaagaaccggaaggggccggtggagatgccgtacatgctgctgtaccccaacacgtcggatgtcaccggcgagaagggcgaggggctcactgccatgggcattcccaacagcatctccatatgagcctcctcactgcctgagcggatggtttgtagatgttctgttacgctgtgtgtaatgtgtcgtttattcgttggttttgtcagtctcagggtagggaatggagatgttgattggatccatgatctgtagggttgagagaggagtcacgtctggagaatgttgtcaatgtgtgtttctttcttgttaagaataaaagttcgtcagctcatttatctc

SEQ ID NO: 18321 - protein, 181 aa, Zea mays subsp. mays
  peptide (1)..(181): Ceres Seq. ID no. 12360540
  misc_feature (1)..(158): Pfam Name: Lipoxygenase Pfam Description: Lipoxygenase
  misc_feature (1)..(181): Homolog of NCBI NO: 31126788 NR Description: lipoxygenase L-2; lipoxygenase
  misc_feature (1)..(181): Homolog of NCBI NO: 18481649 NR Description: lipoxygenase [Zea mays]
  misc_feature (1)..(181): Homolog of NCBI NO: 12620877 NR Description: lipoxygenase [Zea mays]
  misc_feature (1)..(181): Homolog of NCBI NO: 4887227 NR Description: lipoxygenase [Zea mays]
  misc_feature (1)..(181): Homolog of NCBI NO: 19033549 NR Description: putative lipoxygenase [Oryza sativa (japonica
  misc_feature (1)..(181): Homolog of NCBI NO: 38636549 NR Description: 9-lipoxigenase [Oryza sativa (japonica
  misc_feature (1)..(181): Homolog of NCBI NO: 8515851 NR Description: lipoxygenase [Zea mays]
  misc_feature (1)..(181): Homolog of NCBI NO: 19033550 NR Description: putative lipoxygenase [Oryza sativa (japonica
  misc_feature (1)..(181): Homolog of NCBI NO: 7433147 NR Description: probable lipoxygenase (EC 1.13.11.12) - barley
  misc_feature (1)..(181): Homolog of NCBI NO: 19033554 NR Description: putative lipoxygenase [Oryza sativa (japonica
MDAVQRLARACTTVIWVASALHAAVNFGQYPYAGYLPNRPTVSRRPMPEPGSDDYKKLEAGQKEADAVFIRTITSQFQTILGISLIEILSKHSSDEVYLGQRDEPERWTSDARALDAFRRFGSRLVEIEKRIRTMNDSPTLKNRKGPVEMPYMLLYPNTSDVTGEKGEGLTAMGIPNSISI

SEQ ID NO: 18322 - protein, 180 aa, Zea mays subsp. mays
  peptide (1)..(180): Ceres Seq. ID no. 12360541
ARDHYLEHPNRKQGLPLRRGRAGHLVGDRAVGQGVPGRLLPQRRRAPARRGAAGVVEGGARGGARRPQGPRLVAQDGRRPAAGQGVHDRHLGSVRAARGRQLRAVPVRRVPAEPADREPAADAGAGQRRLQEAGGGAEGGGRGVHPHHHQPVPDHPGHLAHRDPLQALLRRGVPRPARRA

SEQ ID NO: 18323 - protein, 135 aa, Zea mays subsp. mays
  peptide (1)..(135): Ceres Seq. ID no. 12360542
  misc_feature (1)..(112): Pfam Name: Lipoxygenase Pfam Description: Lipoxygenase
  misc_feature (1)..(135): Homolog of NCBI NO: 31126788 NR Description: lipoxygenase L-2; lipoxygenase
  misc_feature (1)..(135): Homolog of NCBI NO: 18481649 NR Description: lipoxygenase [Zea mays]
  misc_feature (1)..(135): Homolog of NCBI NO: 12620877 NR Description: lipoxygenase [Zea mays]
  misc_feature (1)..(135): Homolog of NCBI NO: 4887227 NR Description: lipoxygenase [Zea mays]
  misc_feature (1)..(135): Homolog of NCBI NO: 19033549 NR Description: putative lipoxygenase [Oryza sativa (japonica
  misc_feature (1)..(135): Homolog of NCBI NO: 38636549 NR Description: 9-lipoxigenase [Oryza sativa (japonica
  misc_feature (1)..(135): Homolog of NCBI NO: 8515851 NR Description: lipoxygenase [Zea mays]
  misc_feature (1)..(135): Homolog of NCBI NO: 19033550 NR Description: putative lipoxygenase [Oryza sativa (japonica
  misc_feature (1)..(135): Homolog of NCBI NO: 7433147 NR Description: probable lipoxygenase (EC 1.13.11.12) - barley
  misc_feature (1)..(135): Homolog of NCBI NO: 19033554 NR Description: putative lipoxygenase [Oryza sativa (japonica
MPEPGSDDYKKLEAGQKEADAVFIRTITSQFQTILGISLIEILSKHSSDEVYLGQRDEPERWTSDARALDAFRRFGSRLVEIEKRIRTMNDSPTLKNRKGPVEMPYMLLYPNTSDVTGEKGEGLTAMGIPNSISI

SEQ ID NO: 18324 - DNA, 1362 bp, Zea mays subsp. mays
  misc_feature (1)..(1362): Ceres Seq. ID no. 13493020
  misc_feature: MA Experiment ID: 108527 Result: Down-regulated in Transcription
  misc_feature: MA Experiment 108527 PARAMETER Experiment Name: Zm_5mM_NO_P Parameter: Age (day) Value: 8
  misc_feature: MA Experiment 108527 PARAMETER Experiment Name: Zm_5mM_NO_P Parameter: Organism Value: Zea mays
  misc_feature: MA Experiment 108527 PARAMETER Experiment Name: Zm_5mM_NO_P Parameter: Plant Line Value: 35A19
  misc_feature: MA Experiment 108527 PARAMETER Experiment Name: Zm_5mM_NO_P Parameter: Timepoint (hr) Value: 6
  misc_feature: MA Experiment 108527 PARAMETER Experiment Name: Zm_5mM_NO_P Parameter: Tissue Value: Aerial
  misc_feature: MA Experiment 108527 PARAMETER Experiment Name: Zm_5mM_NO_P Parameter: Treatment Value: 5mM NO vs. No Treatment
  misc_feature: MA Experiment ID: 108528 Result: Up-regulated in Transcription
  misc_feature: MA Experiment 108528 PARAMETER Experiment Name: Zm_Imbibed_Seeds_P Parameter: Age (day) Value: 5 vs. 2
  misc_feature: MA Experiment 108528 PARAMETER Experiment Name: Zm_Imbibed_Seeds_P Parameter: Organism Value: Zea mays
  misc_feature: MA Experiment 108528 PARAMETER Experiment Name: Zm_Imbibed_Seeds_P Parameter: Plant Line Value: 35A19
  misc_feature: MA Experiment 108528 PARAMETER Experiment Name: Zm_Imbibed_Seeds_P Parameter: Tissue Value: Aerial vs. Embryo
  misc_feature: MA Experiment ID: 108530 Result: Up-regulated in Transcription
  misc_feature: MA Experiment 108530 PARAMETER Experiment Name: Zm_Imbibed_Seeds_P Parameter: Age (day) Value: 6 vs. 2
  misc_feature: MA Experiment 108530 PARAMETER Experiment Name: Zm_Imbibed_Seeds_P Parameter: Organism Value: Zea mays
  misc_feature: MA Experiment 108530 PARAMETER Experiment Name: Zm_Imbibed_Seeds_P Parameter: Plant Line Value: 35A19
  misc_feature: MA Experiment 108530 PARAMETER Experiment Name: Zm_Imbibed_Seeds_P Parameter: Tissue Value: Aerial vs. Embryo
  misc_feature: MA Experiment ID: 108536 Result: Down-regulated in Transcription
  misc_feature: MA Experiment 108536 PARAMETER Experiment Name: Zm_Meristem_P Parameter: Age (day) Value: 8
  misc_feature: MA Experiment 108536 PARAMETER Experiment Name: Zm_Meristem_P Parameter: Organism Value: Zea mays
  misc_feature: MA Experiment 108536 PARAMETER Experiment Name: Zm_Meristem_P Parameter: Plant Line Value: 35A19
  misc_feature: MA Experiment 108536 PARAMETER Experiment Name: Zm_Meristem_P Parameter: Tissue Value: Shoot Meristem vs. Above Shoot Meristem
  misc_feature: MA Experiment ID: 108545 Result: Up-regulated in Transcription
  misc_feature: MA Experiment 108545 PARAMETER Experiment Name: Zm_Imbibed_Seeds_P Parameter: Age (day) Value: 3 vs. 2
  misc_feature: MA Experiment 108545 PARAMETER Experiment Name: Zm_Imbibed_Seeds_P Parameter: Organism Value: Zea mays
  misc_feature: MA Experiment 108545 PARAMETER Experiment Name: Zm_Imbibed_Seeds_P Parameter: Plant Line Value: 35A19
  misc_feature: MA Experiment 108545 PARAMETER Experiment Name: Zm_Imbibed_Seeds_P Parameter: Tissue Value: Aerial vs. Embryo
  misc_feature: MA Experiment ID: 108547 Result: Up-regulated in Transcription
  misc_feature: MA Experiment 108547 PARAMETER Experiment Name: Zm_Imbibed_Seeds_P Parameter: Age (day) Value: 4 vs. 2
  misc_feature: MA Experiment 108547 PARAMETER Experiment Name: Zm_Imbibed_Seeds_P Parameter: Organism Value: Zea mays
  misc_feature: MA Experiment 108547 PARAMETER Experiment Name: Zm_Imbibed_Seeds_P Parameter: Plant Line Value: 35A19
  misc_feature: MA Experiment 108547 PARAMETER Experiment Name: Zm_Imbibed_Seeds_P Parameter: Tissue Value: Aerial vs. Embryo
  misc_feature: MA Experiment ID: 20000487 Result: Up-regulated in Transcription
  misc_feature: MA Experiment 20000487 PARAMETER Experiment Name: Zm_50mM_NH4NO3_L_to_H_P Parameter: Organism Value: Zea mays
  misc_feature: MA Experiment 20000487 PARAMETER Experiment Name: Zm_50mM_NH4NO3_L_to_H_P Parameter: Timepoint (hr) Value: 4
  misc_feature: MA Experiment 20000487 PARAMETER Experiment Name: Zm_50mM_NH4NO3_L_to_H_P Parameter: Tissue Value: Leaves
  misc_feature: MA Experiment 20000487 PARAMETER Experiment Name: Zm_50mM_NH4NO3_L_to_H_P Parameter: Treatment Value: 50mM NH4NO3 vs. 100mM Mannitol
  misc_feature: MA Experiment ID: 20000534 Result: Down-regulated in Transcription
  misc_feature: MA Experiment 20000534 PARAMETER Experiment Name: Zm_Hybrid_Pollen_P Parameter: Age (day) Value: 8
  misc_feature: MA Experiment 20000534 PARAMETER Experiment Name: Zm_Hybrid_Pollen_P Parameter: Organism Value: Zea mays
  misc_feature: MA Experiment 20000534 PARAMETER Experiment Name: Zm_Hybrid_Pollen_P Parameter: Plant Line Value: 35A19
  misc_feature: MA Experiment 20000534 PARAMETER Experiment Name: Zm_Hybrid_Pollen_P Parameter: Tissue Value: Pollen vs. Aerial
  misc_feature: MA Experiment ID: 20000535 Result: Up-regulated in Transcription
  misc_feature: MA Experiment 20000535 PARAMETER Experiment Name: Zm_Hybrid_Seed_Dev_P Parameter: DAP Value: 30 vs. 12
  misc_feature: MA Experiment 20000535 PARAMETER Experiment Name: Zm_Hybrid_Seed_Dev_P Parameter: Organism Value: Zea mays
  misc_feature: MA Experiment 20000535 PARAMETER Experiment Name: Zm_Hybrid_Seed_Dev_P Parameter: Plant Line Value: 35A19
  misc_feature: MA Experiment 20000535 PARAMETER Experiment Name: Zm_Hybrid_Seed_Dev_P Parameter: Tissue Value: Embryo vs. Unfert Floret
  misc_feature: MA Experiment ID: 20000626 Result: Down-regulated in Transcription
  misc_feature: MA Experiment 20000626 PARAMETER Experiment Name: Zm_Herbicide-Treatments_P Parameter: Timepoint (hr) Value: 12
  misc_feature: MA Experiment 20000626 PARAMETER Experiment Name: Zm_Herbicide-Treatments_P Parameter: Tissue Value: Aerial
  misc_feature: MA Experiment 20000626 PARAMETER Experiment Name: Zm_Herbicide-Treatments_P Parameter: Treatment Value: Roundup vs. No Treatment
agttcaccgtccctccctgtccttgccatggccatccccaccgcccccgccctcctcttcccctccgttctccctaactcattcccccgccggacaccctggcgacacctcgtccggcggcaaccgcgtcacctccgcgcgggccgcccgcgcctgcaggcgccggcgccggctcctcccccggtggcggaggtcgcggcggagcgggacgacacgcctccgctcaggctgctcgagccgccgcaggaggacgaccccttcccgcccgagatggagcccgcggaccctgatttctaccggataggatatgcgcggatgatgcgcgcctatgggatcgagttcctcgaaggccccgacgggatgggcgtctacgcttcccgggacgtggagccacttcgcagagctagagtgattatggagattccgttggagctgatgctgactataactcaaaagaaaccttggatgtttttccctgacattattccactaggccatcctatatttgatgttatcgagtcaacagatccagagacagattgggatctaagattagcatgtcttcttctatatgcatttgatatagaagacaacttttggcagttatattctgattttttgccaagtgttgatgaatgcactagtttgctgctggcaccaaaggaagatctaatggaactagaagatgaagatcttgcttcacaaatgttaaaacaccaggaacgagcaattgacttttggcaaaagcattgggacaaaccaattcctctaaagctgaaacgccttgcacgtgaccatgagagatttctctgggcactgagtatagtacagtctcgttctgtcaacttgaagttgagaatgggagccttcatccaagatgcaaatgtgctagctccttatgctgatatgttgaaccactcacccaatgctaattgcttcctgcattggcgttttaaagaccgtatgcttgaagttatgattaaggctggacaagctatcaagaaaggagacgagatgacgatagattatatgagtggcgtcaacagcaaatttatggaaagatatgggttctcatcaccaacgaatccttgggagctcataaatttctcgagtcctgcaacaattcacatggattccttcttatcggtcttcaatatcgctggcttgcatgatgagctgtaccacaattctgcattgacctcagtagtagaaaccgactttgtggacggagcagtcgtagcagcagccagagcattgccgacatggtcagatggtgatgttcctgcaattcctagtgtggagagaaaatctgctcaggcactgcaagaggagtgccgccaaatgttggattcattcccaact

SEQ ID NO: 18325 - protein, 454 aa, Zea mays subsp. mays
  peptide (1)..(454): Ceres Seq. ID no. 13493021
  misc_feature (169)..(306): Homolog of NCBI NO: 7485732 NR Description: hypothetical protein F18F4.220 - Arabidopsis
  misc_feature (303)..(453): Homolog of NCBI NO: 30685001 NR Description: expressed protein [Arabidopsis thaliana]
  misc_feature (303)..(453): Homolog of NCBI NO: 7485733 NR Description: hypothetical protein F18F4.230 - Arabidopsis
  misc_feature (47)..(251): Homolog of NCBI NO: 7485732 NR Description: hypothetical protein F18F4.220 - Arabidopsis
  misc_feature (47)..(306): Homolog of NCBI NO: 30684996 NR Description: expressed protein [Arabidopsis thaliana]
  misc_feature (47)..(453): Homolog of NCBI NO: 28393566 NR Description: unknown protein [Arabidopsis thaliana]
SSPSLPVLAMAIPTAPALLFPSVLPNSFPRRTPWRHLVRRQPRHLRAGRPRLQAPAPAPPPVAEVAAERDDTPPLRLLEPPQEDDPFPPEMEPADPDFYRIGYARMMRAYGIEFLEGPDGMGVYASRDVEPLRRARVIMEIPLELMLTITQKKPWMFFPDIIPLGHPIFDVIESTDPETDWDLRLACLLLYAFDIEDNFWQLYSDFLPSVDECTSLLLAPKEDLMELEDEDLASQMLKHQERAIDFWQKHWDKPIPLKLKRLARDHERFLWALSIVQSRSVNLKLRMGAFIQDANVLAPYADMLNHSPNANCFLHWRFKDRMLEVMIKAGQAIKKGDEMTIDYMSGVNSKFMERYGFSSPTNPWELINFSSPATIHMDSFLSVFNIAGLHDELYHNSALTSVVETDFVDGAVVAAARALPTWSDGDVPAIPSVERKSAQALQEECRQMLDSFPT

SEQ ID NO: 18326 - protein, 445 aa, Zea mays subsp. mays
  peptide (1)..(445): Ceres Seq. ID no. 13493022
  misc_feature (160)..(297): Homolog of NCBI NO: 7485732 NR Description: hypothetical protein F18F4.220 - Arabidopsis
  misc_feature (294)..(444): Homolog of NCBI NO: 30685001 NR Description: expressed protein [Arabidopsis thaliana]
  misc_feature (294)..(444): Homolog of NCBI NO: 7485733 NR Description: hypothetical protein F18F4.230 - Arabidopsis
  misc_feature (38)..(242): Homolog of NCBI NO: 7485732 NR Description: hypothetical protein F18F4.220 - Arabidopsis
  misc_feature (38)..(297): Homolog of NCBI NO: 30684996 NR Description: expressed protein [Arabidopsis thaliana]
  misc_feature (38)..(444): Homolog of NCBI NO: 28393566 NR Description: unknown protein [Arabidopsis thaliana]
MAIPTAPALLFPSVLPNSFPRRTPWRHLVRRQPRHLRAGRPRLQAPAPAPPPVAEVAAERDDTPPLRLLEPPQEDDPFPPEMEPADPDFYRIGYARMMRAYGIEFLEGPDGMGVYASRDVEPLRRARVIMEIPLELMLTITQKKPWMFFPDIIPLGHPIFDVIESTDPETDWDLRLACLLLYAFDIEDNFWQLYSDFLPSVDECTSLLLAPKEDLMELEDEDLASQMLKHQERAIDFWQKHWDKPIPLKLKRLARDHERFLWALSIVQSRSVNLKLRMGAFIQDANVLAPYADMLNHSPNANCFLHWRFKDRMLEVMIKAGQAIKKGDEMTIDYMSGVNSKFMERYGFSSPTNPWELINFSSPATIHMDSFLSVFNIAGLHDELYHNSALTSVVETDFVDGAVVAAARALPTWSDGDVPAIPSVERKSAQALQEECRQMLDSFPT

SEQ ID NO: 18327 - protein, 364 aa, Zea mays subsp. mays
  peptide (1)..(364): Ceres Seq. ID no. 13493023
  misc_feature (79)..(216): Homolog of NCBI NO: 7485732 NR Description: hypothetical protein F18F4.220 - Arabidopsis
  misc_feature (213)..(363): Homolog of NCBI NO: 30685001 NR Description: expressed protein [Arabidopsis thaliana]
  misc_feature (213)..(363): Homolog of NCBI NO: 7485733 NR Description: hypothetical protein F18F4.230 - Arabidopsis
  misc_feature (1)..(161): Homolog of NCBI NO: 7485732 NR Description: hypothetical protein F18F4.220 - Arabidopsis
  misc_feature (1)..(216): Homolog of NCBI NO: 30684996 NR Description: expressed protein [Arabidopsis thaliana]
  misc_feature (1)..(363): Homolog of NCBI NO: 28393566 NR Description: unknown protein [Arabidopsis thaliana]
MEPADPDFYRIGYARMMRAYGIEFLEGPDGMGVYASRDVEPLRRARVIMEIPLELMLTITQKKPWMFFPDIIPLGHPIFDVIESTDPETDWDLRLACLLLYAFDIEDNFWQLYSDFLPSVDECTSLLLAPKEDLMELEDEDLASQMLKHQERAIDFWQKHWDKPIPLKLKRLARDHERFLWALSIVQSRSVNLKLRMGAFIQDANVLAPYADMLNHSPNANCFLHWRFKDRMLEVMIKAGQAIKKGDEMTIDYMSGVNSKFMERYGFSSPTNPWELINFSSPATIHMDSFLSVFNIAGLHDELYHNSALTSVVETDFVDGAVVAAARALPTWSDGDVPAIPSVERKSAQALQEECRQMLDSFPT

SEQ ID NO: 18328 - DNA, 1936 bp, Zea mays subsp. mays
  misc_feature (1)..(1936): Ceres Seq. ID no. 12435348
  misc_feature: MA Experiment ID: 108543 Result: Down-regulated in Transcription
gcacgagaccattacctagaacatcctaatcgaaaaagggaaagcattctccaatatccacctcctcctcgcccccctctctctctctaaaagaactgaaaagataagggggaaatcctcaagtgctcgttacataaaccctaacctcgttggattcgcagcaaaagcccaccaattggaagccctccgatgttccagctgcatgctggagctgagccgtgctcggtttgacgaaattttgcatcccttctgtgcttggaccacccgattgaggctgtttctccgagggggcgtgccagcggtttcgcggcccaggtcctcacctgtgctatccggcgccggatccgggtttgttccggtgagaggtcgggcttttggtggggtctgtacagcttggagctcaatttgccggcctgagttggagtcgcgactgcggtggcggtgattgaggtagtcgcgtcgatttggcacgcgtttcctgccatttgggtgagccagcctttcctggcaatcttggcgggcgtttcgtcttgctgcgtggcagaaaggtgtgacctttgtgccgtgcgatgcatcccaaggcacgaatccacgccgacccagtgcgcgaggtcgaccactttgactgcctgccggattcgctcgtcctgctgatcctgaacaaggtcgaggacgtgcgatcgctcggccggtgctacgccgtgtccaagcggctttgtgggcttgtcccccttgtccatgatgtgtatgtcaagattgaccgcgtcgtggcggtcgacggcgacgctgaggacgcgctcaacctgtcatcgccgaagcctcggaacatcttctcgcacttcctgaagctgatgctcttcaccatcatcaagcctttccacaacatgcgcaaccctaatggtactgggaggtcattgttcccgcagctctcgcaccactcgccagcgcaggtgctcaggaacttcacgcacatcaggaatcttcggatcgagctcccctctggggatgtgggtactgaggagggagttctcctgaaatggcgggcagagtatgggagcacacttcagagttgtgtgatcctggggggtacccgggttgaccgcaagcctgttggtggagagcatgagcagtctttggaggataatggaagcatgccagagtctttctataccaacggtgggctgaaacttcgtgtcgtctggacaatcagctctctaattgcggcatcaacgaggcactatcttctccgctcaatcatcaatgaccatcccacacttctgagcttggtactgacagatgccgatggccaaggcacattgtgcatgggggcagagcagctgaaggaattcagagagaaccagttgtcggcatcagcatgttccaacaggactcaggtcccagcctgcaacatgaagctcaagtatgctccatatcttgaactgcctggtggtatggcgttgcaaggcgccactttggtggctatcaaaccctcacctgacggaagcaatggaagccaccctaaccgtaaagaagctgacgcatttgtctttggagcatttgatgggccatttaaggctgctgtgaaggctttgatgaagaggcgcacttaccttctggagatgaatggcttctagaaatcttgtgttcgcggtggtatcgagcttgttggtgctatgcatggcacatttagctaagcttttcacctgtgtaatatccaagaaggcaccatctctagttgctgcttttagtctgctgttttagctctttgtacagtgttaacatttggttatataaaaatcgtatcaagttctctagtgtaatagtgaatctctccatagttcaccatcctggcccctggtgtaatatccaagaaatcatatcaggtacataacattcattttgggattgtgaattgaaagagactgatctgatgccg

SEQ ID NO: 18329 - protein, 354 aa, Zea mays subsp. mays
  peptide (1)..(354): Ceres Seq. ID no. 12435349
  misc_feature (18)..(64): Pfam Name: F-box domain Pfam Description: F-box domain
  misc_feature (15)..(354): Homolog of NCBI NO: 18411823 NR Description: expressed protein
  misc_feature (16)..(102): Homolog of NCBI NO: 34909910 NR Description: P0665A11.15 [Oryza sativa (japonica
  misc_feature (120)..(354): Homolog of NCBI NO: 34909910 NR Description: P0665A11.15 [Oryza sativa (japonica
  misc_feature (3)..(115): Homolog of NCBI NO: 18397400 NR Description: expressed protein
  misc_feature (88)..(354): Homolog of NCBI NO: 18397400 NR Description: expressed protein
  misc_feature (3)..(115): Homolog of NCBI NO: 15237391 NR Description: putative protein
  misc_feature (120)..(354): Homolog of NCBI NO: 15237391 NR Description: putative protein
  misc_feature (1)..(129): Homolog of NCBI NO: 15236865 NR Description: hypothetical protein; protein id: At4g18380.1
  misc_feature (120)..(354): Homolog of NCBI NO: 15236865 NR Description: hypothetical protein; protein id: At4g18380.1
  misc_feature (4)..(354): Homolog of NCBI NO: 34909194 NR Description: P0425G02.20 [Oryza sativa (japonica
MHPKARIHADPVREVDHFDCLPDSLVLLILNKVEDVRSLGRCYAVSKRLCGLVPLVHDVYVKIDRVVAVDGDAEDALNLSSPKPRNIFSHFLKLMLFTIIKPFHNMRNPNGTGRSLFPQLSHHSPAQVLRNFTHIRNLRIELPSGDVGTEEGVLLKWRAEYGSTLQSCVILGGTRVDRKPVGGEHEQSLEDNGSMPESFYTNGGLKLRVVWTISSLIAASTRHYLLRSIINDHPTLLSLVLTDADGQGTLCMGAEQLKEFRENQLSASACSNRTQVPACNMKLKYAPYLELPGGMALQGATLVAIKPSPDGSNGSHPNRKEADAFVFGAFDGPFKAAVKALMKRRTYLLEMNGF

SEQ ID NO: 18330 - protein, 260 aa, Zea mays subsp. mays
  peptide (1)..(260): Ceres Seq. ID no. 12435350
  misc_feature (1)..(260): Homolog of NCBI NO: 34909194 NR Description: P0425G02.20 [Oryza sativa (japonica
  misc_feature (26)..(260): Homolog of NCBI NO: 15219845 NR Description: hypothetical protein; protein id: At1g22220.1
  misc_feature (1)..(260): Homolog of NCBI NO: 18411823 NR Description: expressed protein
  misc_feature (26)..(260): Homolog of NCBI NO: 34909910 NR Description: P0665A11.15 [Oryza sativa (japonica
  misc_feature (1)..(21): Homolog of NCBI NO: 18397400 NR Description: expressed protein
  misc_feature (1)..(260): Homolog of NCBI NO: 18397400 NR Description: expressed protein
  misc_feature (1)..(21): Homolog of NCBI NO: 15237391 NR Description: putative protein
  misc_feature (26)..(260): Homolog of NCBI NO: 15237391 NR Description: putative protein
  misc_feature (1)..(35): Homolog of NCBI NO: 15236865 NR Description: hypothetical protein; protein id: At4g18380.1
  misc_feature (26)..(260): Homolog of NCBI NO: 15236865 NR Description: hypothetical protein; protein id: At4g18380.1
MLFTIIKPFHNMRNPNGTGRSLFPQLSHHSPAQVLRNFTHIRNLRIELPSGDVGTEEGVLLKWRAEYGSTLQSCVILGGTRVDRKPVGGEHEQSLEDNGSMPESFYTNGGLKLRVVWTISSLIAASTRHYLLRSIINDHPTLLSLVLTDADGQGTLCMGAEQLKEFRENQLSASACSNRTQVPACNMKLKYAPYLELPGGMALQGATLVAIKPSPDGSNGSHPNRKEADAFVFGAFDGPFKAAVKALMKRRTYLLEMNGF

SEQ ID NO: 18331 - protein, 249 aa, Zea mays subsp. mays
  peptide (1)..(249): Ceres Seq. ID no. 12435351
  misc_feature (15)..(249): Homolog of NCBI NO: 15219845 NR Description: hypothetical protein; protein id: At1g22220.1
  misc_feature (1)..(249): Homolog of NCBI NO: 18411823 NR Description: expressed protein
  misc_feature (15)..(249): Homolog of NCBI NO: 34909910 NR Description: P0665A11.15 [Oryza sativa (japonica
  misc_feature (1)..(249): Homolog of NCBI NO: 18397400 NR Description: expressed protein
  misc_feature (15)..(249): Homolog of NCBI NO: 15237391 NR Description: putative protein
  misc_feature (1)..(24): Homolog of NCBI NO: 15236865 NR Description: hypothetical protein; protein id: At4g18380.1
  misc_feature (15)..(249): Homolog of NCBI NO: 15236865 NR Description: hypothetical protein; protein id: At4g18380.1
  misc_feature (1)..(249): Homolog of NCBI NO: 34909194 NR Description: P0425G02.20 [Oryza sativa (japonica
MRNPNGTGRSLFPQLSHHSPAQVLRNFTHIRNLRIELPSGDVGTEEGVLLKWRAEYGSTLQSCVILGGTRVDRKPVGGEHEQSLEDNGSMPESFYTNGGLKLRVVWTISSLIAASTRHYLLRSIINDHPTLLSLVLTDADGQGTLCMGAEQLKEFRENQLSASACSNRTQVPACNMKLKYAPYLELPGGMALQGATLVAIKPSPDGSNGSHPNRKEADAFVFGAFDGPFKAAVKALMKRRTYLLEMNGF

SEQ ID NO: 18332 - DNA, 2245 bp, Zea mays subsp. mays
  misc_feature (1)..(2245): Ceres Seq. ID no. 12375229
  misc_feature: MA Experiment ID: 20000626 Result: Down-regulated in Transcription
  misc_feature: MA Experiment 20000626 PARAMETER Experiment Name: Zm_Herbicide-Treatments_P Parameter: Timepoint (hr) Value: 12
  misc_feature: MA Experiment 20000626 PARAMETER Experiment Name: Zm_Herbicide-Treatments_P Parameter: Tissue Value: Aerial
  misc_feature: MA Experiment 20000626 PARAMETER Experiment Name: Zm_Herbicide-Treatments_P Parameter: Treatment Value: Roundup vs. No Treatment
gcacgagaccattacctagaacatcctaatcgaaaaaaaaccgaagcctccccggttatcccccggcctccacctgaccactaccaccacccgggacgtcttccatggcctcctcatagaataagctctatctcaccgcaacaactcctcattacaatccttcaagagagcagcactacactacactacattagagagaggtcgagcgcccctcctccgatccgccggcccgccgagagctagctgctgatcggtcgaggagagtcatggcgacgtcgacgatgcgcgttgccgccggcgtgctgctggtcgtgtcggcgctggcgaccttggcccgggccgaggacccctacctgttcttcgagtggaaggtgacgtacgggaccaggtccctgctgggagtgccccagaaggtcatcctcatcaacggcgagttccctggccccaggatcaactgctcctccaacaacaacatcgtcgtcaacgtcttcaaccagctcgaccatccgctccttttcacctggaacgggatgcagcacaggaagaactcgtggatggacgggatgccaggcacgcagtgccccatcgcgcccaacaccaacttcacgtacaagtggcagcccaaggaccagatcggcagcttcttctacttcccgtccatcggcatgcagcgggcggcgggcgggtacggcgccatcagcgtggtgagccgcctcctcatcccggtccccttcgaccagccgccgccggagagcgaccacgcggtgctcatcggcgactggtacaccaaggaccacgaggtgctggcgcgccagctcgacgccggcaagagcgtgggccgccccgcgggcgtgctcatcaacggcaagggaggcaaggacctggaggccgccgcgcccatgctcaccttcgaggcgggcaagacgtaccgtctccgcgtgtgcaacaccgggatcaaggcgtcgctcaacttccgcatccagggccactacatgaagctcgtggagctggagggctcccacaccctgcaggacgtgtacgactcgctggacgtgcacgtcggcccactgcctctccgtgctggtcgacgccgaccaggcgcccggcgactactacatggtggcctccacgcggttcatccacgacgccaagtccgcctccgccgtcatccgctacgccggctccagcggcgccccgccggcgcccaacatgaccgagccaccggccggctgggcctggtccatcaaccaggccaggtcgttccgctggaacctgacggccagcgccgcgcgccccaacccgcagggctcctaccactacggccagatcaacatcacccgcaccatcaaggtcatggtctcccgcggccacatcgacggcaagctccgctacggcttcaacggcatctcccacagggataccgagacccccctcaagctcgccgagtacttcaacgtcaccgacggggtgttcagctacaaccagatgggcgacgtgccacccgctgttaacgggccactccatgtcatccccaacgtcatcaccgccgagttccggaccttcatcgagatcgtcttcgagaaccccgagaagagcatagactccctccacctcgacggctacgccttcttcggcgtcgggatggggcccgggacgtggtcgccggagatgaggaagacgtacaacctactggacacggtgagccggcacacgatccaggtgtacccgcggtcatggacggcgatcatgctgacattcgacaacgcgggcatgtggagcgtccggtccaacgtctgggagcggtactacctcggggagcagttctacatcagcgtcatctcgccggcgcggtcgctgcgcgacgagtacaacatgcccgacaacgccctccgctgcggcaaggtcgtggggctgccgctgccgccatcctacgcccccgcgcgctaaagacgacgaaggcgccgttttcacctcgtgttctgaccatccagtctaactaacccattcctgtgctgctcggcgaaataaaatcatcaaaaagaacaaagacgaaggaagcctagggaagggagaaggacgttgggtgggggtgagccaaatgagaacgcacggatatatctattcatgtaatcttgagatgccctctcaaatcactgtaatggggtttaaaaaacaatcattgtaatgggagttatatatacttttatcttaacatttatttacaccagcaagtcctggtgtatgc

SEQ ID NO: 18333 - protein, 414 aa, Zea mays subsp. mays
  peptide (1)..(414): Ceres Seq. ID no. 12375230
  misc_feature (1)..(266): Homolog of NCBI NO: 19387132 NR Description: 1-ascorbate oxidase [Petunia x hybrida]
  misc_feature (7)..(266): Homolog of NCBI NO: 18405425 NR Description: pectinesterase (pectin methylesterase) family
  misc_feature (7)..(266): Homolog of NCBI NO: 99807 NR Description: pollen-specific protein Bp10 (clone Bp 1001) -
  misc_feature (12)..(266): Homolog of NCBI NO: 15231231 NR Description: pectinesterase (pectin methylesterase) family
  misc_feature (6)..(266): Homolog of NCBI NO: 15222747 NR Description: pectinesterase (pectin methylesterase) family
  misc_feature (6)..(266): Homolog of NCBI NO: 99808 NR Description: pollen-specific protein Bp10 (clone Bp 1003) -
  misc_feature (6)..(266): Homolog of NCBI NO: 114268 NR Description: L-ascorbate oxidase homolog precursor (Ascorbase)
  misc_feature (6)..(266): Homolog of NCBI NO: 99809 NR Description: pollen-specific protein Bp10 (clone Bp 1002) -
  misc_feature (25)..(266): Homolog of NCBI NO: 128592 NR Description: POLLEN-SPECIFIC PROTEIN NTP303 PRECURSOR
  misc_feature (6)..(266): Homolog of NCBI NO: 15231228 NR Description: pectinesterase (pectin methylesterase) family
MATSTMRVAAGVLLVVSALATLARAEDPYLFFEWKVTYGTRSLLGVPQKVILINGEFPGPRINCSSNNNIVVNVFNQLDHPLLFTWNGMQHRKNSWMDGMPGTQCPIAPNTNFTYKWQPKDQIGSFFYFPSIGMQRAAGGYGAISVVSRLLIPVPFDQPPPESDHAVLIGDWYTKDHEVLARQLDAGKSVGRPAGVLINGKGGKDLEAAAPMLTFEAGKTYRLRVCNTGIKASLNFRIQGHYMKLVELEGSHTLQDVYDSLDVHVGPLPLRAGRRRPGARRLLHGGLHAVHPRRQVRLRRHPLRRLQRRPAGAQHDRATGRLGLVHQPGQVVPLEPDGQRRAPQPAGLLPLRPDQHHPHHQGHGLPRPHRRQAPLRLQRHLPQGYRDPPQARRVLQRHRRGVQLQPDGRRATRC

SEQ ID NO: 18334 - protein, 409 aa, Zea mays subsp. mays
  peptide (1)..(409): Ceres Seq. ID no. 12375231
  misc_feature (1)..(261): Homolog of NCBI NO: 19387132 NR Description: 1-ascorbate oxidase [Petunia x hybrida]
  misc_feature (2)..(261): Homolog of NCBI NO: 18405425 NR Description: pectinesterase (pectin methylesterase) family
  misc_feature (2)..(261): Homolog of NCBI NO: 99807 NR Description: pollen-specific protein Bp10 (clone Bp 1001) -
  misc_feature (7)..(261): Homolog of NCBI NO: 15231231 NR Description: pectinesterase (pectin methylesterase) family
  misc_feature (1)..(261): Homolog of NCBI NO: 15222747 NR Description: pectinesterase (pectin methylesterase) family
  misc_feature (1)..(261): Homolog of NCBI NO: 99808 NR Description: pollen-specific protein Bp10 (clone Bp 1003) -
  misc_feature (1)..(261): Homolog of NCBI NO: 114268 NR Description: L-ascorbate oxidase homolog precursor (Ascorbase)
  misc_feature (1)..(261): Homolog of NCBI NO: 99809 NR Description: pollen-specific protein Bp10 (clone Bp 1002) -
  misc_feature (20)..(261): Homolog of NCBI NO: 128592 NR Description: POLLEN-SPECIFIC PROTEIN NTP303 PRECURSOR
  misc_feature (1)..(261): Homolog of NCBI NO: 15231228 NR Description: pectinesterase (pectin methylesterase) family
MRVAAGVLLVVSALATLARAEDPYLFFEWKVTYGTRSLLGVPQKVILINGEFPGPRINCSSNNNIVVNVFNQLDHPLLFTWNGMQHRKNSWMDGMPGTQCPIAPNTNFTYKWQPKDQIGSFFYFPSIGMQRAAGGYGAISVVSRLLIPVPFDQPPPESDHAVLIGDWYTKDHEVLARQLDAGKSVGRPAGVLINGKGGKDLEAAAPMLTFEAGKTYRLRVCNTGIKASLNFRIQGHYMKLVELEGSHTLQDVYDSLDVHVGPLPLRAGRRRPGARRLLHGGLHAVHPRRQVRLRRHPLRRLQRRPAGAQHDRATGRLGLVHQPGQVVPLEPDGQRRAPQPAGLLPLRPDQHHPHHQGHGLPRPHRRQAPLRLQRHLPQGYRDPPQARRVLQRHRRGVQLQPDGRRATRC

SEQ ID NO: 18335 - protein, 326 aa, Zea mays subsp. mays
  peptide (1)..(326): Ceres Seq. ID no. 12375232
  misc_feature (1)..(178): Homolog of NCBI NO: 19387132 NR Description: 1-ascorbate oxidase [Petunia x hybrida]
  misc_feature (1)..(178): Homolog of NCBI NO: 18405425 NR Description: pectinesterase (pectin methylesterase) family
  misc_feature (1)..(178): Homolog of NCBI NO: 99807 NR Description: pollen-specific protein Bp10 (clone Bp 1001) -
  misc_feature (1)..(178): Homolog of NCBI NO: 15231231 NR Description: pectinesterase (pectin methylesterase) family
  misc_feature (1)..(178): Homolog of NCBI NO: 15222747 NR Description: pectinesterase (pectin methylesterase) family
  misc_feature (1)..(178): Homolog of NCBI NO: 99808 NR Description: pollen-specific protein Bp10 (clone Bp 1003) -
  misc_feature (1)..(178): Homolog of NCBI NO: 114268 NR Description: L-ascorbate oxidase homolog precursor (Ascorbase)
  misc_feature (1)..(178): Homolog of NCBI NO: 99809 NR Description: pollen-specific protein Bp10 (clone Bp 1002) -
  misc_feature (1)..(178): Homolog of NCBI NO: 128592 NR Description: POLLEN-SPECIFIC PROTEIN NTP303 PRECURSOR
  misc_feature (1)..(178): Homolog of NCBI NO: 15231228 NR Description: pectinesterase (pectin methylesterase) family
MQHRKNSWMDGMPGTQCPIAPNTNFTYKWQPKDQIGSFFYFPSIGMQRAAGGYGAISVVSRLLIPVPFDQPPPESDHAVLIGDWYTKDHEVLARQLDAGKSVGRPAGVLINGKGGKDLEAAAPMLTFEAGKTYRLRVCNTGIKASLNFRIQGHYMKLVELEGSHTLQDVYDSLDVHVGPLPLRAGRRRPGARRLLHGGLHAVHPRRQVRLRRHPLRRLQRRPAGAQHDRATGRLGLVHQPGQVVPLEPDGQRRAPQPAGLLPLRPDQHHPHHQGHGLPRPHRRQAPLRLQRHLPQGYRDPPQARRVLQRHRRGVQLQPDGRRATRC

SEQ ID NO: 18336 - DNA, 2279 bp, Zea mays subsp. mays
  misc_feature (1)..(2279): Ceres Seq. ID no. 12450444
  misc_feature: MA Experiment ID: 108504 Result: Down-regulated in Transcription
  misc_feature: MA Experiment 108504 PARAMETER Experiment Name: Zm_Drought_P Parameter: Age (day) Value: 8
  misc_feature: MA Experiment 108504 PARAMETER Experiment Name: Zm_Drought_P Parameter: Organism Value: Zea mays
  misc_feature: MA Experiment 108504 PARAMETER Experiment Name: Zm_Drought_P Parameter: Plant Line Value: 35A19
  misc_feature: MA Experiment 108504 PARAMETER Experiment Name: Zm_Drought_P Parameter: Timepoint (hr) Value: 12
  misc_feature: MA Experiment 108504 PARAMETER Experiment Name: Zm_Drought_P Parameter: Tissue Value: Aerial
  misc_feature: MA Experiment 108504 PARAMETER Experiment Name: Zm_Drought_P Parameter: Treatment Value: Drought vs. No Drought
  misc_feature: MA Experiment ID: 108528 Result: Up-regulated in Transcription
  misc_feature: MA Experiment 108528 PARAMETER Experiment Name: Zm_Imbibed_Seeds_P Parameter: Age (day) Value: 5 vs. 2
  misc_feature: MA Experiment 108528 PARAMETER Experiment Name: Zm_Imbibed_Seeds_P Parameter: Organism Value: Zea mays
  misc_feature: MA Experiment 108528 PARAMETER Experiment Name: Zm_Imbibed_Seeds_P Parameter: Plant Line Value: 35A19
  misc_feature: MA Experiment 108528 PARAMETER Experiment Name: Zm_Imbibed_Seeds_P Parameter: Tissue Value: Aerial vs. Embryo
  misc_feature: MA Experiment ID: 108529 Result: Up-regulated in Transcription
  misc_feature: MA Experiment 108529 PARAMETER Experiment Name: Zm_Imbibed_Seeds_P Parameter: Age (day) Value: 5 vs. 2
  misc_feature: MA Experiment 108529 PARAMETER Experiment Name: Zm_Imbibed_Seeds_P Parameter: Organism Value: Zea mays
  misc_feature: MA Experiment 108529 PARAMETER Experiment Name: Zm_Imbibed_Seeds_P Parameter: Plant Line Value: 35A19
  misc_feature: MA Experiment 108529 PARAMETER Experiment Name: Zm_Imbibed_Seeds_P Parameter: Tissue Value: Roots vs. Embryo
  misc_feature: MA Experiment ID: 108530 Result: Up-regulated in Transcription
  misc_feature: MA Experiment 108530 PARAMETER Experiment Name: Zm_Imbibed_Seeds_P Parameter: Age (day) Value: 6 vs. 2
  misc_feature: MA Experiment 108530 PARAMETER Experiment Name: Zm_Imbibed_Seeds_P Parameter: Organism Value: Zea mays
  misc_feature: MA Experiment 108530 PARAMETER Experiment Name: Zm_Imbibed_Seeds_P Parameter: Plant Line Value: 35A19
  misc_feature: MA Experiment 108530 PARAMETER Experiment Name: Zm_Imbibed_Seeds_P Parameter: Tissue Value: Aerial vs. Embryo
  misc_feature: MA Experiment ID: 108535 Result: Down-regulated in Transcription
  misc_feature: MA Experiment 108535 PARAMETER Experiment Name: Zm_Meristem_P Parameter: Age (day) Value: 8
  misc_feature: MA Experiment 108535 PARAMETER Experiment Name: Zm_Meristem_P Parameter: Organism Value: Zea mays
  misc_feature: MA Experiment 108535 PARAMETER Experiment Name: Zm_Meristem_P Parameter: Plant Line Value: 35A19
  misc_feature: MA Experiment 108535 PARAMETER Experiment Name: Zm_Meristem_P Parameter: Tissue Value: Root Meristem vs. Above Root Meristem
  misc_feature: MA Experiment ID: 108547 Result: Up-regulated in Transcription
  misc_feature: MA Experiment 108547 PARAMETER Experiment Name: Zm_Imbibed_Seeds_P Parameter: Age (day) Value: 4 vs. 2
  misc_feature: MA Experiment 108547 PARAMETER Experiment Name: Zm_Imbibed_Seeds_P Parameter: Organism Value: Zea mays
  misc_feature: MA Experiment 108547 PARAMETER Experiment Name: Zm_Imbibed_Seeds_P Parameter: Plant Line Value: 35A19
  misc_feature: MA Experiment 108547 PARAMETER Experiment Name: Zm_Imbibed_Seeds_P Parameter: Tissue Value: Aerial vs. Embryo
  misc_feature: MA Experiment ID: 20000108 Result: Down-regulated in Transcription
  misc_feature: MA Experiment 20000108 PARAMETER Experiment Name: Zm_Root-Tips_P Parameter: Age (day) Value: 12
  misc_feature: MA Experiment 20000108 PARAMETER Experiment Name: Zm_Root-Tips_P Parameter: Organism Value: Zea mays
  misc_feature: MA Experiment 20000108 PARAMETER Experiment Name: Zm_Root-Tips_P Parameter: Tissue Value: Root tips vs. Root mid region    35
  misc_feature: MA Experiment 20000108 PARAMETER Experiment Name: Zm_Root-Tips_P Parameter: Tissue Value: Root tips vs. Root mid region   Sequence Listing-Misc Features (4)
  misc_feature: MA Experiment ID: 20000535 Result: Down-regulated in Transcription
  misc_feature: MA Experiment 20000535 PARAMETER Experiment Name: Zm_Hybrid_Seed_Dev_P Parameter: DAP Value: 30 vs. 12
  misc_feature: MA Experiment 20000535 PARAMETER Experiment Name: Zm_Hybrid_Seed_Dev_P Parameter: Organism Value: Zea mays
  misc_feature: MA Experiment 20000535 PARAMETER Experiment Name: Zm_Hybrid_Seed_Dev_P Parameter: Plant Line Value: 35A19
  misc_feature: MA Experiment 20000535 PARAMETER Experiment Name: Zm_Hybrid_Seed_Dev_P Parameter: Tissue Value: Embryo vs. Unfert Floret
ctcccgccccgcggctcgtctccctctcacggcctcacctcacaacctcacggtcctcacctcactccaccacgttcgccgcctcgctgccgcgtcgggccagtgcgtgcgggcgggcgtgagtgactggctctcctcggcgcgcggacccaggggcggcggcgatggggaagaatatgcgcatcaagacggcgcccaaggcgaaccgtgtccccctcctcggcgacggggagacgtcaagggcgctctcggacctggaagagggcagcgacgtccagccagcgaacgtcggcttctgtcgggtcatcaaacttgcgaagcatgacgccggaaagctggtcctcgccaccgcggcgctgctcgtcgcctccctcagtaaccttctcgttcccaaatatggtggcaagataattgacattgtgtcaagagatgttcggcgcccagaagataaggcgcaagccctggaggatgtcaagggcacaattttgtacattgtgacaatcgtcttagtcggttcagtttgcacggctcttcgggcatggctattcaattctgctagtgagagagtagtcgctcgactaaggaaagacttgttcagccatctcataaaccaggaaatagcgttttttgatgtgactagaacaggagagctcttaagcaggctttctgaagatacacaaataataaagaatgctgctacaaccaacctatcagaggcactgcgcaatgtaactactacagctattggtcttggtttcatgttttcaacttcatggaagttaacattgctggcacttgtaattgtcccggttatatcagttgctgtgcgtagatttggacgttttcttcgtgagctttcacatcaaacacaagctgctgcagctgtagcttcatccatagctgaggaatctttcggtgccatccgcacagtaagatcctttgctcaggaatatcatgagatttcacgctatggtgaaaaagtagaggagacacttaaacttggtctcaaacaagctaaagttgttggcttgttttctggagggcttaatgctgcatcaaccatgtctgtggttattgttgttatttatggcgccaacttaaccatcaatggttacatgacaactggctctcttacatcattcatcttatacagccttacagttggttcgtcagtatctgccttgtcaggactatacacaactgtaatgaaagcctctggtgcaagccgtagggtttttcaacttttggaccgtgtttcgtcaatgacaaactctggggacaaatgtccaataaatgaaaaggatggggaagttgagcttgatgatgtctggtttgcatatccttctcgcccatctcatatgattcttaagggaataactctgaagctagcaccaggttcaaaggttgcacttgttgggccaagtggtggtggtaaaaccacaatagcaaatttgattgagcggttttatgaccctctaaagggaaggatcttgcttaatggagtaccgctggcagaaatttcacatcaatatcttcacagcaaggtaagcattgtcagccaggagcctacgctcttcaactgcaccatcgaagagaatattgcttatggactagagggcacaacgaactttgctgacgttgagagtgcagctgaaatggcgaatgcacacaacttcatatgcggctttcccgaccaatataagactgtcgtcggcgagcgggggatcaggttatccggcgggcagaagcagaggatcgccattgcgagagctttgcttatgaacccacgagtgcttctcctggacgaagctaccagtgccctggatgctgaaagcgaatatcttgtacaggatgcaatggactccttgatgaaagggaggactgtccttgtgatagcccacaggctctcgaccgtcaagagcgccgacaccgtcgccgtcatctccgacggcctaatcgtggagagcggcacgcacgacgaactcctggaccgcgacggcatatacacggccttggtgaagaggcagctgcaggggccgaagtttgaggccaccagcagcatcagcgaggcctccgaaattgaagcggaacccagcagtaatgggcaatagcggccccgattattaggaagaccacagttgatttgaatccacacaagtgtatgtaaccctgatgttgacgtatgccactgcaaatcacgcgaaaccattggatatcacatgatgctacggttgttgtacgagtaatttcccacttggttaatcctacacatatggtcc

SEQ ID NO: 18337 - protein, 648 aa, Zea mays subsp. mays
  peptide (1)..(648): Ceres Seq. ID no. 12450445
  misc_feature (58)..(337): Pfam Name: ABC transporter transmembrane region Pfam Description: ABC transporter transmembrane region
  misc_feature (1)..(621): Homolog of NCBI NO: 9506367 NR Description: ATP-binding cassette, sub-family B, member 10
  misc_feature (31)..(622): Homolog of NCBI NO: 18496814 NR Description: ABC transporter AbcB1 [Dictyostelium discoideum]
  misc_feature (24)..(623): Homolog of NCBI NO: 10177549 NR Description: ABC transporter-like protein [Arabidopsis
  misc_feature (24)..(623): Homolog of NCBI NO: 19335724 NR Description: transporter associated with antigen
  misc_feature (24)..(623): Homolog of NCBI NO: 22327455 NR Description: ABC transporter family protein
  misc_feature (11)..(638): Homolog of NCBI NO: 18496655 NR Description: putative ABC transporter [Triticum monococcum]
  misc_feature (1)..(639): Homolog of NCBI NO: 12278526 NR Description: putative ABC transporter [Hordeum vulgare subsp.
  misc_feature (1)..(648): Homolog of NCBI NO: 18496654 NR Description: putative ABC transporter [Triticum monococcum]
  misc_feature (1)..(648): Homolog of NCBI NO: 12278525 NR Description: putative ABC transporter [Hordeum vulgare subsp.
  misc_feature (1)..(648): Homolog of NCBI NO: 12061244 NR Description: 36I5.4 [Oryza sativa (japonica cultivar-group)]
MGKNMRIKTAPKANRVPLLGDGETSRALSDLEEGSDVQPANVGFCRVIKLAKHDAGKLVLATAALLVASLSNLLVPKYGGKIIDIVSRDVRRPEDKAQALEDVKGTILYIVTIVLVGSVCTALRAWLFNSASERVVARLRKDLFSHLINQEIAFFDVTRTGELLSRLSEDTQIIKNAATTNLSEALRNVTTTAIGLGFMFSTSWKLTLLALVIVPVISVAVRRFGRFLRELSHQTQAAAAVASSIAEESFGAIRTVRSFAQEYHEISRYGEKVEETLKLGLKQAKVVGLFSGGLNAASTMSVVIVVIYGANLTINGYMTTGSLTSFILYSLTVGSSVSALSGLYTTVMKASGASRRVFQLLDRVSSMTNSGDKCPINEKDGEVELDDVWFAYPSRPSHMILKGITLKLAPGSKVALVGPSGGGKTTIANLIERFYDPLKGRILLNGVPLAEISHQYLHSKVSIVSQEPTLFNCTIEENIAYGLEGTTNFADVESAAEMANAHNFICGFPDQYKTVVGERGIRLSGGQKQRIAIARALLMNPRVLLLDEATSALDAESEYLVQDAMDSLMKGRTVLVIAHRLSTVKSADTVAVISDGLIVESGTHDELLDRDGIYTALVKRQLQGPKFEATSSISEASEIEAEPSSNGQ

SEQ ID NO: 18338 - protein, 644 aa, Zea mays subsp. mays
  peptide (1)..(644): Ceres Seq. ID no. 12450446
  misc_feature (54)..(333): Pfam Name: ABC transporter transmembrane region Pfam Description: ABC transporter transmembrane region
  misc_feature (1)..(617): Homolog of NCBI NO: 9506367 NR Description: ATP-binding cassette, sub-family B, member 10
  misc_feature (27)..(618): Homolog of NCBI NO: 18496814 NR Description: ABC transporter AbcB1 [Dictyostelium discoideum]
  misc_feature (20)..(619): Homolog of NCBI NO: 10177549 NR Description: ABC transporter-like protein [Arabidopsis
  misc_feature (20)..(619): Homolog of NCBI NO: 19335724 NR Description: transporter associated with antigen
  misc_feature (20)..(619): Homolog of NCBI NO: 22327455 NR Description: ABC transporter family protein
  misc_feature (7)..(634): Homolog of NCBI NO: 18496655 NR Description: putative ABC transporter [Triticum monococcum]
  misc_feature (1)..(635): Homolog of NCBI NO: 12278526 NR Description: putative ABC transporter [Hordeum vulgare subsp.
  misc_feature (1)..(644): Homolog of NCBI NO: 18496654 NR Description: putative ABC transporter [Triticum monococcum]
  misc_feature (1)..(644): Homolog of NCBI NO: 12278525 NR Description: putative ABC transporter [Hordeum vulgare subsp.
  misc_feature (1)..(644): Homolog of NCBI NO: 12061244 NR Description: 36I5.4 [Oryza sativa (japonica cultivar-group)]
MRIKTAPKANRVPLLGDGETSRALSDLEEGSDVQPANVGFCRVIKLAKHDAGKLVLATAALLVASLSNLLVPKYGGKIIDIVSRDVRRPEDKAQALEDVKGTILYIVTIVLVGSVCTALRAWLFNSASERVVARLRKDLFSHLINQEIAFFDVTRTGELLSRLSEDTQIIKNAATTNLSEALRNVTTTAIGLGFMFSTSWKLTLLALVIVPVISVAVRRFGRFLRELSHQTQAAAAVASSIAEESFGAIRTVRSFAQEYHEISRYGEKVEETLKLGLKQAKVVGLFSGGLNAASTMSVVIVVIYGANLTINGYMTTGSLTSFILYSLTVGSSVSALSGLYTTVMKASGASRRVFQLLDRVSSMTNSGDKCPINEKDGEVELDDVWFAYPSRPSHMILKGITLKLAPGSKVALVGPSGGGKTTIANLIERFYDPLKGRILLNGVPLAEISHQYLHSKVSIVSQEPTLFNCTIEENIAYGLEGTTNFADVESAAEMANAHNFICGFPDQYKTVVGERGIRLSGGQKQRIAIARALLMNPRVLLLDEATSALDAESEYLVQDAMDSLMKGRTVLVIAHRLSTVKSADTVAVISDGLIVESGTHDELLDRDGIYTALVKRQLQGPKFEATSSISEASEIEAEPSSNGQ

SEQ ID NO: 18339 - protein, 450 aa, Zea mays subsp. mays
  peptide (1)..(450): Ceres Seq. ID no. 12450447
  misc_feature (1)..(139): Pfam Name: ABC transporter transmembrane region Pfam Description: ABC transporter transmembrane region
  misc_feature (1)..(423): Homolog of NCBI NO: 9506367 NR Description: ATP-binding cassette, sub-family B, member 10
  misc_feature (1)..(424): Homolog of NCBI NO: 18496814 NR Description: ABC transporter AbcB1 [Dictyostelium discoideum]
  misc_feature (1)..(425): Homolog of NCBI NO: 10177549 NR Description: ABC transporter-like protein [Arabidopsis
  misc_feature (1)..(425): Homolog of NCBI NO: 19335724 NR Description: transporter associated with antigen
  misc_feature (1)..(425): Homolog of NCBI NO: 22327455 NR Description: ABC transporter family protein
  misc_feature (1)..(440): Homolog of NCBI NO: 18496655 NR Description: putative ABC transporter [Triticum monococcum]
  misc_feature (1)..(441): Homolog of NCBI NO: 12278526 NR Description: putative ABC transporter [Hordeum vulgare subsp.
  misc_feature (1)..(450): Homolog of NCBI NO: 18496654 NR Description: putative ABC transporter [Triticum monococcum]
  misc_feature (1)..(450): Homolog of NCBI NO: 12278525 NR Description: putative ABC transporter [Hordeum vulgare subsp.
  misc_feature (1)..(450): Homolog of NCBI NO: 12061244 NR Description: 36I5.4 [Oryza sativa (japonica cultivar-group)]
MFSTSWKLTLLALVIVPVISVAVRRFGRFLRELSHQTQAAAAVASSIAEESFGAIRTVRSFAQEYHEISRYGEKVEETLKLGLKQAKVVGLFSGGLNAASTMSVVIVVIYGANLTINGYMTTGSLTSFILYSLTVGSSVSALSGLYTTVMKASGASRRVFQLLDRVSSMTNSGDKCPINEKDGEVELDDVWFAYPSRPSHMILKGITLKLAPGSKVALVGPSGGGKTTIANLIERFYDPLKGRILLNGVPLAEISHQYLHSKVSIVSQEPTLFNCTIEENIAYGLEGTTNFADVESAAEMANAHNFICGFPDQYKTVVGERGIRLSGGQKQRIAIARALLMNPRVLLLDEATSALDAESEYLVQDAMDSLMKGRTVLVIAHRLSTVKSADTVAVISDGLIVESGTHDELLDRDGIYTALVKRQLQGPKFEATSSISEASEIEAEPSSNGQ

SEQ ID NO: 18340 - DNA, 1713 bp, Zea mays subsp. mays
  misc_feature (1)..(1713): Ceres Seq. ID no. 12375320
  misc_feature: MA Experiment ID: 108534 Result: Down-regulated in Transcription
  misc_feature: MA Experiment 108534 PARAMETER Experiment Name: Zm_4deg_Cold_P Parameter: Age (hr) Value: 8
  misc_feature: MA Experiment 108534 PARAMETER Experiment Name: Zm_4deg_Cold_P Parameter: Organism Value: Zea mays
  misc_feature: MA Experiment 108534 PARAMETER Experiment Name: Zm_4deg_Cold_P Parameter: Plant Line Value: 35A19
  misc_feature: MA Experiment 108534 PARAMETER Experiment Name: Zm_4deg_Cold_P Parameter: Temperature (deg C) Value: 4 vs. 22
  misc_feature: MA Experiment 108534 PARAMETER Experiment Name: Zm_4deg_Cold_P Parameter: Timepoint (hr) Value: 6
  misc_feature: MA Experiment 108534 PARAMETER Experiment Name: Zm_4deg_Cold_P Parameter: Tissue Value: Aerial
  misc_feature: MA Experiment ID: 20000492 Result: Down-regulated in Transcription
  misc_feature: MA Experiment 20000492 PARAMETER Experiment Name: Zm_Hybrid_Seed_Dev_P Parameter: DAP Value: 12
  misc_feature: MA Experiment 20000492 PARAMETER Experiment Name: Zm_Hybrid_Seed_Dev_P Parameter: Organism Value: Zea mays
  misc_feature: MA Experiment 20000492 PARAMETER Experiment Name: Zm_Hybrid_Seed_Dev_P Parameter: Plant Line Value: 35A19
  misc_feature: MA Experiment 20000492 PARAMETER Experiment Name: Zm_Hybrid_Seed_Dev_P Parameter: Tissue Value: Fert Kernel vs. Unfert Floret
atagattttcttattcgccccttctctctccttctattttcagagagtcccctcgcctctgcctgcctgtcccatccccagtccaccaagcagcgcccgtcaccatctctccccatcccctttgccactctcggtcttctccctcctcagggcaggcaggggaagcagaagaaggaagcgagagcacggagcctgatttggtttgctttttgttgcccagactcggagggagttggtgtctctgtgtgtgtggagatggaccccaagttccccccacccccaccgctaaacaaaacggagcccaccaccgcgacgaccaccaccacctcgaccgcgcagcagcagcagcagctggatcctaaggactaccaccagcagcagccggcgcagcaccaggagcaccaccaccacctgcaaatccaaactcaccagccgccgcagcaggacgggggcggcggagggaaggagcagcagcagctgcaggtggtggcgcagcccggggagaggaggcagcaggcgctcgcgcccaagcggagctccaacaaggaccgacacaccaaggtcgacggcaggggccggcggatccggatgcccgcgctctgcgccgcgcggatcttccagctcacgcgggaactcggccacaagtccgacggcgagaccgtccagtggctgctgcagcaggccgagccggccatcgtcgccgccaccggcacgggcaccataccggcgtccgcgctcgcctccgtcgcgccctcgctcccgtcgcccacctccgggctcgccaggccgcaccaccacatgtgggcgccgtccgccggcttctcctcgccctccttcctgaactctgccgccgcgggcacgggcgatgccgccggtatcatgcagcggatggggatccccgcgggcttcgagctgccgggagcctccgccgccggagccaccctcggcgccggcggccacatcggttttgcgcccatgttcgctggacacgccgccgccatgccggggctcgagctcgggctatcgcaggacggccacatcggcgtgctcgccgcgcagtcgatcagccagttctaccaccaggtgggtgctgccgccgccggcggcggccagatgcagcacgcgcacgggcaccatcatcaccatcaccagcagcaggaggacggggaggacgaccgcgaggacggcgagtccgatgacgagtctgggcagtagtagtgtaaccgttcaaccttttgcgttgctgaatcttccctcaagttggaaggagagaaaagtgtatgcgtgcagccacgggatgcttctgctactcttggactgttgttggtcgagttctgatggatttttgtgtccatttttttctcgtgtggtatccaaactcaacggaggcctctcttgctgtgaagacttgcggattcgagatcatcctcagttcttcccacaatctcatggagtggatgatcgccacagccttctctccgacttccaggtgtatactagctgagaaaatgatggattggatcgatcacccttgagtgagtgccttatttgttattgcacagtgtgtagatattcaggtaattttgcagttagagaggtgttccttttattgtagtagtgatcaacgttttaaaacaatcaaggtattctcctccacaggctgtctatgcaacgcaagtatagtacaattctagttcatgaccacgcataccg

SEQ ID NO: 18341 - protein, 404 aa, Zea mays subsp. mays
  peptide (1)..(404): Ceres Seq. ID no. 12375321
  misc_feature (169)..(338): Pfam Name: TCP family transcription factor Pfam Description: TCP family transcription factor
  misc_feature (320)..(404): Homolog of NCBI NO: 34912298 NR Description: P0451D05.12 [Oryza sativa (japonica
  misc_feature (175)..(258): Homolog of NCBI NO: 15242216 NR Description: putative protein
  misc_feature (173)..(263): Homolog of NCBI NO: 15217857 NR Description: auxin-induced basic helix-loop-helix
  misc_feature (176)..(276): Homolog of NCBI NO: 5731257 NR Description: auxin-induced basic helix-loop-helix
  misc_feature (160)..(277): Homolog of NCBI NO: 18409345 NR Description: expressed protein
  misc_feature (150)..(267): Homolog of NCBI NO: 20975251 NR Description: transcription factor PCF3 [Oryza sativa (japonica
  misc_feature (119)..(283): Homolog of NCBI NO: 22331641 NR Description: putative protein
  misc_feature (119)..(283): Homolog of NCBI NO: 11357581 NR Description: hypothetical protein F1P2.170 - Arabidopsis
  misc_feature (169)..(403): Homolog of NCBI NO: 15232059 NR Description: unknown protein; protein id: At3g27010.1
  misc_feature (208)..(239): Homolog of NCBI NO: 34912298 NR Description: P0451D05.12 [Oryza sativa (japonica
IDFLIRPFSLLLFSESPLASACLSHPQSTKQRPSPSLPIPFATLGLLPPQGRQGKQKKEARARSLIWFAFCCPDSEGVGVSVCVEMDPKFPPPPPLNKTEPTTATTTTTSTAQQQQQLDPKDYHQQQPAQHQEHHHHLQIQTHQPPQQDGGGGGKEQQQLQVVAQPGERRQQALAPKRSSNKDRHTKVDGRGRRIRMPALCAARIFQLTRELGHKSDGETVQWLLQQAEPAIVAATGTGTIPASALASVAPSLPSPTSGLARPHHHMWAPSAGFSSPSFLNSAAAGTGDAAGIMQRMGIPAGFELPGASAAGATLGAGGHIGFAPMFAGHAAAMPGLELGLSQDGHIGVLAAQSISQFYHQVGAAAAGGGQMQHAHGHHHHHHQQQEDGEDDREDGESDDESGQ

SEQ ID NO: 18342 - protein, 319 aa, Zea mays subsp. mays
  peptide (1)..(319): Ceres Seq. ID no. 12375322
  misc_feature (84)..(253): Pfam Name: TCP family transcription factor Pfam Description: TCP family transcription factor
  misc_feature (90)..(173): Homolog of NCBI NO: 15242216 NR Description: putative protein
  misc_feature (88)..(178): Homolog of NCBI NO: 15217857 NR Description: auxin-induced basic helix-loop-helix
  misc_feature (91)..(191): Homolog of NCBI NO: 5731257 NR Description: auxin-induced basic helix-loop-helix
  misc_feature (75)..(192): Homolog of NCBI NO: 18409345 NR Description: expressed protein
  misc_feature (65)..(182): Homolog of NCBI NO: 20975251 NR Description: transcription factor PCF3 [Oryza sativa (japonica
  misc_feature (34)..(198): Homolog of NCBI NO: 22331641 NR Description: putative protein
  misc_feature (34)..(198): Homolog of NCBI NO: 11357581 NR Description: hypothetical protein F1P2.170 - Arabidopsis
  misc_feature (84)..(318): Homolog of NCBI NO: 15232059 NR Description: unknown protein; protein id: At3g27010.1
  misc_feature (123)..(154): Homolog of NCBI NO: 34912298 NR Description: P0451D05.12 [Oryza sativa (japonica
  misc_feature (235)..(319): Homolog of NCBI NO: 34912298 NR Description: P0451D05.12 [Oryza sativa (japonica
MDPKFPPPPPLNKTEPTTATTTTTSTAQQQQQLDPKDYHQQQPAQHQEHHHHLQIQTHQPPQQDGGGGGKEQQQLQVVAQPGERRQQALAPKRSSNKDRHTKVDGRGRRIRMPALCAARIFQLTRELGHKSDGETVQWLLQQAEPAIVAATGTGTIPASALASVAPSLPSPTSGLARPHHHMWAPSAGFSSPSFLNSAAAGTGDAAGIMQRMGIPAGFELPGASAAGATLGAGGHIGFAPMFAGHAAAMPGLELGLSQDGHIGVLAAQSISQFYHQVGAAAAGGGQMQHAHGHHHHHHQQQEDGEDDREDGESDDESGQ

SEQ ID NO: 18343 - protein, 212 aa, Zea mays subsp. mays
  peptide (1)..(212): Ceres Seq. ID no. 12375323
  misc_feature (1)..(120): Homolog of NCBI NO: 188864 NR Description: mucin
  misc_feature (1)..(63): Homolog of NCBI NO: 3044086 NR Description: unknown [Myxococcus xanthus]
  misc_feature (1)..(132): Homolog of NCBI NO: 13592175 NR Description: ppg3 [Leishmania major]
  misc_feature (1)..(132): Homolog of NCBI NO: 13592175 NR Description: ppg3 [Leishmania major]
  misc_feature (1)..(123): Homolog of NCBI NO: 188864 NR Description: mucin
  misc_feature (1)..(132): Homolog of NCBI NO: 13592175 NR Description: ppg3 [Leishmania major]
  misc_feature (1)..(123): Homolog of NCBI NO: 11360318 NR Description: probable mucin DKFZp434C196.1 - human (fragment)
  misc_feature (1)..(131): Homolog of NCBI NO: 11360318 NR Description: probable mucin DKFZp434C196.1 - human (fragment)
  misc_feature (1)..(118): Homolog of NCBI NO: 13592175 NR Description: ppg3 [Leishmania major]
  misc_feature (1)..(132): Homolog of NCBI NO: 13592175 NR Description: ppg3 [Leishmania major]
MPPVSCSGWGSPRASSCREPPPPEPPSAPAATSVLRPCSLDTPPPCRGSSSGYRRTATSACSPRSRSASSTTRWVLPPPAAARCSTRTGTIITITSSRRTGRTTARTASPMTSLGSSSVTVQPFALLNLPSSWKERKVYACSHGMLLLLLDCCWSSSDGFLCPFFSRVVSKLNGGLSCCEDLRIRDHPQFFPQSHGVDDRHSLLSDFQVYTS

SEQ ID NO: 18344 - DNA, 1859 bp, Zea mays subsp. mays; identical to SEQ ID NO: 16776
  misc_feature (1)..(1859): Ceres Seq. ID no. 13492557
  misc_feature: MA Experiment ID: 108529 Result: Up-regulated in Transcription
  misc_feature: MA Experiment 108529 PARAMETER Experiment Name: Zm_Imbibed_Seeds_P Parameter: Age (day) Value: 5 vs. 2
  misc_feature: MA Experiment 108529 PARAMETER Experiment Name: Zm_Imbibed_Seeds_P Parameter: Organism Value: Zea mays
  misc_feature: MA Experiment 108529 PARAMETER Experiment Name: Zm_Imbibed_Seeds_P Parameter: Plant Line Value: 35A19
  misc_feature: MA Experiment 108529 PARAMETER Experiment Name: Zm_Imbibed_Seeds_P Parameter: Tissue Value: Roots vs. Embryo
  misc_feature: MA Experiment ID: 108535 Result: Down-regulated in Transcription
  misc_feature: MA Experiment 108535 PARAMETER Experiment Name: Zm_Meristem_P Parameter: Age (day) Value: 8
  misc_feature: MA Experiment 108535 PARAMETER Experiment Name: Zm_Meristem_P Parameter: Organism Value: Zea mays
  misc_feature: MA Experiment 108535 PARAMETER Experiment Name: Zm_Meristem_P Parameter: Plant Line Value: 35A19
  misc_feature: MA Experiment 108535 PARAMETER Experiment Name: Zm_Meristem_P Parameter: Tissue Value: Root Meristem vs. Above Root Meristem
  misc_feature: MA Experiment ID: 108687 Result: Down-regulated in Transcription
  misc_feature: MA Experiment 108687 PARAMETER Experiment Name: Zm_Embryos-Flowers__P Parameter: Tissue Value: Embryo vs. Aerial+
  misc_feature: MA Experiment ID: 20000535 Result: Down-regulated in Transcription
  misc_feature: MA Experiment 20000535 PARAMETER Experiment Name: Zm_Hybrid_Seed_Dev_P Parameter: DAP Value: 30 vs. 12
  misc_feature: MA Experiment 20000535 PARAMETER Experiment Name: Zm_Hybrid_Seed_Dev_P Parameter: Organism Value: Zea mays
  misc_feature: MA Experiment 20000535 PARAMETER Experiment Name: Zm_Hybrid_Seed_Dev_P Parameter: Plant Line Value: 35A19
  misc_feature: MA Experiment 20000535 PARAMETER Experiment Name: Zm_Hybrid_Seed_Dev_P Parameter: Tissue Value: Embryo vs. Unfert Floret

SEQ ID NO: 18345 - protein, 371 aa, Zea mays subsp. mays; identical to SEQ ID NO: 16777
  peptide (1)..(371): Ceres Seq. ID no. 13492558
  misc_feature (28)..(354): Pfam Name: GDSL-like Lipase/Acylhydrolase Pfam Description: GDSL-like Lipase/Acylhydrolase
  misc_feature (28)..(354): Pfam Name: GDSL-like Lipase/Acylhydrolase Pfam Description: GDSL-like Lipase/Acylhydrolase
  misc_feature (27)..(351): Homolog of NCBI NO: 7486138 NR Description: hypothetical protein F25I24.160 - Arabidopsis
  misc_feature (27)..(351): Homolog of NCBI NO: 7486718 NR Description: hypothetical protein F8M12.9 - Arabidopsis
  misc_feature (27)..(351): Homolog of NCBI NO: 18413404 NR Description: GDSL-motif lipase/hydrolase protein [Arabidopsis
  misc_feature (103)..(352): Homolog of NCBI NO: 15237586 NR Description: GDSL-motif lipase/hydrolase protein [Arabidopsis
  misc_feature (24)..(362): Homolog of NCBI NO: 21553708 NR Description: GDSL-motif lipase/hydrolase-like protein
  misc_feature (27)..(351): Homolog of NCBI NO: 7486138 NR Description: hypothetical protein F25I24.160 - Arabidopsis
  misc_feature (27)..(351): Homolog of NCBI NO: 18413404 NR Description: GDSL-motif lipase/hydrolase protein [Arabidopsis
  misc_feature (24)..(362): Homolog of NCBI NO: 21553708 NR Description: GDSL-motif lipase/hydrolase-like protein
  misc_feature (3)..(369): Homolog of NCBI NO: 34903958 NR Description: OSJNBa0038J17.24 [Oryza sativa (japonica
  misc_feature (7)..(365): Homolog of NCBI NO: 34903956 NR Description: OSJNBa0038J17.23 [Oryza sativa (japonica
  misc_feature (27)..(367): Homolog of NCBI NO: 34903994 NR Description: unnamed protein product [Oryza sativa (japonica
  misc_feature (6)..(367): Homolog of NCBI NO: 34903996 NR Description: unnamed protein product [Oryza sativa (japonica
  misc_feature (24)..(362): Homolog of NCBI NO: 15242538 NR Description: GDSL-motif lipase/hydrolase protein [Arabidopsis
  misc_feature (103)..(352): Homolog of NCBI NO: 15237586 NR Description: GDSL-motif lipase/hydrolase protein [Arabidopsis
  misc_feature (27)..(351): Homolog of NCBI NO: 7486718 NR Description: hypothetical protein F8M12.9 - Arabidopsis
  misc_feature (24)..(362): Homolog of NCBI NO: 15242538 NR Description: GDSL-motif lipase/hydrolase protein [Arabidopsis
  misc_feature (6)..(367): Homolog of NCBI NO: 34903996 NR Description: unnamed protein product [Oryza sativa (japonica
  misc_feature (27)..(367): Homolog of NCBI NO: 34903994 NR Description: unnamed protein product [Oryza sativa (japonica
  misc_feature (7)..(365): Homolog of NCBI NO: 34903956 NR Description: OSJNBa0038J17.23 [Oryza sativa (japonica
  misc_feature (3)..(369): Homolog of NCBI NO: 34903958 NR Description: OSJNBa0038J17.24 [Oryza sativa (japonica

SEQ ID NO: 18346 - protein, 313 aa, Zea mays subsp. mays; identical to SEQ ID NO: 16778
  peptide (1)..(313): Ceres Seq. ID no. 13492559
  misc_feature (1)..(296): Pfam Name: GDSL-like Lipase/Acylhydrolase Pfam Description: GDSL-like Lipase/Acylhydrolase
  misc_feature (1)..(296): Pfam Name: GDSL-like Lipase/Acylhydrolase Pfam Description: GDSL-like Lipase/Acylhydrolase
  misc_feature (1)..(293): Homolog of NCBI NO: 7486138 NR Description: hypothetical protein F25I24.160 - Arabidopsis
  misc_feature (1)..(293): Homolog of NCBI NO: 7486718 NR Description: hypothetical protein F8M12.9 - Arabidopsis
  misc_feature (1)..(293): Homolog of NCBI NO: 18413404 NR Description: GDSL-motif lipase/hydrolase protein [Arabidopsis
  misc_feature (45)..(294): Homolog of NCBI NO: 15237586 NR Description: GDSL-motif lipase/hydrolase protein [Arabidopsis
  misc_feature (1)..(304): Homolog of NCBI NO: 21553708 NR Description: GDSL-motif lipase/hydrolase-like protein
  misc_feature (1)..(293): Homolog of NCBI NO: 7486138 NR Description: hypothetical protein F25I24.160 - Arabidopsis
  misc_feature (1)..(293): Homolog of NCBI NO: 18413404 NR Description: GDSL-motif lipase/hydrolase protein [Arabidopsis
  misc_feature (1)..(304): Homolog of NCBI NO: 21553708 NR Description: GDSL-motif lipase/hydrolase-like protein
  misc_feature (1)..(311): Homolog of NCBI NO: 34903958 NR Description: OSJNBa0038J17.24 [Oryza sativa (japonica
  misc_feature (1)..(307): Homolog of NCBI NO: 34903956 NR Description: OSJNBa0038J17.23 [Oryza sativa (japonica
  misc_feature (1)..(309): Homolog of NCBI NO: 34903994 NR Description: unnamed protein product [Oryza sativa (japonica
  misc_feature (1)..(309): Homolog of NCBI NO: 34903996 NR Description: unnamed protein product [Oryza sativa (japonica
  misc_feature (1)..(304): Homolog of NCBI NO: 15242538 NR Description: GDSL-motif lipase/hydrolase protein [Arabidopsis
  misc_feature (45)..(294): Homolog of NCBI NO: 15237586 NR Description: GDSL-motif lipase/hydrolase protein [Arabidopsis
  misc_feature (1)..(293): Homolog of NCBI NO: 7486718 NR Description: hypothetical protein F8M12.9 - Arabidopsis
  misc_feature (1)..(304): Homolog of NCBI NO: 15242538 NR Description: GDSL-motif lipase/hydrolase protein [Arabidopsis
  misc_feature (1)..(309): Homolog of NCBI NO: 34903996 NR Description: unnamed protein product [Oryza sativa (japonica
  misc_feature (1)..(309): Homolog of NCBI NO: 34903994 NR Description: unnamed protein product [Oryza sativa (japonica
  misc_feature (1)..(307): Homolog of NCBI NO: 34903956 NR Description: OSJNBa0038J17.23 [Oryza sativa (japonica
  misc_feature (1)..(311): Homolog of NCBI NO: 34903958 NR Description: OSJNBa0038J17.24 [Oryza sativa (japonica

SEQ ID NO: 18347 - protein, 230 aa, Zea mays subsp. mays; identical to SEQ ID NO: 16779
  peptide (1)..(230): Ceres Seq. ID no. 13492560
  misc_feature (1)..(213): Pfam Name: GDSL-like Lipase/Acylhydrolase Pfam Description: GDSL-like Lipase/Acylhydrolase
  misc_feature (1)..(213): Pfam Name: GDSL-like Lipase/Acylhydrolase Pfam Description: GDSL-like Lipase/Acylhydrolase
  misc_feature (1)..(210): Homolog of NCBI NO: 7486138 NR Description: hypothetical protein F25I24.160 - Arabidopsis
  misc_feature (1)..(210): Homolog of NCBI NO: 7486718 NR Description: hypothetical protein F8M12.9 - Arabidopsis
  misc_feature (1)..(210): Homolog of NCBI NO: 18413404 NR Description: GDSL-motif lipase/hydrolase protein [Arabidopsis
  misc_feature (1)..(211): Homolog of NCBI NO: 15237586 NR Description: GDSL-motif lipase/hydrolase protein [Arabidopsis
  misc_feature (1)..(221): Homolog of NCBI NO: 21553708 NR Description: GDSL-motif lipase/hydrolase-like protein
  misc_feature (1)..(210): Homolog of NCBI NO: 7486138 NR Description: hypothetical protein F25I24.160 - Arabidopsis
  misc_feature (1)..(210): Homolog of NCBI NO: 18413404 NR Description: GDSL-motif lipase/hydrolase protein [Arabidopsis
  misc_feature (1)..(221): Homolog of NCBI NO: 21553708 NR Description: GDSL-motif lipase/hydrolase-like protein
  misc_feature (1)..(228): Homolog of NCBI NO: 34903958 NR Description: OSJNBa0038J17.24 [Oryza sativa (japonica
  misc_feature (1)..(224): Homolog of NCBI NO: 34903956 NR Description: OSJNBa0038J17.23 [Oryza sativa (japonica
  misc_feature (1)..(226): Homolog of NCBI NO: 34903994 NR Description: unnamed protein product [Oryza sativa (japonica
  misc_feature (1)..(226): Homolog of NCBI NO: 34903996 NR Description: unnamed protein product [Oryza sativa (japonica
  misc_feature (1)..(221): Homolog of NCBI NO: 15242538 NR Description: GDSL-motif lipase/hydrolase protein [Arabidopsis
  misc_feature (1)..(211): Homolog of NCBI NO: 15237586 NR Description: GDSL-motif lipase/hydrolase protein [Arabidopsis
  misc_feature (1)..(210): Homolog of NCBI NO: 7486718 NR Description: hypothetical protein F8M12.9 - Arabidopsis
  misc_feature (1)..(221): Homolog of NCBI NO: 15242538 NR Description: GDSL-motif lipase/hydrolase protein [Arabidopsis
  misc_feature (1)..(226): Homolog of NCBI NO: 34903996 NR Description: unnamed protein product [Oryza sativa (japonica
  misc_feature (1)..(226): Homolog of NCBI NO: 34903994 NR Description: unnamed protein product [Oryza sativa (japonica
  misc_feature (1)..(224): Homolog of NCBI NO: 34903956 NR Description: OSJNBa0038J17.23 [Oryza sativa (japonica
  misc_feature (1)..(228): Homolog of NCBI NO: 34903958 NR Description: OSJNBa0038J17.24 [Oryza sativa (japonica

SEQ ID NO: 18348 - DNA, 2198 bp, Zea mays subsp. mays
  misc_feature (1)..(2198): Ceres Seq. ID no. 12387571
  misc_feature: MA Experiment ID: 108528 Result: Down-regulated in Transcription
  misc_feature: MA Experiment 108528 PARAMETER Experiment Name: Zm_Imbibed_Seeds_P Parameter: Age (day) Value: 5 vs. 2
  misc_feature: MA Experiment 108528 PARAMETER Experiment Name: Zm_Imbibed_Seeds_P Parameter: Organism Value: Zea mays
  misc_feature: MA Experiment 108528 PARAMETER Experiment Name: Zm_Imbibed_Seeds_P Parameter: Plant Line Value: 35A19
  misc_feature: MA Experiment 108528 PARAMETER Experiment Name: Zm_Imbibed_Seeds_P Parameter: Tissue Value: Aerial vs. Embryo
  misc_feature: MA Experiment ID: 108530 Result: Down-regulated in Transcription
  misc_feature: MA Experiment 108530 PARAMETER Experiment Name: Zm_Imbibed_Seeds_P Parameter: Age (day) Value: 6 vs. 2
  misc_feature: MA Experiment 108530 PARAMETER Experiment Name: Zm_Imbibed_Seeds_P Parameter: Organism Value: Zea mays
  misc_feature: MA Experiment 108530 PARAMETER Experiment Name: Zm_Imbibed_Seeds_P Parameter: Plant Line Value: 35A19
  misc_feature: MA Experiment 108530 PARAMETER Experiment Name: Zm_Imbibed_Seeds_P Parameter: Tissue Value: Aerial vs. Embryo
  misc_feature: MA Experiment ID: 108535 Result: Up-regulated in Transcription
  misc_feature: MA Experiment 108535 PARAMETER Experiment Name: Zm_Meristem_P Parameter: Age (day) Value: 8
  misc_feature: MA Experiment 108535 PARAMETER Experiment Name: Zm_Meristem_P Parameter: Organism Value: Zea mays
  misc_feature: MA Experiment 108535 PARAMETER Experiment Name: Zm_Meristem_P Parameter: Plant Line Value: 35A19
  misc_feature: MA Experiment 108535 PARAMETER Experiment Name: Zm_Meristem_P Parameter: Tissue Value: Root Meristem vs. Above Root Meristem
  misc_feature: MA Experiment ID: 108544 Result: Down-regulated in Transcription
  misc_feature: MA Experiment ID: 108556 Result: Down-regulated in Transcription
  misc_feature: MA Experiment 108556 PARAMETER Experiment Name: Zm_Drought_P Parameter: Age (day) Value: 9
  misc_feature: MA Experiment 108556 PARAMETER Experiment Name: Zm_Drought_P Parameter: Organism Value: Zea mays
  misc_feature: MA Experiment 108556 PARAMETER Experiment Name: Zm_Drought_P Parameter: Plant Line Value: 35A19
  misc_feature: MA Experiment 108556 PARAMETER Experiment Name: Zm_Drought_P Parameter: Timepoint (hr) Value: 24
  misc_feature: MA Experiment 108556 PARAMETER Experiment Name: Zm_Drought_P Parameter: Tissue Value: Aerial
  misc_feature: MA Experiment 108556 PARAMETER Experiment Name: Zm_Drought_P Parameter: Treatment Value: Drought vs. No Drought
  misc_feature: MA Experiment ID: 20000108 Result: Up-regulated in Transcription
  misc_feature: MA Experiment 20000108 PARAMETER Experiment Name: Zm_Root-Tips_P Parameter: Age (day) Value: 12
  misc_feature: MA Experiment 20000108 PARAMETER Experiment Name: Zm_Root-Tips_P Parameter: Organism Value: Zea mays
  misc_feature: MA Experiment 20000108 PARAMETER Experiment Name: Zm_Root-Tips_P Parameter: Tissue Value: Root tips vs. Root mid region    35
  misc_feature: MA Experiment 20000108 PARAMETER Experiment Name: Zm_Root-Tips_P Parameter: Tissue Value: Root tips vs. Root mid region   Sequence Listing-Misc Features (4)
  misc_feature: MA Experiment ID: 20000487 Result: Up-regulated in Transcription
  misc_feature: MA Experiment 20000487 PARAMETER Experiment Name: Zm_50mM_NH4NO3_L_to_H_P Parameter: Organism Value: Zea mays
  misc_feature: MA Experiment 20000487 PARAMETER Experiment Name: Zm_50mM_NH4NO3_L_to_H_P Parameter: Timepoint (hr) Value: 4
  misc_feature: MA Experiment 20000487 PARAMETER Experiment Name: Zm_50mM_NH4NO3_L_to_H_P Parameter: Tissue Value: Leaves
  misc_feature: MA Experiment 20000487 PARAMETER Experiment Name: Zm_50mM_NH4NO3_L_to_H_P Parameter: Treatment Value: 50mM NH4NO3 vs. 100mM Mannitol
  misc_feature: MA Experiment ID: 20000488 Result: Up-regulated in Transcription
  misc_feature: MA Experiment 20000488 PARAMETER Experiment Name: Zm_50mM_NH4NO3_L_to_H_P Parameter: Organism Value: Zea mays
  misc_feature: MA Experiment 20000488 PARAMETER Experiment Name: Zm_50mM_NH4NO3_L_to_H_P Parameter: Timepoint (hr) Value: 8
  misc_feature: MA Experiment 20000488 PARAMETER Experiment Name: Zm_50mM_NH4NO3_L_to_H_P Parameter: Tissue Value: Leaves
  misc_feature: MA Experiment 20000488 PARAMETER Experiment Name: Zm_50mM_NH4NO3_L_to_H_P Parameter: Treatment Value: 50mM NH4NO3 vs. 100mM Mannitol
  misc_feature: MA Experiment ID: 20000492 Result: Up-regulated in Transcription
  misc_feature: MA Experiment 20000492 PARAMETER Experiment Name: Zm_Hybrid_Seed_Dev_P Parameter: DAP Value: 12
  misc_feature: MA Experiment 20000492 PARAMETER Experiment Name: Zm_Hybrid_Seed_Dev_P Parameter: Organism Value: Zea mays
  misc_feature: MA Experiment 20000492 PARAMETER Experiment Name: Zm_Hybrid_Seed_Dev_P Parameter: Plant Line Value: 35A19
  misc_feature: MA Experiment 20000492 PARAMETER Experiment Name: Zm_Hybrid_Seed_Dev_P Parameter: Tissue Value: Fert Kernel vs. Unfert Floret
  misc_feature: MA Experiment ID: 20000626 Result: Up-regulated in Transcription
  misc_feature: MA Experiment 20000626 PARAMETER Experiment Name: Zm_Herbicide-Treatments_P Parameter: Timepoint (hr) Value: 12
  misc_feature: MA Experiment 20000626 PARAMETER Experiment Name: Zm_Herbicide-Treatments_P Parameter: Tissue Value: Aerial
  misc_feature: MA Experiment 20000626 PARAMETER Experiment Name: Zm_Herbicide-Treatments_P Parameter: Treatment Value: Roundup vs. No Treatment
  misc_feature: MA Experiment ID: 20001612 Result: Up-regulated in Transcription
  misc_feature: MA Experiment 20001612 PARAMETER Experiment Name: Zm_50ppm_KNO3_L-to-H_P Parameter: Age (day) Value: 19
  misc_feature: MA Experiment 20001612 PARAMETER Experiment Name: Zm_50ppm_KNO3_L-to-H_P Parameter: Organism Value: Zea mays
  misc_feature: MA Experiment 20001612 PARAMETER Experiment Name: Zm_50ppm_KNO3_L-to-H_P Parameter: Plant Line Value: 35A19
  misc_feature: MA Experiment 20001612 PARAMETER Experiment Name: Zm_50ppm_KNO3_L-to-H_P Parameter: Timepoint (hr) Value: 8
  misc_feature: MA Experiment 20001612 PARAMETER Experiment Name: Zm_50ppm_KNO3_L-to-H_P Parameter: Tissue Value: Roots
  misc_feature: MA Experiment 20001612 PARAMETER Experiment Name: Zm_50ppm_KNO3_L-to-H_P Parameter: Treatment Value: 50ppm KNO3 vs. 50ppm KCl
gcacgagaccattacctagaacatcctaatcgaaaagtcctaaaaccctagcgaaggcgagccttccacttccctcagcctgccgccgccaccgccgccgccgccgccatgtgcccagcagcggcgaccacgagctccgccaagccgtcgaagaagcggaaacagcccgtcatagcgccgccggagtcggactctgaggaggaatctgtctacgacactgcctccgacgatgacgaggaggaagaggagacgcaggagttagagagtgaggatgtagacgaggaggtggaggaggggagcgaggacggcgaggaaaatgaaattggtgacgatagcgaggtggaagaagaggaggtgaaggagaaaaaagaaaaggaggagacggtgaaggagaaaaaggaaaagaaggacatgaagcaagagggaaagaaggcgaagaagcaagaggaaaagaaggcgaagaaggacaagaaggaagaggaaaaaaaggtgatggaggacaagaaagaagaggaaaagaaggcgaagaagaagagcgaggggagtggaatcctgtctaacaagctcttctcggagctccccctctctgagctcactgccaaggccatcagagagatgaactacacccacctcacccagattcaagctagatcaataccacatctgttggaggggaatgatgtgatgggcgcagccaagactggctctgggaagactcttgcattccttataccagcgattgagatgctatatcacacacacttctcaccgaggaatgggactggagctattgtggtttgcccgacacgggaacttgctatccagacacacaatgttgccaaggagttaatgaaatatcactcacaaactctcggatatgtcattggtggtaataatcgaagaagtgaggctgatcagcttgcaaaggggatcaatttattagttgctaccccaggcaggcttttggaccatctacaaaataccaagagtttcatatacagaaggctaaagtgccttgtcattgatgaagccgatcgcatacttgagcaaaactttgaggaagacatgaaacaaatatttaaacgccttccccagaataggcagactgttcttttttctgctacacagactccagaggttgaaaaatttgctaaactgtcatttgagaaaaatgaagaaagtaaaaaaaaacctgtttatgttggagttgatgatgataagtcaaaggctactgttgaaggcctgcagcagggttattgtgtcatttctagcgataaaaggttcttggttctgtatgctttcctaagaaagaagcggaataagaagataatggtgttcttctcatcatgtaattcagtaaagttccacgctgaacttctgaatttccttgggatagagtgttctgatatccatggaaaacagaagcaacagaagcgaactactacattctttagcttttgcaaggcagaaaagggcatcttattgtgcactaatgtggctgcccgtggacttgatattcctgacgtggattatatcttgcaatatgaccctccagatgaaccaaaggattacattcacagagttggtcgtaccgcacgaggtgagaaaggcaaaggaagtgcattgctgttcttactaccagaagaactgaagtttctaatttacctgaaggcggccaaggttaccctgacggaatatgagttcaatcagaagaatgtgccaaatttgcaatcgcagcttgagaatattgttggtgagaattactttctgaaccagtctgccaaagaagcctacagatcctacgttttggcatatgactctcactctatgaaagacatttttaatgtccatcaacttgatctgcagaaagtagccgcgtcattcggtttcaagaatcccccgaaagtgaacctggacctggacagcagtgcggcgaagcatcggaagaagaggagagtagacggtgggaagaggcatggcatcagcgcttcgaacccgtacgggaggaaggacaaaggcggtggcggcgataaaagacagttggcgagattctagaaaggaggaagagcaggagcgtttcactattgttgtgttcgtaccagggctttgattgatgatgttacctggcttgggaaaaatcttgacaggccactaaggctggctataaattttgggttgtcttgatatatttggtgtgt

SEQ ID NO: 18349 - protein, 648 aa, Zea mays subsp. mays
  peptide (1)..(648): Ceres Seq. ID no. 12387572
  misc_feature (166)..(382): Pfam Name: DEAD/DEAH box helicase Pfam Description: DEAD/DEAH box helicase
  misc_feature (62)..(636): Homolog of NCBI NO: 40745958 NR Description: hypothetical protein AN1949.2 [Aspergillus
  misc_feature (81)..(620): Homolog of NCBI NO: 12654791 NR Description: DEAD/H (Asp-Glu-Ala-Asp/His) box polypeptide 18
  misc_feature (81)..(620): Homolog of NCBI NO: 7446077 NR Description: DEAD box protein MrDb, Myc-regulated - human
  misc_feature (81)..(625): Homolog of NCBI NO: 19115400 NR Description: probable ATP-dependent RNA helicase
  misc_feature (8)..(633): Homolog of NCBI NO: 15239187 NR Description: DEAD/DEAH box RNA helicase protein, putative
  misc_feature (74)..(633): Homolog of NCBI NO: 15229677 NR Description: DEAD/DEAH box RNA helicase protein, putative
  misc_feature (66)..(126): Homolog of NCBI NO: 29150366 NR Description: putative RNA helicase [Oryza sativa (japonica
  misc_feature (20)..(106): Homolog of NCBI NO: 29150366 NR Description: putative RNA helicase [Oryza sativa (japonica
  misc_feature (1)..(89): Homolog of NCBI NO: 29150366 NR Description: putative RNA helicase [Oryza sativa (japonica
  misc_feature (75)..(648): Homolog of NCBI NO: 29150366 NR Description: putative RNA helicase [Oryza sativa (japonica
MCPAAATTSSAKPSKKRKQPVIAPPESDSEEESVYDTASDDDEEEEETQELESEDVDEEVEEGSEDGEENEIGDDSEVEEEEVKEKKEKEETVKEKKEKKDMKQEGKKAKKQEEKKAKKDKKEEEKKVMEDKKEEEKKAKKKSEGSGILSNKLFSELPLSELTAKAIREMNYTHLTQIQARSIPHLLEGNDVMGAAKTGSGKTLAFLIPAIEMLYHTHFSPRNGTGAIVVCPTRELAIQTHNVAKELMKYHSQTLGYVIGGNNRRSEADQLAKGINLLVATPGRLLDHLQNTKSFIYRRLKCLVIDEADRILEQNFEEDMKQIFKRLPQNRQTVLFSATQTPEVEKFAKLSFEKNEESKKKPVYVGVDDDKSKATVEGLQQGYCVISSDKRFLVLYAFLRKKRNKKIMVFFSSCNSVKFHAELLNFLGIECSDIHGKQKQQKRTTTFFSFCKAEKGILLCTNVAARGLDIPDVDYILQYDPPDEPKDYIHRVGRTARGEKGKGSALLFLLPEELKFLIYLKAAKVTLTEYEFNQKNVPNLQSQLENIVGENYFLNQSAKEAYRSYVLAYDSHSMKDIFNVHQLDLQKVAASFGFKNPPKVNLDLDSSAAKHRKKRRVDGGKRHGISASNPYGRKDKGGGGDKRQLARF

SEQ ID NO: 18350 - protein, 547 aa, Zea mays subsp. mays
  peptide (1)..(547): Ceres Seq. ID no. 12387573
  misc_feature (65)..(281): Pfam Name: DEAD/DEAH box helicase Pfam Description: DEAD/DEAH box helicase
  misc_feature (1)..(519): Homolog of NCBI NO: 12654791 NR Description: DEAD/H (Asp-Glu-Ala-Asp/His) box polypeptide 18
  misc_feature (1)..(519): Homolog of NCBI NO: 7446077 NR Description: DEAD box protein MrDb, Myc-regulated - human
  misc_feature (1)..(524): Homolog of NCBI NO: 19115400 NR Description: probable ATP-dependent RNA helicase
  misc_feature (1)..(532): Homolog of NCBI NO: 15239187 NR Description: DEAD/DEAH box RNA helicase protein, putative
  misc_feature (1)..(535): Homolog of NCBI NO: 40745958 NR Description: hypothetical protein AN1949.2 [Aspergillus
  misc_feature (1)..(518): Homolog of NCBI NO: 39589822 NR Description: Hypothetical protein CBG12465 [Caenorhabditis
  misc_feature (1)..(519): Homolog of NCBI NO: 26344732 NR Description: unnamed protein product [Mus musculus]
  misc_feature (1)..(532): Homolog of NCBI NO: 15229677 NR Description: DEAD/DEAH box RNA helicase protein, putative
  misc_feature (1)..(25): Homolog of NCBI NO: 29150366 NR Description: putative RNA helicase [Oryza sativa (japonica
  misc_feature (1)..(547): Homolog of NCBI NO: 29150366 NR Description: putative RNA helicase [Oryza sativa (japonica
MKQEGKKAKKQEEKKAKKDKKEEEKKVMEDKKEEEKKAKKKSEGSGILSNKLFSELPLSELTAKAIREMNYTHLTQIQARSIPHLLEGNDVMGAAKTGSGKTLAFLIPAIEMLYHTHFSPRNGTGAIVVCPTRELAIQTHNVAKELMKYHSQTLGYVIGGNNRRSEADQLAKGINLLVATPGRLLDHLQNTKSFIYRRLKCLVIDEADRILEQNFEEDMKQIFKRLPQNRQTVLFSATQTPEVEKFAKLSFEKNEESKKKPVYVGVDDDKSKATVEGLQQGYCVISSDKRFLVLYAFLRKKRNKKIMVFFSSCNSVKFHAELLNFLGIECSDIHGKQKQQKRTTTFFSFCKAEKGILLCTNVAARGLDIPDVDYILQYDPPDEPKDYIHRVGRTARGEKGKGSALLFLLPEELKFLIYLKAAKVTLTEYEFNQKNVPNLQSQLENIVGENYFLNQSAKEAYRSYVLAYDSHSMKDIFNVHQLDLQKVAASFGFKNPPKVNLDLDSSAAKHRKKRRVDGGKRHGISASNPYGRKDKGGGGDKRQLARF

SEQ ID NO: 18351 - protein, 520 aa, Zea mays subsp. mays
  peptide (1)..(520): Ceres Seq. ID no. 12387574
  misc_feature (38)..(254): Pfam Name: DEAD/DEAH box helicase Pfam Description: DEAD/DEAH box helicase
  misc_feature (1)..(438): Homolog of NCBI NO: 23483000 NR Description: probable ATP-dependent RNA helicase has1
  misc_feature (1)..(491): Homolog of NCBI NO: 39589822 NR Description: Hypothetical protein CBG12465 [Caenorhabditis
  misc_feature (1)..(492): Homolog of NCBI NO: 26344732 NR Description: unnamed protein product [Mus musculus]
  misc_feature (1)..(508): Homolog of NCBI NO: 40745958 NR Description: hypothetical protein AN1949.2 [Aspergillus
  misc_feature (1)..(492): Homolog of NCBI NO: 12654791 NR Description: DEAD/H (Asp-Glu-Ala-Asp/His) box polypeptide 18
  misc_feature (1)..(492): Homolog of NCBI NO: 7446077 NR Description: DEAD box protein MrDb, Myc-regulated - human
  misc_feature (1)..(497): Homolog of NCBI NO: 19115400 NR Description: probable ATP-dependent RNA helicase
  misc_feature (1)..(505): Homolog of NCBI NO: 15239187 NR Description: DEAD/DEAH box RNA helicase protein, putative
  misc_feature (1)..(505): Homolog of NCBI NO: 15229677 NR Description: DEAD/DEAH box RNA helicase protein, putative
  misc_feature (1)..(520): Homolog of NCBI NO: 29150366 NR Description: putative RNA helicase [Oryza sativa (japonica
MEDKKEEEKKAKKKSEGSGILSNKLFSELPLSELTAKAIREMNYTHLTQIQARSIPHLLEGNDVMGAAKTGSGKTLAFLIPAIEMLYHTHFSPRNGTGAIVVCPTRELAIQTHNVAKELMKYHSQTLGYVIGGNNRRSEADQLAKGINLLVATPGRLLDHLQNTKSFIYRRLKCLVIDEADRILEQNFEEDMKQIFKRLPQNRQTVLFSATQTPEVEKFAKLSFEKNEESKKKPVYVGVDDDKSKATVEGLQQGYCVISSDKRFLVLYAFLRKKRNKKIMVFFSSCNSVKFHAELLNFLGIECSDIHGKQKQQKRTTTFFSFCKAEKGILLCTNVAARGLDIPDVDYILQYDPPDEPKDYIHRVGRTARGEKGKGSALLFLLPEELKFLIYLKAAKVTLTEYEFNQKNVPNLQSQLENIVGENYFLNQSAKEAYRSYVLAYDSHSMKDIFNVHQLDLQKVAASFGFKNPPKVNLDLDSSAAKHRKKRRVDGGKRHGISASNPYGRKDKGGGGDKRQLARF

SEQ ID NO: 18352 - DNA, 2269 bp, Zea mays subsp. mays
  misc_feature (1)..(2269): Ceres Seq. ID no. 12361170
  misc_feature: MA Experiment ID: 108535 Result: Up-regulated in Transcription
  misc_feature: MA Experiment 108535 PARAMETER Experiment Name: Zm_Meristem_P Parameter: Age (day) Value: 8
  misc_feature: MA Experiment 108535 PARAMETER Experiment Name: Zm_Meristem_P Parameter: Organism Value: Zea mays
  misc_feature: MA Experiment 108535 PARAMETER Experiment Name: Zm_Meristem_P Parameter: Plant Line Value: 35A19
  misc_feature: MA Experiment 108535 PARAMETER Experiment Name: Zm_Meristem_P Parameter: Tissue Value: Root Meristem vs. Above Root Meristem
gcacgagaccattacctagaacatcctaatcgaaaaaccagaccaccgtcgctcgctcgcctgcacaacctctccatccaggccacagctcgagaccaacgaccgacgcctagacgcggctgggcggtcggcctcacctcgttcccccgcctcccttcttcctgctccgcgtctcgatctcgactcccccgccgcgtcgcgcgacccggccagatctcgcccaccctgcgccgcggccatggataacttgatcaccctcgtcaacaagctgcagagggcttgcacggctctcggagaccacggagaggagagcgccctcccgacgctctgggactcgctgccggctatcgccgtcgttggaggacagagctctggtaaatcatctgtgttggagagcgtggttgggaaggatttcctaccgaggggttcaggcattgtaacccggcggccgctggtgctgcagctccacagaattgatggtgacagggaatatgcagagttcattcatcttccgagaaagagatttacagattttgctgctgtgagaaaggagatagctgatgaaactgaccgagaaacaggccgttcaaagcaaatatcaactgtccctatccatttaagcatattttctccccatgttgtgaatcttactcttattgatcttcctgggcttactaaagtagcagttgatggccaaccggagagtattgtacatgacattgaaaacatggttcgctcatatattgaaaagccaaattgtatcattctggctgtgtccccagccaatcaggaccttgctacttctgatgcaatcaagatttcacgggaagttgatcccaaaggtgaaaggacctttggtgtgctcacaaaaattgatctgatggataagggtaccgatgctgttgatatactggaaggaagatcttatcgtctccaaacaccatgggttggtgttgttaatcgatcccaacaagatatcaacaagaatgtggacatgattgctgctaggcgtagagagcgagagtattttgcatctacaccagaatataagcacatggcttctaggatgggatctgaatatttaggaaagatgctttcaaagcatttggaacaagtgatcaaatcaaggattccggggatccaatctcttataacaaagacaattgcagagctggaaactgaacttaatcggcttggaaaacccattgctaatgatgctggggggaagctgtacacgatcatggaaatatgccgtatgtttgatggtatttacaaagagcatctggatggagtgcgccctggcggagagaaagtttaccatgtcttcgacaatcaatttcctgtagctattaaacgattgcagtttgataaacaactctctatggaaaatgtgaggaagcttataacagaggctgatggataccagcctcacttgatagctccagaacaaggatatagacgccttatagaatcttgtcttattagtatcagaggtcctgctgaggcggctgttgacgcggtccatgcaattctcaaggaccttgtccgcaaggctatcaatgaaacacatgaactgaagcagtttcccacccttcgtgtggaagtaggcaatgcagcttttgagtcattggatagaatgagggatgaaagcaagaaaaatacattaaagctagttgacatggaatgcagctacttgacagtagatttcttcaggaagcttcctcaggatgttgagaagggtggaaatccaagccactctatttttgatagatataatgactcttatcttagacgaattggacaaactgttctgtcatatgttaatatggtgtgttcgaccttgaggaactccatcccaaaatctattgtttattgtcaagtgcgagaggccaagcgctcgctgctcgatcacttcttcactgaacctggagcaagagagatgaagcagctttccaaacttcttgacgaagacccagcagtcatggaacgcagaactaaccttgcaaagaggctcgagctgtaccggagtgcccaatccgaaattgatgccgttgcatggtccaaatagtcctgatggccaagatatctgttcttaccccttgtctggcgattctctctcctattctggggcatatatagctgatttttcgtgttgtaggtcaggtcattttatatatcaccggagctgtacggtgtcatgttccttgtgcttgaggatctcggggggcacttgtatctcgaacaagttcgtacatcgcgctttcgttcc

SEQ ID NO: 18353 - protein, 609 aa, Zea mays subsp. mays
  peptide (1)..(609): Ceres Seq. ID no. 12361171
  misc_feature (221)..(507): Pfam Name: Dynamin central region Pfam Description: Dynamin central region
  misc_feature (1)..(151): Homolog of NCBI NO: 34911188 NR Description: putative dynamin-like protein
  misc_feature (128)..(609): Homolog of NCBI NO: 34911188 NR Description: putative dynamin-like protein
  misc_feature (1)..(105): Homolog of NCBI NO: 11357274 NR Description: dynamin-like protein - Arabidopsis thaliana
  misc_feature (97)..(609): Homolog of NCBI NO: 11357274 NR Description: dynamin-like protein - Arabidopsis thaliana
  misc_feature (1)..(609): Homolog of NCBI NO: 30695480 NR Description: dynamin-related protein [Arabidopsis thaliana]
  misc_feature (1)..(609): Homolog of NCBI NO: 20453081 NR Description: AT5g42080/MJC20_19 [Arabidopsis thaliana]
  misc_feature (1)..(609): Homolog of NCBI NO: 30693985 NR Description: dynamin-related protein (pir||S59558)
  misc_feature (1)..(609): Homolog of NCBI NO: 5931765 NR Description: phragmoplastin [Nicotiana tabacum]
  misc_feature (1)..(609): Homolog of NCBI NO: 2129825 NR Description: phragmoplastin 12 - soybean
  misc_feature (1)..(609): Homolog of NCBI NO: 2129826 NR Description: phragmoplastin 5 - soybean
MDNLITLVNKLQRACTALGDHGEESALPTLWDSLPAIAVVGGQSSGKSSVLESVVGKDFLPRGSGIVTRRPLVLQLHRIDGDREYAEFIHLPRKRFTDFAAVRKEIADETDRETGRSKQISTVPIHLSIFSPHVVNLTLIDLPGLTKVAVDGQPESIVHDIENMVRSYIEKPNCIILAVSPANQDLATSDAIKISREVDPKGERTFGVLTKIDLMDKGTDAVDILEGRSYRLQTPWVGVVNRSQQDINKNVDMIAARRREREYFASTPEYKHMASRMGSEYLGKMLSKHLEQVIKSRIPGIQSLITKTIAELETELNRLGKPIANDAGGKLYTIMEICRMFDGIYKEHLDGVRPGGEKVYHVFDNQFPVAIKRLQFDKQLSMENVRKLITEADGYQPHLIAPEQGYRRLIESCLISIRGPAEAAVDAVHAILKDLVRKAINETHELKQFPTLRVEVGNAAFESLDRMRDESKKNTLKLVDMECSYLTVDFFRKLPQDVEKGGNPSHSIFDRYNDSYLRRIGQTVLSYVNMVCSTLRNSIPKSIVYCQVREAKRSLLDHFFTEPGAREMKQLSKLLDEDPAVMERRTNLAKRLELYRSAQSEIDAVAWSK

SEQ ID NO: 18354 - protein, 446 aa, Zea mays subsp. mays
  peptide (1)..(446): Ceres Seq. ID no. 12361172
  misc_feature (58)..(344): Pfam Name: Dynamin central region Pfam Description: Dynamin central region
  misc_feature (1)..(446): Homolog of NCBI NO: 37536976 NR Description: putative phragmoplastin [Oryza sativa (japonica
  misc_feature (1)..(446): Homolog of NCBI NO: 2267213 NR Description: dynamin-like GTP binding protein [Arabidopsis
  misc_feature (1)..(446): Homolog of NCBI NO: 34911188 NR Description: putative dynamin-like protein
  misc_feature (1)..(446): Homolog of NCBI NO: 11357274 NR Description: dynamin-like protein - Arabidopsis thaliana
  misc_feature (1)..(446): Homolog of NCBI NO: 30695480 NR Description: dynamin-related protein [Arabidopsis thaliana]
  misc_feature (1)..(446): Homolog of NCBI NO: 20453081 NR Description: AT5g42080/MJC20_19 [Arabidopsis thaliana]
  misc_feature (1)..(446): Homolog of NCBI NO: 30693985 NR Description: dynamin-related protein (pir||S59558)
  misc_feature (1)..(446): Homolog of NCBI NO: 5931765 NR Description: phragmoplastin [Nicotiana tabacum]
  misc_feature (1)..(446): Homolog of NCBI NO: 2129825 NR Description: phragmoplastin 12 - soybean
  misc_feature (1)..(446): Homolog of NCBI NO: 2129826 NR Description: phragmoplastin 5 - soybean
MVRSYIEKPNCIILAVSPANQDLATSDAIKISREVDPKGERTFGVLTKIDLMDKGTDAVDILEGRSYRLQTPWVGVVNRSQQDINKNVDMIAARRREREYFASTPEYKHMASRMGSEYLGKMLSKHLEQVIKSRIPGIQSLITKTIAELETELNRLGKPIANDAGGKLYTIMEICRMFDGIYKEHLDGVRPGGEKVYHVFDNQFPVAIKRLQFDKQLSMENVRKLITEADGYQPHLIAPEQGYRRLIESCLISIRGPAEAAVDAVHAILKDLVRKAINETHELKQFPTLRVEVGNAAFESLDRMRDESKKNTLKLVDMECSYLTVDFFRKLPQDVEKGGNPSHSIFDRYNDSYLRRIGQTVLSYVNMVCSTLRNSIPKSIVYCQVREAKRSLLDHFFTEPGAREMKQLSKLLDEDPAVMERRTNLAKRLELYRSAQSEIDAVAWSK

SEQ ID NO: 18355 - protein, 395 aa, Zea mays subsp. mays
  peptide (1)..(395): Ceres Seq. ID no. 12361173
  misc_feature (7)..(293): Pfam Name: Dynamin central region Pfam Description: Dynamin central region
  misc_feature (1)..(395): Homolog of NCBI NO: 37536976 NR Description: putative phragmoplastin [Oryza sativa (japonica
  misc_feature (1)..(395): Homolog of NCBI NO: 2267213 NR Description: dynamin-like GTP binding protein [Arabidopsis
  misc_feature (1)..(395): Homolog of NCBI NO: 34911188 NR Description: putative dynamin-like protein
  misc_feature (1)..(395): Homolog of NCBI NO: 11357274 NR Description: dynamin-like protein - Arabidopsis thaliana
  misc_feature (1)..(395): Homolog of NCBI NO: 30695480 NR Description: dynamin-related protein [Arabidopsis thaliana]
  misc_feature (1)..(395): Homolog of NCBI NO: 20453081 NR Description: AT5g42080/MJC20_19 [Arabidopsis thaliana]
  misc_feature (1)..(395): Homolog of NCBI NO: 30693985 NR Description: dynamin-related protein (pir||S59558)
  misc_feature (1)..(395): Homolog of NCBI NO: 5931765 NR Description: phragmoplastin [Nicotiana tabacum]
  misc_feature (1)..(395): Homolog of NCBI NO: 2129825 NR Description: phragmoplastin 12 - soybean
  misc_feature (1)..(395): Homolog of NCBI NO: 2129826 NR Description: phragmoplastin 5 - soybean
MDKGTDAVDILEGRSYRLQTPWVGVVNRSQQDINKNVDMIAARRREREYFASTPEYKHMASRMGSEYLGKMLSKHLEQVIKSRIPGIQSLITKTIAELETELNRLGKPIANDAGGKLYTIMEICRMFDGIYKEHLDGVRPGGEKVYHVFDNQFPVAIKRLQFDKQLSMENVRKLITEADGYQPHLIAPEQGYRRLIESCLISIRGPAEAAVDAVHAILKDLVRKAINETHELKQFPTLRVEVGNAAFESLDRMRDESKKNTLKLVDMECSYLTVDFFRKLPQDVEKGGNPSHSIFDRYNDSYLRRIGQTVLSYVNMVCSTLRNSIPKSIVYCQVREAKRSLLDHFFTEPGAREMKQLSKLLDEDPAVMERRTNLAKRLELYRSAQSEIDAVAWSK

SEQ ID NO: 18356 - DNA, 1966 bp, Zea mays subsp. mays
  misc_feature (1)..(1966): Ceres Seq. ID no. 12391453
  misc_feature: MA Experiment ID: 108527 Result: Up-regulated in Transcription
  misc_feature: MA Experiment 108527 PARAMETER Experiment Name: Zm_5mM_NO_P Parameter: Age (day) Value: 8
  misc_feature: MA Experiment 108527 PARAMETER Experiment Name: Zm_5mM_NO_P Parameter: Organism Value: Zea mays
  misc_feature: MA Experiment 108527 PARAMETER Experiment Name: Zm_5mM_NO_P Parameter: Plant Line Value: 35A19
  misc_feature: MA Experiment 108527 PARAMETER Experiment Name: Zm_5mM_NO_P Parameter: Timepoint (hr) Value: 6
  misc_feature: MA Experiment 108527 PARAMETER Experiment Name: Zm_5mM_NO_P Parameter: Tissue Value: Aerial
  misc_feature: MA Experiment 108527 PARAMETER Experiment Name: Zm_5mM_NO_P Parameter: Treatment Value: 5mM NO vs. No Treatment
  misc_feature: MA Experiment ID: 20000534 Result: Down-regulated in Transcription
  misc_feature: MA Experiment 20000534 PARAMETER Experiment Name: Zm_Hybrid_Pollen_P Parameter: Age (day) Value: 8
  misc_feature: MA Experiment 20000534 PARAMETER Experiment Name: Zm_Hybrid_Pollen_P Parameter: Organism Value: Zea mays
  misc_feature: MA Experiment 20000534 PARAMETER Experiment Name: Zm_Hybrid_Pollen_P Parameter: Plant Line Value: 35A19
  misc_feature: MA Experiment 20000534 PARAMETER Experiment Name: Zm_Hybrid_Pollen_P Parameter: Tissue Value: Pollen vs. Aerial
aacccaaccggatcctctggtggaacttccagggtgccctcgtcggcggcgcgcttctcctcctctacatcgtcgacgccgccgttggttgaaagctcagaggtcatgcctcactcggcgcggcctccggggaccggagccaacttcaaccgcgcgcgcgaccagcgcggcacccgccgcgtctttctgcgtcgcccgccgcctccgcttcggcgtcctcctcatgtcacagccaatggtcatcgaggcgagggaggcagcggcggcgggggagcgcgtcggagcgcgggagaggaggcgggcgggcggtacacgaggcgcggcggcgtggcggaccgtgaggtggcggtgagtgccagcgcggaccctgtgggacggaatgctgcgaccgtcgccactggtggtgaggctccaccgccgcgggaggaggatggcggcggacgaggtggtgttcttgtgagcaagcgcccgtctgctgcgcccgtgctcccaccgcccaagcggagggcggtctccgtcactcggcagttcccacccgcctccaggtggacctcggctgctcctgctccgctcgctggtgcagatgccgacggaggtttgcggacacgatacgaagggcaacgtgagaacagagcttctgatgcattcaagaagccggcagttgctcgtcccctcgcgggcctcaaggatggtgttggtgttggtgtgatgtcgagagcggtgtcccccaaagctgctggcacgagggttctcaaaaagccgtgtgccagggatggagctgctccaatgtcgaacacagatcgtcatgatgctggattggtgaagtgatgaagatgataaattcaaccatagctggactggagaaagggcacctgcctgtgatgtcagctgaaggttcaggaggtgtttatttcatgcgagatgcaacaggccagaagaatgttgctgtgtttaagcctattgatgaggaacccatggccaaaaacaacccaaggggcgttcctgtgtccacagacggcgaggggatgaagaggggaacaattgtaggggaaggtgcattcagggaggttgcagcttatattctcgaccatccagttagtgatagtaaatatggtcacagtgttgggttttctggtgtgcctcccaccacattggtccgaaccttacatagggggaagagcttcaagattggttcactgcagatgttcatggagaacaatggaagcactgaagatatgggtcctcgatcttttcctgtcaaggaggttcacaaaatagcagtactagatattaggttagctaatgctgatcgtcatgctgggaatattctagtgtgcaaggagggagaaggtggcaactacaagctgattccaattgatcatggttattgcttgccagagaagtttgaagatgttacatttgagtggctctactggccccaagcccgtgagccattcagtgatgaaaccattgaatacatcaaatcacttgatgctgaagaagacatcaagcttctcaagttccatgggtgggagctgcccccacgatgcgctcgtgttctgcgcatcagcaccatgcttttgaagaaaggtgcagctcgtggcttcacaccatatgacatagggcgcattctatgcagggaaactgtgaatagtgagtctgagattgaggacatcattcaggaagcagaggatgctgttctcccagggtccagtgaaaacatgttcttagaaactgtatctgaaatcatggaccgtcacctcgacaaggagtgagtttagaaattcagaataactgatctagttgttccagttccagctgtatccggtttgttgtttctattgttgacaagcactgatcaacagactaataatttgatttgtttgtacctctcaaatgtttctttcggttgtaatgctcgagtactttgcttagcacactttgtgaataatatatttgttcagtt

SEQ ID NO: 18357 - protein, 315 aa, Zea mays subsp. mays
  peptide (1)..(315): Ceres Seq. ID no. 12391454
  misc_feature (23)..(272): Pfam Name: Phosphatidylinositol 3- and 4-kinase Pfam Description: Phosphatidylinositol 3- and 4-kinase
  misc_feature (1)..(288): Homolog of NCBI NO: 25363319 NR Description: F21F23.8 protein - Arabidopsis thaliana
  misc_feature (1)..(288): Homolog of NCBI NO: 18394020 NR Description: ubiquitin, putative
  misc_feature (1)..(291): Homolog of NCBI NO: 25363315 NR Description: hypothetical protein At2g03890 [imported] -
  misc_feature (1)..(291): Homolog of NCBI NO: 18395629 NR Description: expressed protein
  misc_feature (7)..(298): Homolog of NCBI NO: 15228965 NR Description: putative protein; protein id: At3g56600.1
  misc_feature (30)..(314): Homolog of NCBI NO: 15217655 NR Description: unknown protein; protein id: At1g64460.1
  misc_feature (24)..(314): Homolog of NCBI NO: 6633833 NR Description: F1N19.4 [Arabidopsis thaliana]
  misc_feature (2)..(314): Homolog of NCBI NO: 15237921 NR Description: ubiquitin; protein id: At5g24240.1 [Arabidopsis
  misc_feature (1)..(313): Homolog of NCBI NO: 18407090 NR Description: expressed protein
  misc_feature (1)..(314): Homolog of NCBI NO: 34904388 NR Description: unnamed protein product [Oryza sativa (japonica
MKMINSTIAGLEKGHLPVMSAEGSGGVYFMRDATGQKNVAVFKPIDEEPMAKNNPRGVPVSTDGEGMKRGTIVGEGAFREVAAYILDHPVSDSKYGHSVGFSGVPPTTLVRTLHRGKSFKIGSLQMFMENNGSTEDMGPRSFPVKEVHKIAVLDIRLANADRHAGNILVCKEGEGGNYKLIPIDHGYCLPEKFEDVTFEWLYWPQAREPFSDETIEYIKSLDAEEDIKLLKFHGWELPPRCARVLRISTMLLKKGAARGFTPYDIGRILCRETVNSESEIEDIIQEAEDAVLPGSSENMFLETVSEIMDRHLDKE

SEQ ID NO: 18358 - protein, 313 aa, Zea mays subsp. mays
  peptide (1)..(313): Ceres Seq. ID no. 12391455
  misc_feature (21)..(270): Pfam Name: Phosphatidylinositol 3- and 4-kinase Pfam Description: Phosphatidylinositol 3- and 4-kinase
  misc_feature (1)..(286): Homolog of NCBI NO: 25363319 NR Description: F21F23.8 protein - Arabidopsis thaliana
  misc_feature (1)..(286): Homolog of NCBI NO: 18394020 NR Description: ubiquitin, putative
  misc_feature (1)..(289): Homolog of NCBI NO: 25363315 NR Description: hypothetical protein At2g03890 [imported] -
  misc_feature (1)..(289): Homolog of NCBI NO: 18395629 NR Description: expressed protein
  misc_feature (5)..(296): Homolog of NCBI NO: 15228965 NR Description: putative protein; protein id: At3g56600.1
  misc_feature (28)..(312): Homolog of NCBI NO: 15217655 NR Description: unknown protein; protein id: At1g64460.1
  misc_feature (22)..(312): Homolog of NCBI NO: 6633833 NR Description: F1N19.4 [Arabidopsis thaliana]
  misc_feature (1)..(312): Homolog of NCBI NO: 15237921 NR Description: ubiquitin; protein id: At5g24240.1 [Arabidopsis
  misc_feature (1)..(311): Homolog of NCBI NO: 18407090 NR Description: expressed protein
  misc_feature (1)..(312): Homolog of NCBI NO: 34904388 NR Description: unnamed protein product [Oryza sativa (japonica
MINSTIAGLEKGHLPVMSAEGSGGVYFMRDATGQKNVAVFKPIDEEPMAKNNPRGVPVSTDGEGMKRGTIVGEGAFREVAAYILDHPVSDSKYGHSVGFSGVPPTTLVRTLHRGKSFKIGSLQMFMENNGSTEDMGPRSFPVKEVHKIAVLDIRLANADRHAGNILVCKEGEGGNYKLIPIDHGYCLPEKFEDVTFEWLYWPQAREPFSDETIEYIKSLDAEEDIKLLKFHGWELPPRCARVLRISTMLLKKGAARGFTPYDIGRILCRETVNSESEIEDIIQEAEDAVLPGSSENMFLETVSEIMDRHLDKE

SEQ ID NO: 18359 - protein, 297 aa, Zea mays subsp. mays
  peptide (1)..(297): Ceres Seq. ID no. 12391456
  misc_feature (5)..(254): Pfam Name: Phosphatidylinositol 3- and 4-kinase Pfam Description: Phosphatidylinositol 3- and 4-kinase
  misc_feature (1)..(270): Homolog of NCBI NO: 25363319 NR Description: F21F23.8 protein - Arabidopsis thaliana
  misc_feature (1)..(270): Homolog of NCBI NO: 18394020 NR Description: ubiquitin, putative
  misc_feature (1)..(273): Homolog of NCBI NO: 25363315 NR Description: hypothetical protein At2g03890 [imported] -
  misc_feature (1)..(273): Homolog of NCBI NO: 18395629 NR Description: expressed protein
  misc_feature (1)..(280): Homolog of NCBI NO: 15228965 NR Description: putative protein; protein id: At3g56600.1
  misc_feature (12)..(296): Homolog of NCBI NO: 15217655 NR Description: unknown protein; protein id: At1g64460.1
  misc_feature (6)..(296): Homolog of NCBI NO: 6633833 NR Description: F1N19.4 [Arabidopsis thaliana]
  misc_feature (1)..(296): Homolog of NCBI NO: 15237921 NR Description: ubiquitin; protein id: At5g24240.1 [Arabidopsis
  misc_feature (1)..(295): Homolog of NCBI NO: 18407090 NR Description: expressed protein
  misc_feature (1)..(296): Homolog of NCBI NO: 34904388 NR Description: unnamed protein product [Oryza sativa (japonica
MSAEGSGGVYFMRDATGQKNVAVFKPIDEEPMAKNNPRGVPVSTDGEGMKRGTIVGEGAFREVAAYILDHPVSDSKYGHSVGFSGVPPTTLVRTLHRGKSFKIGSLQMFMENNGSTEDMGPRSFPVKEVHKIAVLDIRLANADRHAGNILVCKEGEGGNYKLIPIDHGYCLPEKFEDVTFEWLYWPQAREPFSDETIEYIKSLDAEEDIKLLKFHGWELPPRCARVLRISTMLLKKGAARGFTPYDIGRILCRETVNSESEIEDIIQEAEDAVLPGSSENMFLETVSEIMDRHLDKE

SEQ ID NO: 18360 - DNA, 938 bp, Zea mays subsp. mays
  misc_feature (1)..(938): Ceres Seq. ID no. 14305297
  misc_feature: MA Experiment ID: 108523 Result: Down-regulated in Transcription
  misc_feature: MA Experiment 108523 PARAMETER Experiment Name: Zm_42deg_Heat_P Parameter: Age (day) Value: 8
  misc_feature: MA Experiment 108523 PARAMETER Experiment Name: Zm_42deg_Heat_P Parameter: Organism Value: Zea mays
  misc_feature: MA Experiment 108523 PARAMETER Experiment Name: Zm_42deg_Heat_P Parameter: Plant Line Value: 35A19
  misc_feature: MA Experiment 108523 PARAMETER Experiment Name: Zm_42deg_Heat_P Parameter: Temperature (deg C) Value: 42 vs. 22
  misc_feature: MA Experiment 108523 PARAMETER Experiment Name: Zm_42deg_Heat_P Parameter: Timepoint (hr) Value: 6
  misc_feature: MA Experiment 108523 PARAMETER Experiment Name: Zm_42deg_Heat_P Parameter: Tissue Value: Aerial
  misc_feature: MA Experiment ID: 108527 Result: Down-regulated in Transcription
  misc_feature: MA Experiment 108527 PARAMETER Experiment Name: Zm_5mM_NO_P Parameter: Age (day) Value: 8
  misc_feature: MA Experiment 108527 PARAMETER Experiment Name: Zm_5mM_NO_P Parameter: Organism Value: Zea mays
  misc_feature: MA Experiment 108527 PARAMETER Experiment Name: Zm_5mM_NO_P Parameter: Plant Line Value: 35A19
  misc_feature: MA Experiment 108527 PARAMETER Experiment Name: Zm_5mM_NO_P Parameter: Timepoint (hr) Value: 6
  misc_feature: MA Experiment 108527 PARAMETER Experiment Name: Zm_5mM_NO_P Parameter: Tissue Value: Aerial
  misc_feature: MA Experiment 108527 PARAMETER Experiment Name: Zm_5mM_NO_P Parameter: Treatment Value: 5mM NO vs. No Treatment
  misc_feature: MA Experiment ID: 108529 Result: Up-regulated in Transcription
  misc_feature: MA Experiment 108529 PARAMETER Experiment Name: Zm_Imbibed_Seeds_P Parameter: Age (day) Value: 5 vs. 2
  misc_feature: MA Experiment 108529 PARAMETER Experiment Name: Zm_Imbibed_Seeds_P Parameter: Organism Value: Zea mays
  misc_feature: MA Experiment 108529 PARAMETER Experiment Name: Zm_Imbibed_Seeds_P Parameter: Plant Line Value: 35A19
  misc_feature: MA Experiment 108529 PARAMETER Experiment Name: Zm_Imbibed_Seeds_P Parameter: Tissue Value: Roots vs. Embryo
  misc_feature: MA Experiment ID: 108536 Result: Up-regulated in Transcription
  misc_feature: MA Experiment 108536 PARAMETER Experiment Name: Zm_Meristem_P Parameter: Age (day) Value: 8
  misc_feature: MA Experiment 108536 PARAMETER Experiment Name: Zm_Meristem_P Parameter: Organism Value: Zea mays
  misc_feature: MA Experiment 108536 PARAMETER Experiment Name: Zm_Meristem_P Parameter: Plant Line Value: 35A19
  misc_feature: MA Experiment 108536 PARAMETER Experiment Name: Zm_Meristem_P Parameter: Tissue Value: Shoot Meristem vs. Above Shoot Meristem
  misc_feature: MA Experiment ID: 20000492 Result: Down-regulated in Transcription
  misc_feature: MA Experiment 20000492 PARAMETER Experiment Name: Zm_Hybrid_Seed_Dev_P Parameter: DAP Value: 12
  misc_feature: MA Experiment 20000492 PARAMETER Experiment Name: Zm_Hybrid_Seed_Dev_P Parameter: Organism Value: Zea mays
  misc_feature: MA Experiment 20000492 PARAMETER Experiment Name: Zm_Hybrid_Seed_Dev_P Parameter: Plant Line Value: 35A19
  misc_feature: MA Experiment 20000492 PARAMETER Experiment Name: Zm_Hybrid_Seed_Dev_P Parameter: Tissue Value: Fert Kernel vs. Unfert Floret
  misc_feature: MA Experiment ID: 20000535 Result: Down-regulated in Transcription
  misc_feature: MA Experiment 20000535 PARAMETER Experiment Name: Zm_Hybrid_Seed_Dev_P Parameter: DAP Value: 30 vs. 12
  misc_feature: MA Experiment 20000535 PARAMETER Experiment Name: Zm_Hybrid_Seed_Dev_P Parameter: Organism Value: Zea mays
  misc_feature: MA Experiment 20000535 PARAMETER Experiment Name: Zm_Hybrid_Seed_Dev_P Parameter: Plant Line Value: 35A19
  misc_feature: MA Experiment 20000535 PARAMETER Experiment Name: Zm_Hybrid_Seed_Dev_P Parameter: Tissue Value: Embryo vs. Unfert Floret
aatatcaatagaagtgacaactccatctctggtctcccagactcccacgcctataatctcattcccctccttcaaagccctctggcgatcgagattcttccccctccgtctccagatatggcaaacaaaaggattcagaaggaactcatggatctgcaaaaggacccaccgacatcatgcagtgcagggccagctggagaggatctattccactggcaggccacaatcatgggtcctagcgacagcccctatgcaggaggggttttctttgttaatatccattttcctcctgactacccgtttaagcctccaaaagtgaacttccaaacaaaagtttatcacccgaacatcaactctaacgggagcatctgccttgatatcctcaaggagcagtggagccctgcactgaccatatcaaaggtcctcctctccatcagctcgcttctgactgaccccaacccagacgaccccctcgtccccgagatcgcccacatgtacaagaaccagaggccgcgctacgaggaaaccgcacgggcctggacccagaagtacgcgatgggctagctgattctgtgttgccgaacaatactgtcactgccaagaagatcatcatcacgacgttgtaagaaattaagttgaaccggtttccccgtcgtgtgatggtattaagagcccagatggctgctgcgtcagttatactagcttcgcagaccaaagttcttctgtgtgtacagtacttttgaagctggatagtctgaatcctgtgccagaacctaaggtcttcgctttgttccctgaagagcgtttgtgaccatagaatctgcatctgtaaccttgccagctaagaaaacagacagtagctgcttgtatgatgtcgagatgctatagttccgatgggtggaaccgtgcagatgaaacagtccagtggtcttgcgttc

SEQ ID NO: 18361 - protein, 187 aa, Zea mays subsp. mays
  peptide (1)..(187): Ceres Seq. ID no. 14305298
  misc_feature (40)..(187): Homolog of NCBI NO: 28569267 NR Description: ubiquitin-conjugating enzyme E2 [Gossypium
  misc_feature (40)..(187): Homolog of NCBI NO: 464981 NR Description: Ubiquitin-conjugating enzyme E2-17 kDa
  misc_feature (40)..(186): Homolog of NCBI NO: 4100646 NR Description: putative ubiquitin conjugating enzyme [Pinus
  misc_feature (48)..(186): Homolog of NCBI NO: 18308140 NR Description: putative ubiquitin [Pinus pinaster]
  misc_feature (40)..(186): Homolog of NCBI NO: 20152203 NR Description: ubiquitin-conjugating enzyme OsUBC5a
  misc_feature (40)..(187): Homolog of NCBI NO: 28569269 NR Description: ubiquitin-conjugating enzyme E2 [Gossypium
  misc_feature (40)..(187): Homolog of NCBI NO: 5762457 NR Description: ubiquitin-conjugating enzyme UBC2
  misc_feature (40)..(187): Homolog of NCBI NO: 32488376 NR Description: OSJNBa0043A12.6 [Oryza sativa (japonica
  misc_feature (40)..(187): Homolog of NCBI NO: 34909292 NR Description: ubiquitin conjugating enzyme
  misc_feature (40)..(187): Homolog of NCBI NO: 2668744 NR Description: ubiquitin conjugating enzyme [Zea mays]
NINRSDNSISGLPDSHAYNLIPLLQSPLAIEILPPPSPDMANKRIQKELMDLQKDPPTSCSAGPAGEDLFHWQATIMGPSDSPYAGGVFFVNIHFPPDYPFKPPKVNFQTKVYHPNINSNGSICLDILKEQWSPALTISKVLLSISSLLTDPNPDDPLVPEIAHMYKNQRPRYEETARAWTQKYAMG

SEQ ID NO: 18362 - protein, 148 aa, Zea mays subsp. mays
  peptide (1)..(148): Ceres Seq. ID no. 14305299
  misc_feature (1)..(148): Homolog of NCBI NO: 2668744 NR Description: ubiquitin conjugating enzyme [Zea mays]
  misc_feature (1)..(148): Homolog of NCBI NO: 28569267 NR Description: ubiquitin-conjugating enzyme E2 [Gossypium
  misc_feature (1)..(148): Homolog of NCBI NO: 464981 NR Description: Ubiquitin-conjugating enzyme E2-17 kDa
  misc_feature (1)..(147): Homolog of NCBI NO: 4100646 NR Description: putative ubiquitin conjugating enzyme [Pinus
  misc_feature (9)..(147): Homolog of NCBI NO: 18308140 NR Description: putative ubiquitin [Pinus pinaster]
  misc_feature (1)..(147): Homolog of NCBI NO: 20152203 NR Description: ubiquitin-conjugating enzyme OsUBC5a
  misc_feature (1)..(148): Homolog of NCBI NO: 28569269 NR Description: ubiquitin-conjugating enzyme E2 [Gossypium
  misc_feature (1)..(148): Homolog of NCBI NO: 5762457 NR Description: ubiquitin-conjugating enzyme UBC2
  misc_feature (1)..(148): Homolog of NCBI NO: 32488376 NR Description: OSJNBa0043A12.6 [Oryza sativa (japonica
  misc_feature (1)..(148): Homolog of NCBI NO: 34909292 NR Description: ubiquitin conjugating enzyme
MANKRIQKELMDLQKDPPTSCSAGPAGEDLFHWQATIMGPSDSPYAGGVFFVNIHFPPDYPFKPPKVNFQTKVYHPNINSNGSICLDILKEQWSPALTISKVLLSISSLLTDPNPDDPLVPEIAHMYKNQRPRYEETARAWTQKYAMG

SEQ ID NO: 18363 - protein, 138 aa, Zea mays subsp. mays
  peptide (1)..(138): Ceres Seq. ID no. 14305300
  misc_feature (1)..(138): Homolog of NCBI NO: 28569267 NR Description: ubiquitin-conjugating enzyme E2 [Gossypium
  misc_feature (1)..(138): Homolog of NCBI NO: 464981 NR Description: Ubiquitin-conjugating enzyme E2-17 kDa
  misc_feature (1)..(137): Homolog of NCBI NO: 4100646 NR Description: putative ubiquitin conjugating enzyme [Pinus
  misc_feature (1)..(137): Homolog of NCBI NO: 18308140 NR Description: putative ubiquitin [Pinus pinaster]
  misc_feature (1)..(137): Homolog of NCBI NO: 20152203 NR Description: ubiquitin-conjugating enzyme OsUBC5a
  misc_feature (1)..(138): Homolog of NCBI NO: 28569269 NR Description: ubiquitin-conjugating enzyme E2 [Gossypium
  misc_feature (1)..(138): Homolog of NCBI NO: 5762457 NR Description: ubiquitin-conjugating enzyme UBC2
  misc_feature (1)..(138): Homolog of NCBI NO: 32488376 NR Description: OSJNBa0043A12.6 [Oryza sativa (japonica
  misc_feature (1)..(138): Homolog of NCBI NO: 34909292 NR Description: ubiquitin conjugating enzyme
  misc_feature (1)..(138): Homolog of NCBI NO: 2668744 NR Description: ubiquitin conjugating enzyme [Zea mays]
MDLQKDPPTSCSAGPAGEDLFHWQATIMGPSDSPYAGGVFFVNIHFPPDYPFKPPKVNFQTKVYHPNINSNGSICLDILKEQWSPALTISKVLLSISSLLTDPNPDDPLVPEIAHMYKNQRPRYEETARAWTQKYAMG

SEQ ID NO: 18364 - DNA, 1805 bp, Zea mays subsp. mays
  misc_feature (1)..(1805): Ceres Seq. ID no. 12435271
  misc_feature: MA Experiment ID: 108527 Result: Down-regulated in Transcription
  misc_feature: MA Experiment 108527 PARAMETER Experiment Name: Zm_5mM_NO_P Parameter: Age (day) Value: 8
  misc_feature: MA Experiment 108527 PARAMETER Experiment Name: Zm_5mM_NO_P Parameter: Organism Value: Zea mays
  misc_feature: MA Experiment 108527 PARAMETER Experiment Name: Zm_5mM_NO_P Parameter: Plant Line Value: 35A19
  misc_feature: MA Experiment 108527 PARAMETER Experiment Name: Zm_5mM_NO_P Parameter: Timepoint (hr) Value: 6
  misc_feature: MA Experiment 108527 PARAMETER Experiment Name: Zm_5mM_NO_P Parameter: Tissue Value: Aerial
  misc_feature: MA Experiment 108527 PARAMETER Experiment Name: Zm_5mM_NO_P Parameter: Treatment Value: 5mM NO vs. No Treatment
  misc_feature: MA Experiment ID: 108547 Result: Up-regulated in Transcription
  misc_feature: MA Experiment 108547 PARAMETER Experiment Name: Zm_Imbibed_Seeds_P Parameter: Age (day) Value: 4 vs. 2
  misc_feature: MA Experiment 108547 PARAMETER Experiment Name: Zm_Imbibed_Seeds_P Parameter: Organism Value: Zea mays
  misc_feature: MA Experiment 108547 PARAMETER Experiment Name: Zm_Imbibed_Seeds_P Parameter: Plant Line Value: 35A19
  misc_feature: MA Experiment 108547 PARAMETER Experiment Name: Zm_Imbibed_Seeds_P Parameter: Tissue Value: Aerial vs. Embryo
  misc_feature: MA Experiment ID: 20000487 Result: Up-regulated in Transcription
  misc_feature: MA Experiment 20000487 PARAMETER Experiment Name: Zm_50mM_NH4NO3_L_to_H_P Parameter: Organism Value: Zea mays
  misc_feature: MA Experiment 20000487 PARAMETER Experiment Name: Zm_50mM_NH4NO3_L_to_H_P Parameter: Timepoint (hr) Value: 4
  misc_feature: MA Experiment 20000487 PARAMETER Experiment Name: Zm_50mM_NH4NO3_L_to_H_P Parameter: Tissue Value: Leaves
  misc_feature: MA Experiment 20000487 PARAMETER Experiment Name: Zm_50mM_NH4NO3_L_to_H_P Parameter: Treatment Value: 50mM NH4NO3 vs. 100mM Mannitol
aggaaattaagcttacagccccacaccgacaccgccggccaccgccatcgcctcgctgccgatggcggccgccgccgccgcccggatcctccgcttggccccgcgccggatccaggttcccaagacctccccgctcgccgcactctcgttcccactccctcgaacggcgccgatcgccgctggccttggggaggcggcagcgcttctgcgccgtggcgcaggcccccgcccccgcccccgcagccgcggcgacaggggcggcgggagaggccgtgggggagttcaggaagcggctgcgggtggcggacgtgaagggcggggaggacgagggcgccgcgtgggtgggcaaggagctcgccgtgccgggtgggtgcgcacctgccgcgcccagaggaccataaccttcgtcgaggtcaatgatggctcttgcttatccaatatgcaatgtgtattgactcctgaaacagaaggctatgaccagatagactctgtcactactggagcatctgtactagttgagggagttgttgcaagcagccaaggcggtaagcaaaaagtggagttgaaggtttcaaagatcaccgtgattggtaagagtgaccccacatcttttcctatacagaagaaacgggcatcaagagaattccttaggaccgtagcccatctccgtcctcggacaaacacttttggtgcagttgcaagagtgagaaatactctggcatacgcaactcataaattctttcaagacaatggatttgtttgggtttcgagcccaattattactgcctcagattgtgaaggagctggggagcagttttacgtgactactttgcgctgaaggtggttctctactcaaagatattcctgctaccaaggatggaagggttgattggtcacaggatttcttctgcaaaccagcatttctgacagtgtctggacagcttaatggtgaaacatatgcttcagctctatctgatatttacacatttggtccaacgtttagggctgaaaattcaaacacttcaaggcatctggctgaattttggatgattgaacctgagcttgcctttgcggatctgaacgatgacatggcttgtgcaactgcatatctccagtatgtagtaaagtatattctggagaactgcaaagaggatatggatttcttcaatacttggattgaaaaaggcatcatagatcggttaaatgatgtagtagagaagaacttcgttcacctgtcttacactgatgctgttgagctacttcttgggtccaagaaggaattcgagttcccggtaaagtggggtttggatcttcaaagcgagcatgagcgatatatcacagaagttgcctttggtgggcgccctgtaataattagagattacccaaaggagatcaaagctttctatatgagagaaaatgatgatgggaagacagttgctgcaatggatctgttggttcctcgggttggtgaacttattggaggaagccagagggaagagcgtcttgattaccttgaagcccggttggacgagcaaaatctgaataaggagagctactggtggtatttggacctacgacgatatggatcagttccacacgctggtttcggtctcggatttgagcggcttgtacagtttgctactggaatggacaacatcagagacaccatcccatttcctcgagttcctggctctgccgagttttagcgccctggaagtgttgtcgtatacgtatactttagaaacattctttcctaggatgtaatgtgaggaaaggcatacgttgtactgtacaactgnttcatc

SEQ ID NO: 18365 - protein, 258 aa, Zea mays subsp. mays
  peptide (1)..(258): Ceres Seq. ID no. 12435272
  misc_feature (192)..(257): Pfam Name: tRNA synthetases class II (D, K and N) Pfam Description: tRNA synthetases class II (D, K and N)
  misc_feature (102)..(257): Homolog of NCBI NO: 17231150 NR Description: asparaginyl-tRNA synthetase [Nostoc sp. PCC 7120]
  misc_feature (102)..(257): Homolog of NCBI NO: 23125364 NR Description: hypothetical protein [Nostoc punctiforme]
  misc_feature (102)..(257): Homolog of NCBI NO: 20141643 NR Description: Asparaginyl-tRNA synthetase (Asparagine--tRNA
  misc_feature (102)..(257): Homolog of NCBI NO: 16332045 NR Description: asparaginyl-tRNA synthetase [Synechocystis sp.
  misc_feature (102)..(257): Homolog of NCBI NO: 23040758 NR Description: hypothetical protein [Trichodesmium erythraeum
  misc_feature (1)..(140): Homolog of NCBI NO: 22775674 NR Description: putative asparaginyl-tRNA synthetase,
  misc_feature (80)..(257): Homolog of NCBI NO: 20139977 NR Description: Asparaginyl-tRNA synthetase,
  misc_feature (80)..(257): Homolog of NCBI NO: 15236037 NR Description: asparagine--tRNA ligase
  misc_feature (80)..(257): Homolog of NCBI NO: 2664210 NR Description: asparaginyl-tRNA synthetase [Arabidopsis thaliana]
  misc_feature (1)..(257): Homolog of NCBI NO: 22775674 NR Description: putative asparaginyl-tRNA synthetase,
MAAAAAARILRLAPRRIQVPKTSPLAALSFPLPRTAPIAAGLGEAAALLRRGAGPRPRPRSRGDRGGGRGRGGVQEAAAGGGREGRGGRGRRVGGQGARRAGWVRTCRAQRTITFVEVNDGSCLSNMQCVLTPETEGYDQIDSVTTGASVLVEGVVASSQGGKQKVELKVSKITVIGKSDPTSFPIQKKRASREFLRTVAHLRPRTNTFGAVARVRNTLAYATHKFFQDNGFVWVSSPIITASDCEGAGEQFYVTTLR

SEQ ID NO: 18366 - protein, 219 aa, Zea mays subsp. mays
  peptide (1)..(219): Ceres Seq. ID no. 12435273
  misc_feature (1)..(215): Pfam Name: tRNA synthetases class II (D, K and N) Pfam Description: tRNA synthetases class II (D, K and N)
  misc_feature (1)..(219): Homolog of NCBI NO: 23020175 NR Description: hypothetical protein [Clostridium thermocellum
  misc_feature (1)..(219): Homolog of NCBI NO: 17231150 NR Description: asparaginyl-tRNA synthetase [Nostoc sp. PCC 7120]
  misc_feature (1)..(219): Homolog of NCBI NO: 23125364 NR Description: hypothetical protein [Nostoc punctiforme]
  misc_feature (1)..(219): Homolog of NCBI NO: 20141643 NR Description: Asparaginyl-tRNA synthetase (Asparagine--tRNA
  misc_feature (1)..(219): Homolog of NCBI NO: 16332045 NR Description: asparaginyl-tRNA synthetase [Synechocystis sp.
  misc_feature (1)..(219): Homolog of NCBI NO: 23040758 NR Description: hypothetical protein [Trichodesmium erythraeum
  misc_feature (1)..(219): Homolog of NCBI NO: 20139977 NR Description: Asparaginyl-tRNA synthetase,
  misc_feature (1)..(219): Homolog of NCBI NO: 15236037 NR Description: asparagine--tRNA ligase
  misc_feature (1)..(219): Homolog of NCBI NO: 2664210 NR Description: asparaginyl-tRNA synthetase [Arabidopsis thaliana]
  misc_feature (1)..(219): Homolog of NCBI NO: 22775674 NR Description: putative asparaginyl-tRNA synthetase,
MIEPELAFADLNDDMACATAYLQYVVKYILENCKEDMDFFNTWIEKGIIDRLNDVVEKNFVHLSYTDAVELLLGSKKEFEFPVKWGLDLQSEHERYITEVAFGGRPVIIRDYPKEIKAFYMRENDDGKTVAAMDLLVPRVGELIGGSQREERLDYLEARLDEQNLNKESYWWYLDLRRYGSVPHAGFGLGFERLVQFATGMDNIRDTIPFPRVPGSAEF

SEQ ID NO: 18367 - protein, 205 aa, Zea mays subsp. mays
  peptide (1)..(205): Ceres Seq. ID no. 12435274
  misc_feature (1)..(201): Pfam Name: tRNA synthetases class II (D, K and N) Pfam Description: tRNA synthetases class II (D, K and N)
  misc_feature (1)..(205): Homolog of NCBI NO: 23020175 NR Description: hypothetical protein [Clostridium thermocellum
  misc_feature (1)..(205): Homolog of NCBI NO: 17231150 NR Description: asparaginyl-tRNA synthetase [Nostoc sp. PCC 7120]
  misc_feature (1)..(205): Homolog of NCBI NO: 20141643 NR Description: Asparaginyl-tRNA synthetase (Asparagine--tRNA
  misc_feature (1)..(205): Homolog of NCBI NO: 23125364 NR Description: hypothetical protein [Nostoc punctiforme]
  misc_feature (1)..(205): Homolog of NCBI NO: 16332045 NR Description: asparaginyl-tRNA synthetase [Synechocystis sp.
  misc_feature (1)..(205): Homolog of NCBI NO: 23040758 NR Description: hypothetical protein [Trichodesmium erythraeum
  misc_feature (1)..(205): Homolog of NCBI NO: 20139977 NR Description: Asparaginyl-tRNA synthetase,
  misc_feature (1)..(205): Homolog of NCBI NO: 15236037 NR Description: asparagine--tRNA ligase
  misc_feature (1)..(205): Homolog of NCBI NO: 2664210 NR Description: asparaginyl-tRNA synthetase [Arabidopsis thaliana]
  misc_feature (1)..(205): Homolog of NCBI NO: 22775674 NR Description: putative asparaginyl-tRNA synthetase,
MACATAYLQYVVKYILENCKEDMDFFNTWIEKGIIDRLNDVVEKNFVHLSYTDAVELLLGSKKEFEFPVKWGLDLQSEHERYITEVAFGGRPVIIRDYPKEIKAFYMRENDDGKTVAAMDLLVPRVGELIGGSQREERLDYLEARLDEQNLNKESYWWYLDLRRYGSVPHAGFGLGFERLVQFATGMDNIRDTIPFPRVPGSAEF

SEQ ID NO: 18368 - DNA, 1006 bp, Zea mays subsp. mays
  misc_feature (1)..(1006): Ceres Seq. ID no. 12363531
  misc_feature: MA Experiment ID: 108547 Result: Down-regulated in Transcription
  misc_feature: MA Experiment 108547 PARAMETER Experiment Name: Zm_Imbibed_Seeds_P Parameter: Age (day) Value: 4 vs. 2
  misc_feature: MA Experiment 108547 PARAMETER Experiment Name: Zm_Imbibed_Seeds_P Parameter: Organism Value: Zea mays
  misc_feature: MA Experiment 108547 PARAMETER Experiment Name: Zm_Imbibed_Seeds_P Parameter: Plant Line Value: 35A19
  misc_feature: MA Experiment 108547 PARAMETER Experiment Name: Zm_Imbibed_Seeds_P Parameter: Tissue Value: Aerial vs. Embryo
  misc_feature: MA Experiment ID: 20000108 Result: Up-regulated in Transcription
  misc_feature: MA Experiment 20000108 PARAMETER Experiment Name: Zm_Root-Tips_P Parameter: Age (day) Value: 12
  misc_feature: MA Experiment 20000108 PARAMETER Experiment Name: Zm_Root-Tips_P Parameter: Organism Value: Zea mays
  misc_feature: MA Experiment 20000108 PARAMETER Experiment Name: Zm_Root-Tips_P Parameter: Tissue Value: Root tips vs. Root mid region    35
  misc_feature: MA Experiment 20000108 PARAMETER Experiment Name: Zm_Root-Tips_P Parameter: Tissue Value: Root tips vs. Root mid region   Sequence Listing-Misc Features (4)
atgatgacgacgatgatgaacagaactcaccccgagtcatcgatccctggcaacgcgctaaccaagctagtagctagcaagcatcggccatgtccaagccaaggttggacgggaaggtggccatcgtgacgggcggcgcgagcgggatcggcgaggcggcggcgcggctgttcgcctcgagcggcgccacggtggtgatcgcggacgtgcaggacgcgctgggggaggcggtggcggcgtcggtggggccccggtgcgcgtacgcgcggtgcgacgtgacggacnaggcgcaggtggaggcgacggtggcncgngcngtgtcggcgcacgnncgnctgnangtnatgctgancaacgccggcgtgctgctcccgacggggtcggtgatgnacatggacctggcggagctggaccgcgtgatggccgtcaacttccggggcgccgcggcgtgnntnaagcacncggcgcgcgcgatggcgtccgncgncgncggcgccatcgtgtgcacggccagcgtggcgtcgctgcagggcgggttcggcccggcgtcgtacacggcgtccaagcacgcgttgctgggcctggtgcgcgccgcggcgggggagctgggacggcacggcgtgcgcgtcaantgcgtgtcccccggcggngtcgccacgcccctcagctgcgcgctcatgggcgtggggccccgcgagctggaggccatgacggtgccgcacaacgtcctgcaggggaaggtgctgcgcgccgaggacgtcgccgaggccgcgctgttcctcgcgtccgaccaggccgccttcatcagcggacacaacctcgttgtcgacggcgccaccaccgccgtcaaccccgccgtgctgcacaccgtcgggctgtgaacgacgagcgctcgctgcgacagtagatacatatatactccacaccttcaatgccatgtttcatctttttcttttctttgtttgtttgcattggttgccatcaagaaaactgcttttgttagctc

SEQ ID NO: 18369 - protein, 263 aa, Zea mays subsp. mays
  peptide (1)..(263): Ceres Seq. ID no. 12363532
  misc_feature (1)..(253): Homolog of NCBI NO: 15228656 NR Description: short-chain alcohol dehydrogenase, putative
  misc_feature (1)..(251): Homolog of NCBI NO: 33354197 NR Description: putative sex determination protein tasselseed 2
  misc_feature (214)..(251): Homolog of NCBI NO: 1877480 NR Description: short-chain alcohol dehydrogenase [Tripsacum
  misc_feature (1)..(192): Homolog of NCBI NO: 1877480 NR Description: short-chain alcohol dehydrogenase [Tripsacum
  misc_feature (203)..(251): Homolog of NCBI NO: 33146885 NR Description: putative short-chain alcohol dehydrogenase
  misc_feature (1)..(192): Homolog of NCBI NO: 33146885 NR Description: putative short-chain alcohol dehydrogenase
  misc_feature (1)..(251): Homolog of NCBI NO: 34899216 NR Description: alcohol dehydrogenase-like protein
  misc_feature (1)..(251): Homolog of NCBI NO: 34899218 NR Description: alcohol dehydrogenase-like protein~contains EST
  misc_feature (2)..(253): Homolog of NCBI NO: 15983819 NR Description: 3-beta-hydroxysteroiddehydrogenase [Digitalis
  misc_feature (1)..(263): Homolog of NCBI NO: 40714675 NR Description: putative hydroxysteroiddehydrogenase
  misc_feature (66)..(66): Xaa is any aa, unknown or other
  misc_feature (74)..(74): Xaa is any aa, unknown or other
  misc_feature (75)..(75): Xaa is any aa, unknown or other
  misc_feature (76)..(76): Xaa is any aa, unknown or other
  misc_feature (81)..(81): Xaa is any aa, unknown or other
  misc_feature (82)..(82): Xaa is any aa, unknown or other
  misc_feature (84)..(84): Xaa is any aa, unknown or other
  misc_feature (85)..(85): Xaa is any aa, unknown or other
  misc_feature (88)..(88): Xaa is any aa, unknown or other
  misc_feature (101)..(101): Xaa is any aa, unknown or other
  misc_feature (121)..(121): Xaa is any aa, unknown or other
  misc_feature (122)..(122): Xaa is any aa, unknown or other
  misc_feature (125)..(125): Xaa is any aa, unknown or other
  misc_feature (132)..(132): Xaa is any aa, unknown or other
  misc_feature (133)..(133): Xaa is any aa, unknown or other
  misc_feature (134)..(134): Xaa is any aa, unknown or other
  misc_feature (181)..(181): Xaa is any aa, unknown or other
  misc_feature (187)..(187): Xaa is any aa, unknown or other
MSKPRLDGKVAIVTGGASGIGEAAARLFASSGATVVIADVQDALGEAVAASVGPRCAYARCDVTDXAQVEATVXXXVSAHXXLXXMLXNAGVLLPTGSVMXMDLAELDRVMAVNFRGAAAXXKHXARAMASXXXGAIVCTASVASLQGGFGPASYTASKHALLGLVRAAAGELGRHGVRVXCVSPGXVATPLSCALMGVGPRELEAMTVPHNVLQGKVLRAEDVAEAALFLASDQAAFISGHNLVVDGATTAVNPAVLHTVGL

SEQ ID NO: 18370 - protein, 178 aa, Zea mays subsp. mays
  peptide (1)..(178): Ceres Seq. ID no. 12363533
  misc_feature (1)..(168): Homolog of NCBI NO: 15228656 NR Description: short-chain alcohol dehydrogenase, putative
  misc_feature (1)..(166): Homolog of NCBI NO: 33354197 NR Description: putative sex determination protein tasselseed 2
  misc_feature (129)..(166): Homolog of NCBI NO: 1877480 NR Description: short-chain alcohol dehydrogenase [Tripsacum
  misc_feature (1)..(107): Homolog of NCBI NO: 1877480 NR Description: short-chain alcohol dehydrogenase [Tripsacum
  misc_feature (118)..(166): Homolog of NCBI NO: 33146885 NR Description: putative short-chain alcohol dehydrogenase
  misc_feature (1)..(107): Homolog of NCBI NO: 33146885 NR Description: putative short-chain alcohol dehydrogenase
  misc_feature (1)..(166): Homolog of NCBI NO: 34899216 NR Description: alcohol dehydrogenase-like protein
  misc_feature (1)..(166): Homolog of NCBI NO: 34899218 NR Description: alcohol dehydrogenase-like protein~contains EST
  misc_feature (1)..(168): Homolog of NCBI NO: 15983819 NR Description: 3-beta-hydroxysteroiddehydrogenase [Digitalis
  misc_feature (1)..(178): Homolog of NCBI NO: 40714675 NR Description: putative hydroxysteroiddehydrogenase
  misc_feature (3)..(3): Xaa is any aa, unknown or other
  misc_feature (16)..(16): Xaa is any aa, unknown or other
  misc_feature (36)..(36): Xaa is any aa, unknown or other
  misc_feature (37)..(37): Xaa is any aa, unknown or other
  misc_feature (40)..(40): Xaa is any aa, unknown or other
  misc_feature (47)..(47): Xaa is any aa, unknown or other
  misc_feature (48)..(48): Xaa is any aa, unknown or other
  misc_feature (49)..(49): Xaa is any aa, unknown or other
  misc_feature (96)..(96): Xaa is any aa, unknown or other
  misc_feature (102)..(102): Xaa is any aa, unknown or other
MLXNAGVLLPTGSVMXMDLAELDRVMAVNFRGAAAXXKHXARAMASXXXGAIVCTASVASLQGGFGPASYTASKHALLGLVRAAAGELGRHGVRVXCVSPGXVATPLSCALMGVGPRELEAMTVPHNVLQGKVLRAEDVAEAALFLASDQAAFISGHNLVVDGATTAVNPAVLHTVGL

SEQ ID NO: 18371 - protein, 164 aa, Zea mays subsp. mays
  peptide (1)..(164): Ceres Seq. ID no. 12363534
  misc_feature (1)..(154): Homolog of NCBI NO: 15228656 NR Description: short-chain alcohol dehydrogenase, putative
  misc_feature (1)..(152): Homolog of NCBI NO: 33354197 NR Description: putative sex determination protein tasselseed 2
  misc_feature (115)..(152): Homolog of NCBI NO: 1877480 NR Description: short-chain alcohol dehydrogenase [Tripsacum
  misc_feature (1)..(93): Homolog of NCBI NO: 1877480 NR Description: short-chain alcohol dehydrogenase [Tripsacum
  misc_feature (104)..(152): Homolog of NCBI NO: 33146885 NR Description: putative short-chain alcohol dehydrogenase
  misc_feature (1)..(93): Homolog of NCBI NO: 33146885 NR Description: putative short-chain alcohol dehydrogenase
  misc_feature (1)..(152): Homolog of NCBI NO: 34899216 NR Description: alcohol dehydrogenase-like protein
  misc_feature (1)..(152): Homolog of NCBI NO: 34899218 NR Description: alcohol dehydrogenase-like protein~contains EST
  misc_feature (1)..(154): Homolog of NCBI NO: 15983819 NR Description: 3-beta-hydroxysteroiddehydrogenase [Digitalis
  misc_feature (1)..(164): Homolog of NCBI NO: 40714675 NR Description: putative hydroxysteroiddehydrogenase
  misc_feature (2)..(2): Xaa is any aa, unknown or other
  misc_feature (22)..(22): Xaa is any aa, unknown or other
  misc_feature (23)..(23): Xaa is any aa, unknown or other
  misc_feature (26)..(26): Xaa is any aa, unknown or other
  misc_feature (33)..(33): Xaa is any aa, unknown or other
  misc_feature (34)..(34): Xaa is any aa, unknown or other
  misc_feature (35)..(35): Xaa is any aa, unknown or other
  misc_feature (82)..(82): Xaa is any aa, unknown or other
  misc_feature (88)..(88): Xaa is any aa, unknown or other
MXMDLAELDRVMAVNFRGAAAXXKHXARAMASXXXGAIVCTASVASLQGGFGPASYTASKHALLGLVRAAAGELGRHGVRVXCVSPGXVATPLSCALMGVGPRELEAMTVPHNVLQGKVLRAEDVAEAALFLASDQAAFISGHNLVVDGATTAVNPAVLHTVGL

SEQ ID NO: 18372 - DNA, 1215 bp, Zea mays subsp. mays; identical to SEQ ID NO: 8672
  misc_feature (1)..(1215): Ceres Seq. ID no. 13665996
  misc_feature: MA Experiment ID: 108515 Result: Down-regulated in Transcription
  misc_feature: MA Experiment 108515 PARAMETER Experiment Name: Zm_2mM_SA_P Parameter: Age (day) Value: 8
  misc_feature: MA Experiment 108515 PARAMETER Experiment Name: Zm_2mM_SA_P Parameter: Organism Value: Zea mays
  misc_feature: MA Experiment 108515 PARAMETER Experiment Name: Zm_2mM_SA_P Parameter: Plant Line Value: 35A19
  misc_feature: MA Experiment 108515 PARAMETER Experiment Name: Zm_2mM_SA_P Parameter: Timepoint (hr) Value: 12
  misc_feature: MA Experiment 108515 PARAMETER Experiment Name: Zm_2mM_SA_P Parameter: Tissue Value: Aerial
  misc_feature: MA Experiment 108515 PARAMETER Experiment Name: Zm_2mM_SA_P Parameter: Treatment Value: 2mM SA vs. No Treatment

SEQ ID NO: 18373 - protein, 235 aa, Zea mays subsp. mays; identical to SEQ ID NO: 8673
  peptide (1)..(235): Ceres Seq. ID no. 13665997
  misc_feature (88)..(142): Pfam Name: KH domain Pfam Description: KH domain
  misc_feature (33)..(235): Homolog of NCBI NO: 34907446 NR Description: P0434C04.5 [Oryza sativa (japonica
  misc_feature (33)..(233): Homolog of NCBI NO: 16930473 NR Description: At1g09660/F21M12_5 [Arabidopsis thaliana]
  misc_feature (33)..(233): Homolog of NCBI NO: 22329449 NR Description: KH domain quaking protein, putative [Arabidopsis >gi|26452384|dbj|BAC43277.1| putative elongation factor
  misc_feature (39)..(235): Homolog of NCBI NO: 12322716 NR Description: unknown protein; 28504-31237 [Arabidopsis
  misc_feature (39)..(235): Homolog of NCBI NO: 30680583 NR Description: KH domain protein [Arabidopsis thaliana]
  misc_feature (39)..(235): Homolog of NCBI NO: 40645104 NR Description: hypothetical protein [Nicotiana tabacum]
  misc_feature (39)..(234): Homolog of NCBI NO: 15224909 NR Description: KH domain protein [Arabidopsis thaliana]
  misc_feature (43)..(232): Homolog of NCBI NO: 34900448 NR Description: contains EST C27129(C51039)~similar to
  misc_feature (33)..(233): Homolog of NCBI NO: 15236738 NR Description: KH domain protein [Arabidopsis thaliana]
  misc_feature (33)..(233): Homolog of NCBI NO: 20268733 NR Description: unknown protein [Arabidopsis thaliana]

SEQ ID NO: 18374 - protein, 175 aa, Zea mays subsp. mays; identical to SEQ ID NO: 8674
  peptide (1)..(175): Ceres Seq. ID no. 13665998
  misc_feature (28)..(82): Pfam Name: KH domain Pfam Description: KH domain
  misc_feature (1)..(175): Homolog of NCBI NO: 34907446 NR Description: P0434C04.5 [Oryza sativa (japonica
  misc_feature (1)..(173): Homolog of NCBI NO: 16930473 NR Description: At1g09660/F21M12_5 [Arabidopsis thaliana]
  misc_feature (1)..(173): Homolog of NCBI NO: 22329449 NR Description: KH domain quaking protein, putative [Arabidopsis >gi|26452384|dbj|BAC43277.1| putative elongation factor
  misc_feature (1)..(175): Homolog of NCBI NO: 12322716 NR Description: unknown protein; 28504-31237 [Arabidopsis
  misc_feature (1)..(175): Homolog of NCBI NO: 30680583 NR Description: KH domain protein [Arabidopsis thaliana]
  misc_feature (1)..(175): Homolog of NCBI NO: 40645104 NR Description: hypothetical protein [Nicotiana tabacum]
  misc_feature (1)..(174): Homolog of NCBI NO: 15224909 NR Description: KH domain protein [Arabidopsis thaliana]
  misc_feature (1)..(172): Homolog of NCBI NO: 34900448 NR Description: contains EST C27129(C51039)~similar to
  misc_feature (1)..(173): Homolog of NCBI NO: 15236738 NR Description: KH domain protein [Arabidopsis thaliana]
  misc_feature (1)..(173): Homolog of NCBI NO: 20268733 NR Description: unknown protein [Arabidopsis thaliana]

SEQ ID NO: 18375 - protein, 167 aa, Zea mays subsp. mays; identical to SEQ ID NO: 8675
  peptide (1)..(167): Ceres Seq. ID no. 13665999
  misc_feature (20)..(74): Pfam Name: KH domain Pfam Description: KH domain
  misc_feature (1)..(167): Homolog of NCBI NO: 34907446 NR Description: P0434C04.5 [Oryza sativa (japonica
  misc_feature (1)..(165): Homolog of NCBI NO: 16930473 NR Description: At1g09660/F21M12_5 [Arabidopsis thaliana]
  misc_feature (1)..(165): Homolog of NCBI NO: 22329449 NR Description: KH domain quaking protein, putative [Arabidopsis >gi|26452384|dbj|BAC43277.1| putative elongation factor
  misc_feature (1)..(167): Homolog of NCBI NO: 12322716 NR Description: unknown protein; 28504-31237 [Arabidopsis
  misc_feature (1)..(167): Homolog of NCBI NO: 30680583 NR Description: KH domain protein [Arabidopsis thaliana]
  misc_feature (1)..(167): Homolog of NCBI NO: 40645104 NR Description: hypothetical protein [Nicotiana tabacum]
  misc_feature (1)..(166): Homolog of NCBI NO: 15224909 NR Description: KH domain protein [Arabidopsis thaliana]
  misc_feature (1)..(164): Homolog of NCBI NO: 34900448 NR Description: contains EST C27129(C51039)~similar to
  misc_feature (1)..(165): Homolog of NCBI NO: 15236738 NR Description: KH domain protein [Arabidopsis thaliana]
  misc_feature (1)..(165): Homolog of NCBI NO: 20268733 NR Description: unknown protein [Arabidopsis thaliana]

SEQ ID NO: 18376 - DNA, 972 bp, Zea mays subsp. mays; identical to SEQ ID NO: 11350
  misc_feature (1)..(972): Ceres Seq. ID no. 12341008
  misc_feature: MA Experiment ID: 108504 Result: Up-regulated in Transcription
  misc_feature: MA Experiment 108504 PARAMETER Experiment Name: Zm_Drought_P Parameter: Age (day) Value: 8
  misc_feature: MA Experiment 108504 PARAMETER Experiment Name: Zm_Drought_P Parameter: Organism Value: Zea mays
  misc_feature: MA Experiment 108504 PARAMETER Experiment Name: Zm_Drought_P Parameter: Plant Line Value: 35A19
  misc_feature: MA Experiment 108504 PARAMETER Experiment Name: Zm_Drought_P Parameter: Timepoint (hr) Value: 12
  misc_feature: MA Experiment 108504 PARAMETER Experiment Name: Zm_Drought_P Parameter: Tissue Value: Aerial
  misc_feature: MA Experiment 108504 PARAMETER Experiment Name: Zm_Drought_P Parameter: Treatment Value: Drought vs. No Drought
  misc_feature: MA Experiment ID: 108522 Result: Up-regulated in Transcription
  misc_feature: MA Experiment 108522 PARAMETER Experiment Name: Zm_42deg_Heat_P Parameter: Age (day) Value: 8
  misc_feature: MA Experiment 108522 PARAMETER Experiment Name: Zm_42deg_Heat_P Parameter: Organism Value: Zea mays
  misc_feature: MA Experiment 108522 PARAMETER Experiment Name: Zm_42deg_Heat_P Parameter: Plant Line Value: 35A19
  misc_feature: MA Experiment 108522 PARAMETER Experiment Name: Zm_42deg_Heat_P Parameter: Temperature (deg C) Value: 42 vs. 22
  misc_feature: MA Experiment 108522 PARAMETER Experiment Name: Zm_42deg_Heat_P Parameter: Timepoint (hr) Value: 1
  misc_feature: MA Experiment 108522 PARAMETER Experiment Name: Zm_42deg_Heat_P Parameter: Tissue Value: Aerial
  misc_feature: MA Experiment ID: 108523 Result: Up-regulated in Transcription
  misc_feature: MA Experiment 108523 PARAMETER Experiment Name: Zm_42deg_Heat_P Parameter: Age (day) Value: 8
  misc_feature: MA Experiment 108523 PARAMETER Experiment Name: Zm_42deg_Heat_P Parameter: Organism Value: Zea mays
  misc_feature: MA Experiment 108523 PARAMETER Experiment Name: Zm_42deg_Heat_P Parameter: Plant Line Value: 35A19
  misc_feature: MA Experiment 108523 PARAMETER Experiment Name: Zm_42deg_Heat_P Parameter: Temperature (deg C) Value: 42 vs. 22
  misc_feature: MA Experiment 108523 PARAMETER Experiment Name: Zm_42deg_Heat_P Parameter: Timepoint (hr) Value: 6
  misc_feature: MA Experiment 108523 PARAMETER Experiment Name: Zm_42deg_Heat_P Parameter: Tissue Value: Aerial
  misc_feature: MA Experiment ID: 108527 Result: Up-regulated in Transcription
  misc_feature: MA Experiment 108527 PARAMETER Experiment Name: Zm_5mM_NO_P Parameter: Age (day) Value: 8
  misc_feature: MA Experiment 108527 PARAMETER Experiment Name: Zm_5mM_NO_P Parameter: Organism Value: Zea mays
  misc_feature: MA Experiment 108527 PARAMETER Experiment Name: Zm_5mM_NO_P Parameter: Plant Line Value: 35A19
  misc_feature: MA Experiment 108527 PARAMETER Experiment Name: Zm_5mM_NO_P Parameter: Timepoint (hr) Value: 6
  misc_feature: MA Experiment 108527 PARAMETER Experiment Name: Zm_5mM_NO_P Parameter: Tissue Value: Aerial
  misc_feature: MA Experiment 108527 PARAMETER Experiment Name: Zm_5mM_NO_P Parameter: Treatment Value: 5mM NO vs. No Treatment
  misc_feature: MA Experiment ID: 108528 Result: Down-regulated in Transcription
  misc_feature: MA Experiment 108528 PARAMETER Experiment Name: Zm_Imbibed_Seeds_P Parameter: Age (day) Value: 5 vs. 2
  misc_feature: MA Experiment 108528 PARAMETER Experiment Name: Zm_Imbibed_Seeds_P Parameter: Organism Value: Zea mays
  misc_feature: MA Experiment 108528 PARAMETER Experiment Name: Zm_Imbibed_Seeds_P Parameter: Plant Line Value: 35A19
  misc_feature: MA Experiment 108528 PARAMETER Experiment Name: Zm_Imbibed_Seeds_P Parameter: Tissue Value: Aerial vs. Embryo
  misc_feature: MA Experiment ID: 108530 Result: Down-regulated in Transcription
  misc_feature: MA Experiment 108530 PARAMETER Experiment Name: Zm_Imbibed_Seeds_P Parameter: Age (day) Value: 6 vs. 2
  misc_feature: MA Experiment 108530 PARAMETER Experiment Name: Zm_Imbibed_Seeds_P Parameter: Organism Value: Zea mays
  misc_feature: MA Experiment 108530 PARAMETER Experiment Name: Zm_Imbibed_Seeds_P Parameter: Plant Line Value: 35A19
  misc_feature: MA Experiment 108530 PARAMETER Experiment Name: Zm_Imbibed_Seeds_P Parameter: Tissue Value: Aerial vs. Embryo
  misc_feature: MA Experiment ID: 108534 Result: Up-regulated in Transcription
  misc_feature: MA Experiment 108534 PARAMETER Experiment Name: Zm_4deg_Cold_P Parameter: Age (hr) Value: 8
  misc_feature: MA Experiment 108534 PARAMETER Experiment Name: Zm_4deg_Cold_P Parameter: Organism Value: Zea mays
  misc_feature: MA Experiment 108534 PARAMETER Experiment Name: Zm_4deg_Cold_P Parameter: Plant Line Value: 35A19
  misc_feature: MA Experiment 108534 PARAMETER Experiment Name: Zm_4deg_Cold_P Parameter: Temperature (deg C) Value: 4 vs. 22
  misc_feature: MA Experiment 108534 PARAMETER Experiment Name: Zm_4deg_Cold_P Parameter: Timepoint (hr) Value: 6
  misc_feature: MA Experiment 108534 PARAMETER Experiment Name: Zm_4deg_Cold_P Parameter: Tissue Value: Aerial
  misc_feature: MA Experiment ID: 108547 Result: Down-regulated in Transcription
  misc_feature: MA Experiment 108547 PARAMETER Experiment Name: Zm_Imbibed_Seeds_P Parameter: Age (day) Value: 4 vs. 2
  misc_feature: MA Experiment 108547 PARAMETER Experiment Name: Zm_Imbibed_Seeds_P Parameter: Organism Value: Zea mays
  misc_feature: MA Experiment 108547 PARAMETER Experiment Name: Zm_Imbibed_Seeds_P Parameter: Plant Line Value: 35A19
  misc_feature: MA Experiment 108547 PARAMETER Experiment Name: Zm_Imbibed_Seeds_P Parameter: Tissue Value: Aerial vs. Embryo
  misc_feature: MA Experiment ID: 108556 Result: Up-regulated in Transcription
  misc_feature: MA Experiment 108556 PARAMETER Experiment Name: Zm_Drought_P Parameter: Age (day) Value: 9
  misc_feature: MA Experiment 108556 PARAMETER Experiment Name: Zm_Drought_P Parameter: Organism Value: Zea mays
  misc_feature: MA Experiment 108556 PARAMETER Experiment Name: Zm_Drought_P Parameter: Plant Line Value: 35A19
  misc_feature: MA Experiment 108556 PARAMETER Experiment Name: Zm_Drought_P Parameter: Timepoint (hr) Value: 24
  misc_feature: MA Experiment 108556 PARAMETER Experiment Name: Zm_Drought_P Parameter: Tissue Value: Aerial
  misc_feature: MA Experiment 108556 PARAMETER Experiment Name: Zm_Drought_P Parameter: Treatment Value: Drought vs. No Drought
  misc_feature: MA Experiment ID: 20000479 Result: Up-regulated in Transcription
  misc_feature: MA Experiment 20000479 PARAMETER Experiment Name: Zm_Drought_P Parameter: Age (day) Value: 10
  misc_feature: MA Experiment 20000479 PARAMETER Experiment Name: Zm_Drought_P Parameter: Organism Value: Zea mays
  misc_feature: MA Experiment 20000479 PARAMETER Experiment Name: Zm_Drought_P Parameter: Plant Line Value: 35A19
  misc_feature: MA Experiment 20000479 PARAMETER Experiment Name: Zm_Drought_P Parameter: Timepoint (hr) Value: 48
  misc_feature: MA Experiment 20000479 PARAMETER Experiment Name: Zm_Drought_P Parameter: Tissue Value: Aerial
  misc_feature: MA Experiment 20000479 PARAMETER Experiment Name: Zm_Drought_P Parameter: Treatment Value: Drought vs. No Drought
  misc_feature: MA Experiment ID: 20000480 Result: Up-regulated in Transcription
  misc_feature: MA Experiment 20000480 PARAMETER Experiment Name: Zm_Drought_P Parameter: Age (day) Value: 11
  misc_feature: MA Experiment 20000480 PARAMETER Experiment Name: Zm_Drought_P Parameter: Organism Value: Zea mays
  misc_feature: MA Experiment 20000480 PARAMETER Experiment Name: Zm_Drought_P Parameter: Plant Line Value: 35A19
  misc_feature: MA Experiment 20000480 PARAMETER Experiment Name: Zm_Drought_P Parameter: Timepoint (hr) Value: 72
  misc_feature: MA Experiment 20000480 PARAMETER Experiment Name: Zm_Drought_P Parameter: Tissue Value: Aerial
  misc_feature: MA Experiment 20000480 PARAMETER Experiment Name: Zm_Drought_P Parameter: Treatment Value: Drought vs. No Drought
  misc_feature: MA Experiment ID: 20000626 Result: Up-regulated in Transcription
  misc_feature: MA Experiment 20000626 PARAMETER Experiment Name: Zm_Herbicide-Treatments_P Parameter: Timepoint (hr) Value: 12
  misc_feature: MA Experiment 20000626 PARAMETER Experiment Name: Zm_Herbicide-Treatments_P Parameter: Tissue Value: Aerial
  misc_feature: MA Experiment 20000626 PARAMETER Experiment Name: Zm_Herbicide-Treatments_P Parameter: Treatment Value: Roundup vs. No Treatment

SEQ ID NO: 18377 - protein, 176 aa, Zea mays subsp. mays; identical to SEQ ID NO: 11351
  peptide (1)..(176): Ceres Seq. ID no. 12341009
  misc_feature (1)..(170): Homolog of NCBI NO: 40882701 NR Description: putative ripening regulated protein [Oryza sativa
  misc_feature (1)..(172): Homolog of NCBI NO: 12231292 NR Description: ripening regulated protein DDTFR8 [Lycopersicon
  misc_feature (1)..(173): Homolog of NCBI NO: 11934654 NR Description: p23 [Brassica napus]
  misc_feature (1)..(132): Homolog of NCBI NO: 38637531 NR Description: putative p23 co-chaperone [Oryza sativa (japonica
  misc_feature (1)..(132): Homolog of NCBI NO: 11229591 NR Description: p23 co-chaperone [Arabidopsis thaliana]
  misc_feature (1)..(132): Homolog of NCBI NO: 30679149 NR Description: glycine-rich protein [Arabidopsis thaliana] AT4g02450/T14P8_5 [Arabidopsis thaliana]
  misc_feature (3)..(132): Homolog of NCBI NO: 7487014 NR Description: hypothetical protein T14P8.5 - Arabidopsis >gi|3193303|gb|AAC19287.1| similar to several proteins containing
  misc_feature (1)..(138): Homolog of NCBI NO: 22330824 NR Description: similar to p23 {Brassica napus}; protein id:
  misc_feature (1)..(162): Homolog of NCBI NO: 17556837 NR Description: Telomerase-binding protein p23 like (19.4 kD) elegans] >gi|8928507|sp|Q23280|YOCA_CAEEL Hypothetical 19.4 kDa ZC395.10 in chromosome III >gi|7510717|pir||T27543 hypothetical
  misc_feature (5)..(163): Homolog of NCBI NO: 32398747 NR Description: p23 co-chaperone, probable [Cryptosporidium

SEQ ID NO: 18378 - DNA, 976 bp, Zea mays subsp. mays
  misc_feature (1)..(976): Ceres Seq. ID no. 12358492
  misc_feature: MA Experiment ID: 108556 Result: Up-regulated in Transcription
  misc_feature: MA Experiment 108556 PARAMETER Experiment Name: Zm_Drought_P Parameter: Age (day) Value: 9
  misc_feature: MA Experiment 108556 PARAMETER Experiment Name: Zm_Drought_P Parameter: Organism Value: Zea mays
  misc_feature: MA Experiment 108556 PARAMETER Experiment Name: Zm_Drought_P Parameter: Plant Line Value: 35A19
  misc_feature: MA Experiment 108556 PARAMETER Experiment Name: Zm_Drought_P Parameter: Timepoint (hr) Value: 24
  misc_feature: MA Experiment 108556 PARAMETER Experiment Name: Zm_Drought_P Parameter: Tissue Value: Aerial
  misc_feature: MA Experiment 108556 PARAMETER Experiment Name: Zm_Drought_P Parameter: Treatment Value: Drought vs. No Drought
  misc_feature: MA Experiment ID: 20000492 Result: Down-regulated in Transcription
  misc_feature: MA Experiment 20000492 PARAMETER Experiment Name: Zm_Hybrid_Seed_Dev_P Parameter: DAP Value: 12
  misc_feature: MA Experiment 20000492 PARAMETER Experiment Name: Zm_Hybrid_Seed_Dev_P Parameter: Organism Value: Zea mays
  misc_feature: MA Experiment 20000492 PARAMETER Experiment Name: Zm_Hybrid_Seed_Dev_P Parameter: Plant Line Value: 35A19
  misc_feature: MA Experiment 20000492 PARAMETER Experiment Name: Zm_Hybrid_Seed_Dev_P Parameter: Tissue Value: Fert Kernel vs. Unfert Floret
  misc_feature: MA Experiment ID: 20000534 Result: Up-regulated in Transcription
  misc_feature: MA Experiment 20000534 PARAMETER Experiment Name: Zm_Hybrid_Pollen_P Parameter: Age (day) Value: 8
  misc_feature: MA Experiment 20000534 PARAMETER Experiment Name: Zm_Hybrid_Pollen_P Parameter: Organism Value: Zea mays
  misc_feature: MA Experiment 20000534 PARAMETER Experiment Name: Zm_Hybrid_Pollen_P Parameter: Plant Line Value: 35A19
  misc_feature: MA Experiment 20000534 PARAMETER Experiment Name: Zm_Hybrid_Pollen_P Parameter: Tissue Value: Pollen vs. Aerial
agaaaggatgggctctgacaaatcctgacctaattgaccagtgcgcaagagaggattttgttgagagagttaaaactcagcaagatgaaggctgcaatgtccatggttttttagatgtcagtaaagttgctggaaattttcactttgccccaggcaaaggtttttatgaatcgaacatagatgtgcctgagctgtcattacttgaaggtggtttcaatattacccacaaaataaacaaactgtcctttgggacagaatttcctggtgttgtcaatccacttgatggtgctcagtggacacagccagcttcagatgggacataccagtatttcataaaagttgtccctacaatatacactgatataagaggacacaatattcattcgaaccagttctcggtaacggaacattttagggatggaaatgttcgtccgaaaccccaacctggagtttttttcttctatgatttctcacctataaaggtgatattcacagaagaaaatagatccctactccactacctgacaaacctttgtgctatagtgggaggtgtgttcactgtctcgggtatcatcgactcgtttatataccacggacagaaggcactcaagaagaaaatggagctaggtaaatacagatgatcaacatcgaccttgtactggccccatcgtttccaagttttgtggcatgtaaggaggggatatgcctgctaaatacgacaagatgccacttacattgctgaggttgcaatttgcaaggccatcagactgatgttattgcacgtgagctgatcagataacatgtaaaaagacaatgaatagcctggtctggggggagtgctttgatgtccatcattgttcactgacattgaaatggcccgaaccggtgcggtggagtaatttgagttcggaggtggatatatcatagatcatagaatgtttcttatgaaagtttcttcaaggaaacagcttcactc

SEQ ID NO: 18379 - protein, 212 aa, Zea mays subsp. mays
  peptide (1)..(212): Ceres Seq. ID no. 12358493
  misc_feature (1)..(210): Homolog of NCBI NO: 34860248 NR Description: similar to serologically defined breast cancer
  misc_feature (1)..(210): Homolog of NCBI NO: 7959731 NR Description: PRO0989 [Homo sapiens]
  misc_feature (1)..(210): Homolog of NCBI NO: 28278376 NR Description: Similar to serologically defined breast cancer
  misc_feature (1)..(210): Homolog of NCBI NO: 13384938 NR Description: serologically defined breast cancer antigen 84
  misc_feature (1)..(210): Homolog of NCBI NO: 7706278 NR Description: serologically defined breast cancer antigen 84
  misc_feature (1)..(211): Homolog of NCBI NO: 18395087 NR Description: expressed protein
  misc_feature (184)..(211): Homolog of NCBI NO: 6598578 NR Description: F5J5.4 [Arabidopsis thaliana]
  misc_feature (1)..(188): Homolog of NCBI NO: 6598578 NR Description: F5J5.4 [Arabidopsis thaliana]
  misc_feature (1)..(211): Homolog of NCBI NO: 30693281 NR Description: expressed protein [Arabidopsis thaliana]
  misc_feature (1)..(211): Homolog of NCBI NO: 38347102 NR Description: OSJNBa0006M15.17 [Oryza sativa (japonica
KGWALTNPDLIDQCAREDFVERVKTQQDEGCNVHGFLDVSKVAGNFHFAPGKGFYESNIDVPELSLLEGGFNITHKINKLSFGTEFPGVVNPLDGAQWTQPASDGTYQYFIKVVPTIYTDIRGHNIHSNQFSVTEHFRDGNVRPKPQPGVFFFYDFSPIKVIFTEENRSLLHYLTNLCAIVGGVFTVSGIIDSFIYHGQKALKKKMELGKYR

SEQ ID NO: 18380 - DNA, 1698 bp, Zea mays subsp. mays
  misc_feature (1)..(1698): Ceres Seq. ID no. 12361474
  misc_feature: MA Experiment ID: 108529 Result: Down-regulated in Transcription
  misc_feature: MA Experiment 108529 PARAMETER Experiment Name: Zm_Imbibed_Seeds_P Parameter: Age (day) Value: 5 vs. 2
  misc_feature: MA Experiment 108529 PARAMETER Experiment Name: Zm_Imbibed_Seeds_P Parameter: Organism Value: Zea mays
  misc_feature: MA Experiment 108529 PARAMETER Experiment Name: Zm_Imbibed_Seeds_P Parameter: Plant Line Value: 35A19
  misc_feature: MA Experiment 108529 PARAMETER Experiment Name: Zm_Imbibed_Seeds_P Parameter: Tissue Value: Roots vs. Embryo
  misc_feature: MA Experiment ID: 108536 Result: Up-regulated in Transcription
  misc_feature: MA Experiment 108536 PARAMETER Experiment Name: Zm_Meristem_P Parameter: Age (day) Value: 8
  misc_feature: MA Experiment 108536 PARAMETER Experiment Name: Zm_Meristem_P Parameter: Organism Value: Zea mays
  misc_feature: MA Experiment 108536 PARAMETER Experiment Name: Zm_Meristem_P Parameter: Plant Line Value: 35A19
  misc_feature: MA Experiment 108536 PARAMETER Experiment Name: Zm_Meristem_P Parameter: Tissue Value: Shoot Meristem vs. Above Shoot Meristem
  misc_feature: MA Experiment ID: 108546 Result: Down-regulated in Transcription
  misc_feature: MA Experiment 108546 PARAMETER Experiment Name: Zm_Imbibed_Seeds_P Parameter: Age (day) Value: 3 vs. 2
  misc_feature: MA Experiment 108546 PARAMETER Experiment Name: Zm_Imbibed_Seeds_P Parameter: Organism Value: Zea mays
  misc_feature: MA Experiment 108546 PARAMETER Experiment Name: Zm_Imbibed_Seeds_P Parameter: Plant Line Value: 35A19
  misc_feature: MA Experiment 108546 PARAMETER Experiment Name: Zm_Imbibed_Seeds_P Parameter: Tissue Value: Roots vs. Embryo
  misc_feature: MA Experiment ID: 108556 Result: Down-regulated in Transcription
  misc_feature: MA Experiment 108556 PARAMETER Experiment Name: Zm_Drought_P Parameter: Age (day) Value: 9
  misc_feature: MA Experiment 108556 PARAMETER Experiment Name: Zm_Drought_P Parameter: Organism Value: Zea mays
  misc_feature: MA Experiment 108556 PARAMETER Experiment Name: Zm_Drought_P Parameter: Plant Line Value: 35A19
  misc_feature: MA Experiment 108556 PARAMETER Experiment Name: Zm_Drought_P Parameter: Timepoint (hr) Value: 24
  misc_feature: MA Experiment 108556 PARAMETER Experiment Name: Zm_Drought_P Parameter: Tissue Value: Aerial
  misc_feature: MA Experiment 108556 PARAMETER Experiment Name: Zm_Drought_P Parameter: Treatment Value: Drought vs. No Drought
  misc_feature: MA Experiment ID: 108689 Result: Down-regulated in Transcription
  misc_feature: MA Experiment 108689 PARAMETER Experiment Name: Zm_Drought_Roots_P Parameter: Age (day) Value: 9
  misc_feature: MA Experiment 108689 PARAMETER Experiment Name: Zm_Drought_Roots_P Parameter: Organism Value: Zea mays
  misc_feature: MA Experiment 108689 PARAMETER Experiment Name: Zm_Drought_Roots_P Parameter: Plant Line Value: 35A19
  misc_feature: MA Experiment 108689 PARAMETER Experiment Name: Zm_Drought_Roots_P Parameter: Timepoint (hr) Value: 24
  misc_feature: MA Experiment 108689 PARAMETER Experiment Name: Zm_Drought_Roots_P Parameter: Tissue Value: Roots
  misc_feature: MA Experiment 108689 PARAMETER Experiment Name: Zm_Drought_Roots_P Parameter: Treatment Value: Drought vs. No Drought
  misc_feature: MA Experiment ID: 20000477 Result: Down-regulated in Transcription
  misc_feature: MA Experiment 20000477 PARAMETER Experiment Name: Zm_5mM_SA_P Parameter: Age (day) Value: 10
  misc_feature: MA Experiment 20000477 PARAMETER Experiment Name: Zm_5mM_SA_P Parameter: Organism Value: Zea mays
  misc_feature: MA Experiment 20000477 PARAMETER Experiment Name: Zm_5mM_SA_P Parameter: Plant Line Value: 35A19
  misc_feature: MA Experiment 20000477 PARAMETER Experiment Name: Zm_5mM_SA_P Parameter: Timepoint (hr) Value: 48
  misc_feature: MA Experiment 20000477 PARAMETER Experiment Name: Zm_5mM_SA_P Parameter: Tissue Value: Aerial
  misc_feature: MA Experiment 20000477 PARAMETER Experiment Name: Zm_5mM_SA_P Parameter: Treatment Value: 5mM SA vs. No Treatment
  misc_feature: MA Experiment ID: 20000478 Result: Down-regulated in Transcription
  misc_feature: MA Experiment 20000478 PARAMETER Experiment Name: Zm_5mM_SA_P Parameter: Age (day) Value: 11
  misc_feature: MA Experiment 20000478 PARAMETER Experiment Name: Zm_5mM_SA_P Parameter: Organism Value: Zea mays
  misc_feature: MA Experiment 20000478 PARAMETER Experiment Name: Zm_5mM_SA_P Parameter: Plant Line Value: 35A19
  misc_feature: MA Experiment 20000478 PARAMETER Experiment Name: Zm_5mM_SA_P Parameter: Timepoint (hr) Value: 72
  misc_feature: MA Experiment 20000478 PARAMETER Experiment Name: Zm_5mM_SA_P Parameter: Tissue Value: Aerial
  misc_feature: MA Experiment 20000478 PARAMETER Experiment Name: Zm_5mM_SA_P Parameter: Treatment Value: 5mM SA vs. No Treatment
  misc_feature: MA Experiment ID: 20000479 Result: Down-regulated in Transcription
  misc_feature: MA Experiment 20000479 PARAMETER Experiment Name: Zm_Drought_P Parameter: Age (day) Value: 10
  misc_feature: MA Experiment 20000479 PARAMETER Experiment Name: Zm_Drought_P Parameter: Organism Value: Zea mays
  misc_feature: MA Experiment 20000479 PARAMETER Experiment Name: Zm_Drought_P Parameter: Plant Line Value: 35A19
  misc_feature: MA Experiment 20000479 PARAMETER Experiment Name: Zm_Drought_P Parameter: Timepoint (hr) Value: 48
  misc_feature: MA Experiment 20000479 PARAMETER Experiment Name: Zm_Drought_P Parameter: Tissue Value: Aerial
  misc_feature: MA Experiment 20000479 PARAMETER Experiment Name: Zm_Drought_P Parameter: Treatment Value: Drought vs. No Drought
  misc_feature: MA Experiment ID: 20000492 Result: Up-regulated in Transcription
  misc_feature: MA Experiment 20000492 PARAMETER Experiment Name: Zm_Hybrid_Seed_Dev_P Parameter: DAP Value: 12
  misc_feature: MA Experiment 20000492 PARAMETER Experiment Name: Zm_Hybrid_Seed_Dev_P Parameter: Organism Value: Zea mays
  misc_feature: MA Experiment 20000492 PARAMETER Experiment Name: Zm_Hybrid_Seed_Dev_P Parameter: Plant Line Value: 35A19
  misc_feature: MA Experiment 20000492 PARAMETER Experiment Name: Zm_Hybrid_Seed_Dev_P Parameter: Tissue Value: Fert Kernel vs. Unfert Floret
  misc_feature: MA Experiment ID: 20000535 Result: Up-regulated in Transcription
  misc_feature: MA Experiment 20000535 PARAMETER Experiment Name: Zm_Hybrid_Seed_Dev_P Parameter: DAP Value: 30 vs. 12
  misc_feature: MA Experiment 20000535 PARAMETER Experiment Name: Zm_Hybrid_Seed_Dev_P Parameter: Organism Value: Zea mays
  misc_feature: MA Experiment 20000535 PARAMETER Experiment Name: Zm_Hybrid_Seed_Dev_P Parameter: Plant Line Value: 35A19
  misc_feature: MA Experiment 20000535 PARAMETER Experiment Name: Zm_Hybrid_Seed_Dev_P Parameter: Tissue Value: Embryo vs. Unfert Floret
gcacgagaccattacctagaacatcctaatcgaaaaagccagtggctcagcggctgcgcccgtgcctgtcacgtcttgtcctcaatctctctctctctctctcaatcctcacctctccggctctctttctcctccccagtccccaacggtgaggcccccgccgcgcagcccatcgacgcattgccgctgcaagcgcggacaccgagggctagaagcggcggcggtgccagggttcggcgctcggtcggcaatggcgaggcggcttatgctggcgctccctgtgctcctcttcttattgctcgtcgggcaatgccacggcggcaagattggcgtctgctacggccgcaacgccgacgaccttccggcgccagacaaggtggcgcagctaatccagcagcagtccatcaagtacgtgcgcatctacgacaccaacatcgacgtcatcaaggcattcgccaacaccggcgtcgagctcatggtcggcgtccccaactccgacctcctcgccttcgcgcagtaccagtccaacgtcgacacatggctcaagaacagcatcctcccatactacccggacaccatgatcacctacatcaccgtcggcgccgaggtcaccgagagccccgccaacgtctccgccctcgtcgtgccagccatgcgcaatgtgcacaccgcgctcaagaaggccggcctgcacaagaagatcaccatctccagcacccactcgctcgggatactgtcccggtcgttcccgccgtctgctggggcgttcaacagcagctacgcctacttcttgaagcctatgctccagttccttgtggagaatcaggcaccgttcatggtggatttgtacccctactatgcgtaccagaactcacggagcaatgtgtccctcaactacgcgctgttctcgccagagtcccaggatgtgattgacccaaacactggactggtttacactaacatgttcgacgcccaggtcgattccatcttctttgcgctcatggctctgaacttcaagactttgaagatcatgatcactgagtcagggtggccaaacaaaggggcggtcaaggagactggagccacaccagacaatgctcagacctacaataccaatttgatacgccatgttgttaatgacagcggcacaccggcgaaaccaggggaagagattgatgtctacatattttcattgttcaatgagaacaggaaacctggcatcgagtcggagaggaactggggactgttttttcctgataagagctctatctacagccttgattggacgggccgaggcaatgtggatgttatgactggagcaaacattacaagtgctaatggtacctggtgtattgcttcaactaatgcatcagaaactgatctgcagaatgccctcaactgggcatgtggtccaggcaacgtagattgttctgccatacagccaagccaaccctgctaccagccggacactttaacttcccatgcttcatatgcattcaatagctactaccagcaaaatggagccaacgttgtggcctgtgactttggaggtgcggggatacgaacgacaaaagatccaagtaagagtcccatccttttttactgttatgataatcatgatgctatgcatggtttcatgataacatccatttgcatatattcaggttgtggattatgtctttagttgatgttggagtt

SEQ ID NO: 18381 - protein, 477 aa, Zea mays subsp. mays
  peptide (1)..(477): Ceres Seq. ID no. 12361475
  misc_feature (26)..(345): Pfam Name: Glycosyl hydrolases family 17 Pfam Description: Glycosyl hydrolases family 17
  misc_feature (25)..(361): Homolog of NCBI NO: 25407609 NR Description: beta-1, 3-glucanase-like protein
  misc_feature (1)..(361): Homolog of NCBI NO: 30688300 NR Description: glycosyl hydrolase family 17 [Arabidopsis
  misc_feature (1)..(361): Homolog of NCBI NO: 30688297 NR Description: glycosyl hydrolase family 17 [Arabidopsis
  misc_feature (1)..(450): Homolog of NCBI NO: 15241268 NR Description: glycosyl hydrolase family 17
  misc_feature (7)..(457): Homolog of NCBI NO: 34909360 NR Description: P0638D12.12 [Oryza sativa (japonica
MARRLMLALPVLLFLLLVGQCHGGKIGVCYGRNADDLPAPDKVAQLIQQQSIKYVRIYDTNIDVIKAFANTGVELMVGVPNSDLLAFAQYQSNVDTWLKNSILPYYPDTMITYITVGAEVTESPANVSALVVPAMRNVHTALKKAGLHKKITISSTHSLGILSRSFPPSAGAFNSSYAYFLKPMLQFLVENQAPFMVDLYPYYAYQNSRSNVSLNYALFSPESQDVIDPNTGLVYTNMFDAQVDSIFFALMALNFKTLKIMITESGWPNKGAVKETGATPDNAQTYNTNLIRHVVNDSGTPAKPGEEIDVYIFSLFNENRKPGIESERNWGLFFPDKSSIYSLDWTGRGNVDVMTGANITSANGTWCIASTNASETDLQNALNWACGPGNVDCSAIQPSQPCYQPDTLTSHASYAFNSYYQQNGANVVACDFGGAGIRTTKDPSKSPILFYCYDNHDAMHGFMITSICIYSGCGLCL

SEQ ID NO: 18382 - protein, 472 aa, Zea mays subsp. mays
  peptide (1)..(472): Ceres Seq. ID no. 12361476
  misc_feature (21)..(340): Pfam Name: Glycosyl hydrolases family 17 Pfam Description: Glycosyl hydrolases family 17
  misc_feature (20)..(356): Homolog of NCBI NO: 25407609 NR Description: beta-1, 3-glucanase-like protein
  misc_feature (1)..(356): Homolog of NCBI NO: 30688300 NR Description: glycosyl hydrolase family 17 [Arabidopsis
  misc_feature (1)..(356): Homolog of NCBI NO: 30688297 NR Description: glycosyl hydrolase family 17 [Arabidopsis
  misc_feature (1)..(445): Homolog of NCBI NO: 15241268 NR Description: glycosyl hydrolase family 17
  misc_feature (2)..(452): Homolog of NCBI NO: 34909360 NR Description: P0638D12.12 [Oryza sativa (japonica
MLALPVLLFLLLVGQCHGGKIGVCYGRNADDLPAPDKVAQLIQQQSIKYVRIYDTNIDVIKAFANTGVELMVGVPNSDLLAFAQYQSNVDTWLKNSILPYYPDTMITYITVGAEVTESPANVSALVVPAMRNVHTALKKAGLHKKITISSTHSLGILSRSFPPSAGAFNSSYAYFLKPMLQFLVENQAPFMVDLYPYYAYQNSRSNVSLNYALFSPESQDVIDPNTGLVYTNMFDAQVDSIFFALMALNFKTLKIMITESGWPNKGAVKETGATPDNAQTYNTNLIRHVVNDSGTPAKPGEEIDVYIFSLFNENRKPGIESERNWGLFFPDKSSIYSLDWTGRGNVDVMTGANITSANGTWCIASTNASETDLQNALNWACGPGNVDCSAIQPSQPCYQPDTLTSHASYAFNSYYQQNGANVVACDFGGAGIRTTKDPSKSPILFYCYDNHDAMHGFMITSICIYSGCGLCL

SEQ ID NO: 18383 - protein, 402 aa, Zea mays subsp. mays
  peptide (1)..(402): Ceres Seq. ID no. 12361477
  misc_feature (1)..(270): Pfam Name: Glycosyl hydrolases family 17 Pfam Description: Glycosyl hydrolases family 17
  misc_feature (1)..(286): Homolog of NCBI NO: 25407609 NR Description: beta-1, 3-glucanase-like protein
  misc_feature (1)..(286): Homolog of NCBI NO: 30688300 NR Description: glycosyl hydrolase family 17 [Arabidopsis
  misc_feature (1)..(286): Homolog of NCBI NO: 30688297 NR Description: glycosyl hydrolase family 17 [Arabidopsis
  misc_feature (1)..(375): Homolog of NCBI NO: 15241268 NR Description: glycosyl hydrolase family 17
  misc_feature (1)..(382): Homolog of NCBI NO: 34909360 NR Description: P0638D12.12 [Oryza sativa (japonica
MVGVPNSDLLAFAQYQSNVDTWLKNSILPYYPDTMITYITVGAEVTESPANVSALVVPAMRNVHTALKKAGLHKKITISSTHSLGILSRSFPPSAGAFNSSYAYFLKPMLQFLVENQAPFMVDLYPYYAYQNSRSNVSLNYALFSPESQDVIDPNTGLVYTNMFDAQVDSIFFALMALNFKTLKIMITESGWPNKGAVKETGATPDNAQTYNTNLIRHVVNDSGTPAKPGEEIDVYIFSLFNENRKPGIESERNWGLFFPDKSSIYSLDWTGRGNVDVMTGANITSANGTWCIASTNASETDLQNALNWACGPGNVDCSAIQPSQPCYQPDTLTSHASYAFNSYYQQNGANVVACDFGGAGIRTTKDPSKSPILFYCYDNHDAMHGFMITSICIYSGCGLCL

SEQ ID NO: 18384 - DNA, 2333 bp, Zea mays subsp. mays
  misc_feature (1)..(2333): Ceres Seq. ID no. 12375264
  misc_feature: MA Experiment ID: 108527 Result: Down-regulated in Transcription
  misc_feature: MA Experiment 108527 PARAMETER Experiment Name: Zm_5mM_NO_P Parameter: Age (day) Value: 8
  misc_feature: MA Experiment 108527 PARAMETER Experiment Name: Zm_5mM_NO_P Parameter: Organism Value: Zea mays
  misc_feature: MA Experiment 108527 PARAMETER Experiment Name: Zm_5mM_NO_P Parameter: Plant Line Value: 35A19
  misc_feature: MA Experiment 108527 PARAMETER Experiment Name: Zm_5mM_NO_P Parameter: Timepoint (hr) Value: 6
  misc_feature: MA Experiment 108527 PARAMETER Experiment Name: Zm_5mM_NO_P Parameter: Tissue Value: Aerial
  misc_feature: MA Experiment 108527 PARAMETER Experiment Name: Zm_5mM_NO_P Parameter: Treatment Value: 5mM NO vs. No Treatment
  misc_feature: MA Experiment ID: 20000488 Result: Down-regulated in Transcription
  misc_feature: MA Experiment 20000488 PARAMETER Experiment Name: Zm_50mM_NH4NO3_L_to_H_P Parameter: Organism Value: Zea mays
  misc_feature: MA Experiment 20000488 PARAMETER Experiment Name: Zm_50mM_NH4NO3_L_to_H_P Parameter: Timepoint (hr) Value: 8
  misc_feature: MA Experiment 20000488 PARAMETER Experiment Name: Zm_50mM_NH4NO3_L_to_H_P Parameter: Tissue Value: Leaves
  misc_feature: MA Experiment 20000488 PARAMETER Experiment Name: Zm_50mM_NH4NO3_L_to_H_P Parameter: Treatment Value: 50mM NH4NO3 vs. 100mM Mannitol
  misc_feature: MA Experiment ID: 20000492 Result: Down-regulated in Transcription
  misc_feature: MA Experiment 20000492 PARAMETER Experiment Name: Zm_Hybrid_Seed_Dev_P Parameter: DAP Value: 12
  misc_feature: MA Experiment 20000492 PARAMETER Experiment Name: Zm_Hybrid_Seed_Dev_P Parameter: Organism Value: Zea mays
  misc_feature: MA Experiment 20000492 PARAMETER Experiment Name: Zm_Hybrid_Seed_Dev_P Parameter: Plant Line Value: 35A19
  misc_feature: MA Experiment 20000492 PARAMETER Experiment Name: Zm_Hybrid_Seed_Dev_P Parameter: Tissue Value: Fert Kernel vs. Unfert Floret
  misc_feature: MA Experiment ID: 20000535 Result: Down-regulated in Transcription
  misc_feature: MA Experiment 20000535 PARAMETER Experiment Name: Zm_Hybrid_Seed_Dev_P Parameter: DAP Value: 30 vs. 12
  misc_feature: MA Experiment 20000535 PARAMETER Experiment Name: Zm_Hybrid_Seed_Dev_P Parameter: Organism Value: Zea mays
  misc_feature: MA Experiment 20000535 PARAMETER Experiment Name: Zm_Hybrid_Seed_Dev_P Parameter: Plant Line Value: 35A19
  misc_feature: MA Experiment 20000535 PARAMETER Experiment Name: Zm_Hybrid_Seed_Dev_P Parameter: Tissue Value: Embryo vs. Unfert Floret
gcacgagaccattacctagaacatcctaatcgaaaaggcttttgctgcgtctttcctttgacgtcagcgagcgaagaactacttctttccctccctctctcatcattctcagatctcccgctccctccttcccttcatctctctgaatcctgctgcccacctcgccgtcctcgcattccgccgctcgctctcgcgatccggcagcttcctcttcgccgtcgttcttgcctcacctcgtccgctatcctgtaagctgctgctgggtcacccgtggctggactcgaccccgccggcgccgcctccgggggctgggttcgccggatgtttatcggctcctgatccatccggatcccggatccgccgcaaaggcaccgcctttgtaggttctccgggcccatgcaggagggtttggcgattcggcggtgaggcagggctctggtttagttcttgcgttggactagcccggagatgcttcgtggaacggggcacggcggcggggatgcgcggaggcgggcactgcgctcgtcgcggcggcgtctgcccgggtggatctggtggcttctcgggatcttcctccttgtcgggctcatgctcttcgtccttcaccacaaccaaaaggagcagttccggccgcccgtcgtggataatggttcagagatggaggaagtccctcgtgagaaagtgaatttctcagaagagcttttgagcagcacatcatttgctcgccaattagcggatcagatgactttagcaaaggcgtatgtcatccttgcaaaagagcatgataatcttcagcttgcatgggagcttagttcgcagataaggaattgtcaaagattgctctctgaaggggcagttagtgggagagcaatcactaaagatgaagcccatcctataataagccggctagcactgttaatatacaaggctcaggactctcactatgatatcagcacaacaatagtgacattgaagaaccatgccctggcactagaggagcgtgcaaaggcagcaattgttcagagtgctgagtttggccagttagcagcagaatccttcccgaagaatctgcactgtctaactgtgaaactgacagaggagtggcttcggaacccgaagcataggagtcgctcagaggagaaccggaattccacacgattggtggataataatctgtatcatttctgtatattctctgataatgtgctggccacttcagttgttgtcaattctacagtctccaatgcaaatcaccctcaacagcttgtgtttcatgtggtcactgacagaatccattttggcgcaatgtcaacattgttcctcataaatgacttcaaaggttgtactgttgaagtccgatgcatagatgagttctcgtggttgaatgcttcttcatctcctcttgtcaggcaactatctgaggttgaaactcagggttactattactcagctggttccaagaatcctgaaagagaaataaaattccataatccaaagtttgtttctctactgaaccatttacggttctacattcctcagatacttcccaacttggagaaggtggtgtttcttgatgacgatgttgtggtgcaaaaggatttgactcagctgttctccatagagctgcatggcaatgtcattggagcagtggaaacttgtttagagtcgtttcatcggtatcacaagtatctaaatttttcgcatcctactatcagctccaagattgatccacatacttgtggatgggcttttggaatgaacatttttgacttgatagcttggaggaaggcaaacgccacatcattgtatcattattggcaagagcaaaattctgacctattgctctggagaacaggaactcttcctgcaggccttttgacattttatggcctgatggagcccctagaccgcagatggcatgtcttgggtctcgggtatgatgtagacatagatgatcgtctgattgagagtgctgctgttgtgcactataatggaaacatgaaaccctggctgaagctggctattcgccgttacaagtatatatgggaacggtatgtgaatatctcacacccgtatgttagagagtgtatgttgcattagaaagtctgcaaatctctgtatgttcttgcatggcactgaagctgcatgcttcagtttcttcacatgaggctgcttttgagcaccttatgtgccggaaagttccagaggtagaatatatactcaagggacagcatcaaagaagtcaactgttaagttttctttttgggttgggagaagattcattttgggatgaaaataattcctttgcagagtttacatacaatttggactgg

SEQ ID NO: 18385 - protein, 543 aa, Zea mays subsp. mays
  peptide (1)..(543): Ceres Seq. ID no. 12375265
  misc_feature (80)..(540): Homolog of NCBI NO: 7485958 NR Description: hypothetical protein F22I13.40 - Arabidopsis
  misc_feature (62)..(543): Homolog of NCBI NO: 38423965 NR Description: putative glycosyltransferase
  misc_feature (47)..(543): Homolog of NCBI NO: 18422837 NR Description: putative protein
  misc_feature (47)..(543): Homolog of NCBI NO: 10177914 NR Description: emb|CAB71043.1~gene_id:MCA23.10~strong similarity
  misc_feature (80)..(543): Homolog of NCBI NO: 15233046 NR Description: putative protein
  misc_feature (86)..(542): Homolog of NCBI NO: 7271113 NR Description: 68 kDa protein [Cicer arietinum]
  misc_feature (72)..(523): Homolog of NCBI NO: 25411994 NR Description: hypothetical protein At2g20810 [imported] -
  misc_feature (56)..(543): Homolog of NCBI NO: 32492171 NR Description: OSJNBb0034I13.1 [Oryza sativa (japonica
  misc_feature (9)..(543): Homolog of NCBI NO: 18399484 NR Description: Expressed protein
  misc_feature (18)..(541): Homolog of NCBI NO: 15293067 NR Description: unknown protein [Arabidopsis thaliana]
MLRGTGHGGGDARRRALRSSRRRLPGWIWWLLGIFLLVGLMLFVLHHNQKEQFRPPVVDNGSEMEEVPREKVNFSEELLSSTSFARQLADQMTLAKAYVILAKEHDNLQLAWELSSQIRNCQRLLSEGAVSGRAITKDEAHPIISRLALLIYKAQDSHYDISTTIVTLKNHALALEERAKAAIVQSAEFGQLAAESFPKNLHCLTVKLTEEWLRNPKHRSRSEENRNSTRLVDNNLYHFCIFSDNVLATSVVVNSTVSNANHPQQLVFHVVTDRIHFGAMSTLFLINDFKGCTVEVRCIDEFSWLNASSSPLVRQLSEVETQGYYYSAGSKNPEREIKFHNPKFVSLLNHLRFYIPQILPNLEKVVFLDDDVVVQKDLTQLFSIELHGNVIGAVETCLESFHRYHKYLNFSHPTISSKIDPHTCGWAFGMNIFDLIAWRKANATSLYHYWQEQNSDLLLWRTGTLPAGLLTFYGLMEPLDRRWHVLGLGYDVDIDDRLIESAAVVHYNGNMKPWLKLAIRRYKYIWERYVNISHPYVRECMLH

SEQ ID NO: 18386 - protein, 503 aa, Zea mays subsp. mays
  peptide (1)..(503): Ceres Seq. ID no. 12375266
  misc_feature (40)..(500): Homolog of NCBI NO: 7485958 NR Description: hypothetical protein F22I13.40 - Arabidopsis
  misc_feature (22)..(503): Homolog of NCBI NO: 38423965 NR Description: putative glycosyltransferase
  misc_feature (7)..(503): Homolog of NCBI NO: 18422837 NR Description: putative protein
  misc_feature (7)..(503): Homolog of NCBI NO: 10177914 NR Description: emb|CAB71043.1~gene_id:MCA23.10~strong similarity
  misc_feature (40)..(503): Homolog of NCBI NO: 15233046 NR Description: putative protein
  misc_feature (46)..(502): Homolog of NCBI NO: 7271113 NR Description: 68 kDa protein [Cicer arietinum]
  misc_feature (32)..(483): Homolog of NCBI NO: 25411994 NR Description: hypothetical protein At2g20810 [imported] -
  misc_feature (16)..(503): Homolog of NCBI NO: 32492171 NR Description: OSJNBb0034I13.1 [Oryza sativa (japonica
  misc_feature (1)..(503): Homolog of NCBI NO: 18399484 NR Description: Expressed protein
  misc_feature (1)..(501): Homolog of NCBI NO: 15293067 NR Description: unknown protein [Arabidopsis thaliana]
MLFVLHHNQKEQFRPPVVDNGSEMEEVPREKVNFSEELLSSTSFARQLADQMTLAKAYVILAKEHDNLQLAWELSSQIRNCQRLLSEGAVSGRAITKDEAHPIISRLALLIYKAQDSHYDISTTIVTLKNHALALEERAKAAIVQSAEFGQLAAESFPKNLHCLTVKLTEEWLRNPKHRSRSEENRNSTRLVDNNLYHFCIFSDNVLATSVVVNSTVSNANHPQQLVFHVVTDRIHFGAMSTLFLINDFKGCTVEVRCIDEFSWLNASSSPLVRQLSEVETQGYYYSAGSKNPEREIKFHNPKFVSLLNHLRFYIPQILPNLEKVVFLDDDVVVQKDLTQLFSIELHGNVIGAVETCLESFHRYHKYLNFSHPTISSKIDPHTCGWAFGMNIFDLIAWRKANATSLYHYWQEQNSDLLLWRTGTLPAGLLTFYGLMEPLDRRWHVLGLGYDVDIDDRLIESAAVVHYNGNMKPWLKLAIRRYKYIWERYVNISHPYVRECMLH

SEQ ID NO: 18387 - protein, 480 aa, Zea mays subsp. mays
  peptide (1)..(480): Ceres Seq. ID no. 12375267
  misc_feature (17)..(477): Homolog of NCBI NO: 7485958 NR Description: hypothetical protein F22I13.40 - Arabidopsis
  misc_feature (1)..(480): Homolog of NCBI NO: 38423965 NR Description: putative glycosyltransferase
  misc_feature (1)..(480): Homolog of NCBI NO: 18422837 NR Description: putative protein
  misc_feature (1)..(480): Homolog of NCBI NO: 10177914 NR Description: emb|CAB71043.1~gene_id:MCA23.10~strong similarity
  misc_feature (17)..(480): Homolog of NCBI NO: 15233046 NR Description: putative protein
  misc_feature (23)..(479): Homolog of NCBI NO: 7271113 NR Description: 68 kDa protein [Cicer arietinum]
  misc_feature (9)..(460): Homolog of NCBI NO: 25411994 NR Description: hypothetical protein At2g20810 [imported] -
  misc_feature (1)..(480): Homolog of NCBI NO: 32492171 NR Description: OSJNBb0034I13.1 [Oryza sativa (japonica
  misc_feature (1)..(480): Homolog of NCBI NO: 18399484 NR Description: Expressed protein
  misc_feature (1)..(478): Homolog of NCBI NO: 15293067 NR Description: unknown protein [Arabidopsis thaliana]
MEEVPREKVNFSEELLSSTSFARQLADQMTLAKAYVILAKEHDNLQLAWELSSQIRNCQRLLSEGAVSGRAITKDEAHPIISRLALLIYKAQDSHYDISTTIVTLKNHALALEERAKAAIVQSAEFGQLAAESFPKNLHCLTVKLTEEWLRNPKHRSRSEENRNSTRLVDNNLYHFCIFSDNVLATSVVVNSTVSNANHPQQLVFHVVTDRIHFGAMSTLFLINDFKGCTVEVRCIDEFSWLNASSSPLVRQLSEVETQGYYYSAGSKNPEREIKFHNPKFVSLLNHLRFYIPQILPNLEKVVFLDDDVVVQKDLTQLFSIELHGNVIGAVETCLESFHRYHKYLNFSHPTISSKIDPHTCGWAFGMNIFDLIAWRKANATSLYHYWQEQNSDLLLWRTGTLPAGLLTFYGLMEPLDRRWHVLGLGYDVDIDDRLIESAAVVHYNGNMKPWLKLAIRRYKYIWERYVNISHPYVRECMLH

SEQ ID NO: 18388 - DNA, 891 bp, Zea mays subsp. mays
  misc_feature (1)..(891): Ceres Seq. ID no. 12435263
  misc_feature: MA Experiment ID: 108535 Result: Up-regulated in Transcription
  misc_feature: MA Experiment 108535 PARAMETER Experiment Name: Zm_Meristem_P Parameter: Age (day) Value: 8
  misc_feature: MA Experiment 108535 PARAMETER Experiment Name: Zm_Meristem_P Parameter: Organism Value: Zea mays
  misc_feature: MA Experiment 108535 PARAMETER Experiment Name: Zm_Meristem_P Parameter: Plant Line Value: 35A19
  misc_feature: MA Experiment 108535 PARAMETER Experiment Name: Zm_Meristem_P Parameter: Tissue Value: Root Meristem vs. Above Root Meristem
aacccacccccacacccacgagcccggcggcgtgctctctgctgtctgctctgcacccaggaccttcggccacaggagctcagccctatccctcgacggtgctcgcggccggcgcgcggcggctcgacccttccccatctccagctccacgccgtctccaccgcctggaatccagggcctccgacgccaccccacctccaccgcctggaatcgaggaccgtcggcgccgccgacctccgtcccctgcctgctgcctcgactcaactgtgtcagggtatttgcaaacagtgacaaaggttctgccttgcttgctgtggagccatggctgcaaagatacgcgtggtgatgaagtcttttatgagccaaagcaaccaggtcgcagggcttctgccattcacaaagaaggtcggactacctgaatcgcgagccttgtacaccgtgctgcggtcgccgcatatcgataagaagtccagggaacagttctcgatgcatgtcaagaaacagtttgtggaactgacagccaaaccgcacgagctccacaagaagttcttctggctaaaacgcctgcgcatacctggggcccagtacgaggtacagatttctttcaagacacgcctggatatggcgagcctaaggtcccaggctccttgatggctcacgatgatcgttcttatcgtcccgcgaaagtttgaagtgctgagactggtactcagaacttgtatccatcaacatttcatatgaagacatgcttattttgatgactttcgaaaaatgtagctgctaactatttccagtgcagttttgagtgcttatggcttgattcacacaaatgtagctgctacgttcagaaataaaaaaattatggaaatacagcatgatatcgcttgattc

SEQ ID NO: 18389 - protein, 138 aa, Zea mays subsp. mays
  peptide (1)..(138): Ceres Seq. ID no. 12435264
PTPTPTSPAACSLLSALHPGPSATGAQPYPSTVLAAGARRLDPSPSPAPRRLHRLESRASDATPPPPPGIEDRRRRRPPSPACCLDSTVSGYLQTVTKVLPCLLWSHGCKDTRGDEVFYEPKQPGRRASAIHKEGRTT

SEQ ID NO: 18390 - protein, 114 aa, Zea mays subsp. mays
  peptide (1)..(114): Ceres Seq. ID no. 12435265
THPHTHEPGGVLSAVCSAPRTFGHRSSALSLDGARGRRAAARPFPISSSTPSPPPGIQGLRRHPTSTAWNRGPSAPPTSVPCLLPRLNCVRVFANSDKGSALLAVEPWLQRYAW

SEQ ID NO: 18391 - protein, 109 aa, Zea mays subsp. mays
  peptide (1)..(109): Ceres Seq. ID no. 12435266
  misc_feature (4)..(93): Pfam Name: Ribosomal protein S10p/S20e Pfam Description: Ribosomal protein S10p/S20e
  misc_feature (1)..(105): Homolog of NCBI NO: 11177522 NR Description: ribosomal protein S10 [Oxalis regnellii]
  misc_feature (1)..(105): Homolog of NCBI NO: 1710792 NR Description: MITOCHONDRIAL RIBOSOMAL PROTEIN S10
  misc_feature (1)..(105): Homolog of NCBI NO: 1362069 NR Description: ribosomal protein S10 - garden pea mitochondrion
  misc_feature (1)..(105): Homolog of NCBI NO: 2119076 NR Description: ribosomal protein S10 - potato mitochondrion
  misc_feature (4)..(104): Homolog of NCBI NO: 2119078 NR Description: ribosomal protein S10 precursor - Arabidopsis
  misc_feature (1)..(105): Homolog of NCBI NO: 2673855 NR Description: ribosomal protein S10 [Pisum sativum]
  misc_feature (1)..(106): Homolog of NCBI NO: 9229953 NR Description: mitochondrial ribosomal protein S10
  misc_feature (1)..(106): Homolog of NCBI NO: 9229951 NR Description: mitochondrial ribosomal protein S10
  misc_feature (1)..(109): Homolog of NCBI NO: 11528351 NR Description: ribosomal protein S10 [Zea mays]
  misc_feature (1)..(109): Homolog of NCBI NO: 11177526 NR Description: ribosomal protein S10 [Zea mays]
MAAKIRVVMKSFMSQSNQVAGLLPFTKKVGLPESRALYTVLRSPHIDKKSREQFSMHVKKQFVELTAKPHELHKKFFWLKRLRIPGAQYEVQISFKTRLDMASLRSQAP

SEQ ID NO: 18392 - DNA, 2169 bp, Zea mays subsp. mays
  misc_feature (1)..(2169): Ceres Seq. ID no. 12361134
  misc_feature: MA Experiment ID: 108504 Result: Down-regulated in Transcription
  misc_feature: MA Experiment 108504 PARAMETER Experiment Name: Zm_Drought_P Parameter: Age (day) Value: 8
  misc_feature: MA Experiment 108504 PARAMETER Experiment Name: Zm_Drought_P Parameter: Organism Value: Zea mays
  misc_feature: MA Experiment 108504 PARAMETER Experiment Name: Zm_Drought_P Parameter: Plant Line Value: 35A19
  misc_feature: MA Experiment 108504 PARAMETER Experiment Name: Zm_Drought_P Parameter: Timepoint (hr) Value: 12
  misc_feature: MA Experiment 108504 PARAMETER Experiment Name: Zm_Drought_P Parameter: Tissue Value: Aerial
  misc_feature: MA Experiment 108504 PARAMETER Experiment Name: Zm_Drought_P Parameter: Treatment Value: Drought vs. No Drought
  misc_feature: MA Experiment ID: 108523 Result: Down-regulated in Transcription
  misc_feature: MA Experiment 108523 PARAMETER Experiment Name: Zm_42deg_Heat_P Parameter: Age (day) Value: 8
  misc_feature: MA Experiment 108523 PARAMETER Experiment Name: Zm_42deg_Heat_P Parameter: Organism Value: Zea mays
  misc_feature: MA Experiment 108523 PARAMETER Experiment Name: Zm_42deg_Heat_P Parameter: Plant Line Value: 35A19
  misc_feature: MA Experiment 108523 PARAMETER Experiment Name: Zm_42deg_Heat_P Parameter: Temperature (deg C) Value: 42 vs. 22
  misc_feature: MA Experiment 108523 PARAMETER Experiment Name: Zm_42deg_Heat_P Parameter: Timepoint (hr) Value: 6
  misc_feature: MA Experiment 108523 PARAMETER Experiment Name: Zm_42deg_Heat_P Parameter: Tissue Value: Aerial
  misc_feature: MA Experiment ID: 108535 Result: Up-regulated in Transcription
  misc_feature: MA Experiment 108535 PARAMETER Experiment Name: Zm_Meristem_P Parameter: Age (day) Value: 8
  misc_feature: MA Experiment 108535 PARAMETER Experiment Name: Zm_Meristem_P Parameter: Organism Value: Zea mays
  misc_feature: MA Experiment 108535 PARAMETER Experiment Name: Zm_Meristem_P Parameter: Plant Line Value: 35A19
  misc_feature: MA Experiment 108535 PARAMETER Experiment Name: Zm_Meristem_P Parameter: Tissue Value: Root Meristem vs. Above Root Meristem
  misc_feature: MA Experiment ID: 108544 Result: Down-regulated in Transcription
  misc_feature: MA Experiment ID: 108556 Result: Down-regulated in Transcription
  misc_feature: MA Experiment 108556 PARAMETER Experiment Name: Zm_Drought_P Parameter: Age (day) Value: 9
  misc_feature: MA Experiment 108556 PARAMETER Experiment Name: Zm_Drought_P Parameter: Organism Value: Zea mays
  misc_feature: MA Experiment 108556 PARAMETER Experiment Name: Zm_Drought_P Parameter: Plant Line Value: 35A19
  misc_feature: MA Experiment 108556 PARAMETER Experiment Name: Zm_Drought_P Parameter: Timepoint (hr) Value: 24
  misc_feature: MA Experiment 108556 PARAMETER Experiment Name: Zm_Drought_P Parameter: Tissue Value: Aerial
  misc_feature: MA Experiment 108556 PARAMETER Experiment Name: Zm_Drought_P Parameter: Treatment Value: Drought vs. No Drought
  misc_feature: MA Experiment ID: 108597 Result: Down-regulated in Transcription
  misc_feature: MA Experiment 108597 PARAMETER Experiment Name: Zm_100uM_ABA_P Parameter: Age (day) Value: 9
  misc_feature: MA Experiment 108597 PARAMETER Experiment Name: Zm_100uM_ABA_P Parameter: Organism Value: Zea mays
  misc_feature: MA Experiment 108597 PARAMETER Experiment Name: Zm_100uM_ABA_P Parameter: Plant Line Value: 35A19
  misc_feature: MA Experiment 108597 PARAMETER Experiment Name: Zm_100uM_ABA_P Parameter: Timepoint (hr) Value: 24
  misc_feature: MA Experiment 108597 PARAMETER Experiment Name: Zm_100uM_ABA_P Parameter: Tissue Value: Aerial
  misc_feature: MA Experiment 108597 PARAMETER Experiment Name: Zm_100uM_ABA_P Parameter: Treatment Value: 100uM ABA vs. No Treatment
  misc_feature: MA Experiment ID: 108687 Result: Down-regulated in Transcription
  misc_feature: MA Experiment 108687 PARAMETER Experiment Name: Zm_Embryos-Flowers__P Parameter: Tissue Value: Embryo vs. Aerial+
  misc_feature: MA Experiment ID: 108689 Result: Down-regulated in Transcription
  misc_feature: MA Experiment 108689 PARAMETER Experiment Name: Zm_Drought_Roots_P Parameter: Age (day) Value: 9
  misc_feature: MA Experiment 108689 PARAMETER Experiment Name: Zm_Drought_Roots_P Parameter: Organism Value: Zea mays
  misc_feature: MA Experiment 108689 PARAMETER Experiment Name: Zm_Drought_Roots_P Parameter: Plant Line Value: 35A19
  misc_feature: MA Experiment 108689 PARAMETER Experiment Name: Zm_Drought_Roots_P Parameter: Timepoint (hr) Value: 24
  misc_feature: MA Experiment 108689 PARAMETER Experiment Name: Zm_Drought_Roots_P Parameter: Tissue Value: Roots
  misc_feature: MA Experiment 108689 PARAMETER Experiment Name: Zm_Drought_Roots_P Parameter: Treatment Value: Drought vs. No Drought
  misc_feature: MA Experiment ID: 20000480 Result: Down-regulated in Transcription
  misc_feature: MA Experiment 20000480 PARAMETER Experiment Name: Zm_Drought_P Parameter: Age (day) Value: 11
  misc_feature: MA Experiment 20000480 PARAMETER Experiment Name: Zm_Drought_P Parameter: Organism Value: Zea mays
  misc_feature: MA Experiment 20000480 PARAMETER Experiment Name: Zm_Drought_P Parameter: Plant Line Value: 35A19
  misc_feature: MA Experiment 20000480 PARAMETER Experiment Name: Zm_Drought_P Parameter: Timepoint (hr) Value: 72
  misc_feature: MA Experiment 20000480 PARAMETER Experiment Name: Zm_Drought_P Parameter: Tissue Value: Aerial
  misc_feature: MA Experiment 20000480 PARAMETER Experiment Name: Zm_Drought_P Parameter: Treatment Value: Drought vs. No Drought
  misc_feature: MA Experiment ID: 20000487 Result: Down-regulated in Transcription
  misc_feature: MA Experiment 20000487 PARAMETER Experiment Name: Zm_50mM_NH4NO3_L_to_H_P Parameter: Organism Value: Zea mays
  misc_feature: MA Experiment 20000487 PARAMETER Experiment Name: Zm_50mM_NH4NO3_L_to_H_P Parameter: Timepoint (hr) Value: 4
  misc_feature: MA Experiment 20000487 PARAMETER Experiment Name: Zm_50mM_NH4NO3_L_to_H_P Parameter: Tissue Value: Leaves
  misc_feature: MA Experiment 20000487 PARAMETER Experiment Name: Zm_50mM_NH4NO3_L_to_H_P Parameter: Treatment Value: 50mM NH4NO3 vs. 100mM Mannitol
  misc_feature: MA Experiment ID: 20000492 Result: Up-regulated in Transcription
  misc_feature: MA Experiment 20000492 PARAMETER Experiment Name: Zm_Hybrid_Seed_Dev_P Parameter: DAP Value: 12
  misc_feature: MA Experiment 20000492 PARAMETER Experiment Name: Zm_Hybrid_Seed_Dev_P Parameter: Organism Value: Zea mays
  misc_feature: MA Experiment 20000492 PARAMETER Experiment Name: Zm_Hybrid_Seed_Dev_P Parameter: Plant Line Value: 35A19
  misc_feature: MA Experiment 20000492 PARAMETER Experiment Name: Zm_Hybrid_Seed_Dev_P Parameter: Tissue Value: Fert Kernel vs. Unfert Floret
  misc_feature: MA Experiment ID: 20000533 Result: Down-regulated in Transcription
  misc_feature: MA Experiment 20000533 PARAMETER Experiment Name: Zm_0.001percent_MeJA_P Parameter: Age (day) Value: 11
  misc_feature: MA Experiment 20000533 PARAMETER Experiment Name: Zm_0.001percent_MeJA_P Parameter: Organism Value: Zea mays
  misc_feature: MA Experiment 20000533 PARAMETER Experiment Name: Zm_0.001percent_MeJA_P Parameter: Plant Line Value: 35A19
  misc_feature: MA Experiment 20000533 PARAMETER Experiment Name: Zm_0.001percent_MeJA_P Parameter: Timepoint (hr) Value: 72
  misc_feature: MA Experiment 20000533 PARAMETER Experiment Name: Zm_0.001percent_MeJA_P Parameter: Tissue Value: Aerial
  misc_feature: MA Experiment 20000533 PARAMETER Experiment Name: Zm_0.001percent_MeJA_P Parameter: Treatment Value: 0.001percent MeJA vs. No Treatment
  misc_feature: MA Experiment ID: 20000535 Result: Up-regulated in Transcription
  misc_feature: MA Experiment 20000535 PARAMETER Experiment Name: Zm_Hybrid_Seed_Dev_P Parameter: DAP Value: 30 vs. 12
  misc_feature: MA Experiment 20000535 PARAMETER Experiment Name: Zm_Hybrid_Seed_Dev_P Parameter: Organism Value: Zea mays
  misc_feature: MA Experiment 20000535 PARAMETER Experiment Name: Zm_Hybrid_Seed_Dev_P Parameter: Plant Line Value: 35A19
  misc_feature: MA Experiment 20000535 PARAMETER Experiment Name: Zm_Hybrid_Seed_Dev_P Parameter: Tissue Value: Embryo vs. Unfert Floret
  misc_feature: MA Experiment ID: 20000626 Result: Down-regulated in Transcription
  misc_feature: MA Experiment 20000626 PARAMETER Experiment Name: Zm_Herbicide-Treatments_P Parameter: Timepoint (hr) Value: 12
  misc_feature: MA Experiment 20000626 PARAMETER Experiment Name: Zm_Herbicide-Treatments_P Parameter: Tissue Value: Aerial
  misc_feature: MA Experiment 20000626 PARAMETER Experiment Name: Zm_Herbicide-Treatments_P Parameter: Treatment Value: Roundup vs. No Treatment
  misc_feature: MA Experiment ID: 20000632 Result: Down-regulated in Transcription
  misc_feature: MA Experiment 20000632 PARAMETER Experiment Name: Zm_Herbicide-Treatments_P Parameter: Timepoint (hr) Value: 4
  misc_feature: MA Experiment 20000632 PARAMETER Experiment Name: Zm_Herbicide-Treatments_P Parameter: Tissue Value: Aerial
  misc_feature: MA Experiment 20000632 PARAMETER Experiment Name: Zm_Herbicide-Treatments_P Parameter: Treatment Value: Glean vs. No Treatment
  misc_feature: MA Experiment ID: 20001614 Result: Up-regulated in Transcription
  misc_feature: MA Experiment 20001614 PARAMETER Experiment Name: Zm_50ppm_KNO3_L-to-H_P Parameter: Age (day) Value: 21
  misc_feature: MA Experiment 20001614 PARAMETER Experiment Name: Zm_50ppm_KNO3_L-to-H_P Parameter: Organism Value: Zea mays
  misc_feature: MA Experiment 20001614 PARAMETER Experiment Name: Zm_50ppm_KNO3_L-to-H_P Parameter: Plant Line Value: 35A19
  misc_feature: MA Experiment 20001614 PARAMETER Experiment Name: Zm_50ppm_KNO3_L-to-H_P Parameter: Timepoint (hr) Value: 48
  misc_feature: MA Experiment 20001614 PARAMETER Experiment Name: Zm_50ppm_KNO3_L-to-H_P Parameter: Tissue Value: Roots
  misc_feature: MA Experiment 20001614 PARAMETER Experiment Name: Zm_50ppm_KNO3_L-to-H_P Parameter: Treatment Value: 50ppm KNO3 vs. 50ppm KCl
gcacgagaccattacctagaacatcctaatcgaaaaagctcgacgcatcttcgccgccgctcaaccttccccccacgccccaacctatccactcgaaaccttctttcccccgggagacgattcgtcagggagaggaaagaggcaagaggggccatggacgctgccaagttggtgacgccgatcgctgtgtctcacattctggcgcacccgtcggcgggctccgacggcgcagtgaccgatctcgtcgttcaggtcctcgacctgaagtccgtcggcacgggcagccggttcagtttcacagcaactgacgggaaggataagatcaaggcgatgcttcccaccaacttcgggtcggaggtccgctctggcaacctgaagaacctcggcctcatccgcatcatcgactacacttgcaacgtcgtcaaaggcaaagatgacaaagtcttggttgtcatcaaatgcgagcttgtgtgccaagcgcttgacgccgagatcaacggcgaggccaaaaaagaggagcctccaattgtgctgaagcctaaggacgaatgcgtgggcgtgactcccccactcgctatgaagcccaagcaggaggtgaagtctgcgtcccagatcgtgaatgagcagcgtggaaatactgctcctgtcaagcccctttccatgacaaagagggtccatcctttgatcactctgaacccctaccagggtaactgggtcattaaggtgcgggtcacgagcaaaggcaacctgagaacctacaggaatgctcgcggagaaggctgtgtcttcaatgtagagctcaccgatgaggatggcacccagatccaagccaccatgtttaatgacgctgcaaagaagttctatccgatttttgagctgggaaatgtctattatgtctcaaaaggatctcttagaattgccaacaagcagttcaagactgtccaaaatgactacgagatgtcactaaacgagaatgctattgttgaagaagcagagggggagacttgcattccgcaagtgcaatacaaccttgtcaagattgatcagctaggatcatatgtcggtggcagggagcttgtagatattgttggtgtggttcagagcgtatctcccacactcagtgtcaggagaaagattgacaacgagacaataccgaagcgtgacattgttgtggcggatgactctggcaaaactgttagtatctctctttggaatgatcttgctactacgactgggcaagagcttttggacatggctgacagttcgcctgttgttgcgataaagagcctaaaagtgtctgactttcaaggcgtgtctctttctactgtaggcaaaagtactcttgcgattaatcctgatctacacgaggctcagaatctcaagtcatggtatgactctgaaggcaaagatacttcgctggcaccaattggtgcagaaatgggtgccgcacgggccggtggcttcaagtccacgtattctgatagagtttttctgtctcacattactagtgatcctgccatgggccaggaaaagcctgttttctttagtttgtatgccaccataagccacatcaagcctgaccagaacatgtggtaccgtgcttgcaagacctgcaacaagaaggtgactgaaacttttggatctggatactggtgcgagggatgccaaaagaatgactcggaatgctcactgagatacatcatggtcgtcaaggtctccgatcctactggcgaggcatgggtctctgtgttcaacgagcatgcagagaagatcattggctgcagcgccgacgagcttgatcggatcaggaaagaggagggggacgacagttatgctctgaagctcaaggaagccacctgggttcctcacctgttccgcgtcagcgtcacacagcatgaatacaataacgagaaaaggcagagaatcactgtgaggagtgaagcgccggtcgagcacgcagctgaatccaagtacctgcttgaacagatagcgaagcttactgcttgctagtagaagatgcaacctttctggtggttcgttaagggctgccctccgagatgttccctctgggttttagcacttctgtaagatatatgtagaggtttggttaccttgatgtcaagcaacagatgctaggacagttcaagcatgatgcatgaagcgtttgcc

SEQ ID NO: 18393 - protein, 669 aa, Zea mays subsp. mays
  peptide (1)..(669): Ceres Seq. ID no. 12361135
  misc_feature (238)..(322): Pfam Name: OB-fold nucleic acid binding domain Pfam Description: OB-fold nucleic acid binding domain
  misc_feature (82)..(666): Homolog of NCBI NO: 7488291 NR Description: replication protein A1 homolog T18B16.100 -
  misc_feature (81)..(663): Homolog of NCBI NO: 32404590 NR Description: hypothetical protein [Neurospora crassa]
  misc_feature (79)..(159): Homolog of NCBI NO: 15242405 NR Description: replication protein A1-like; protein id:
  misc_feature (212)..(666): Homolog of NCBI NO: 15242405 NR Description: replication protein A1-like; protein id:
  misc_feature (75)..(159): Homolog of NCBI NO: 15225129 NR Description: putative replication protein A1; protein id:
  misc_feature (212)..(665): Homolog of NCBI NO: 15225129 NR Description: putative replication protein A1; protein id:
  misc_feature (58)..(664): Homolog of NCBI NO: 15239494 NR Description: RNA helicase; protein id: At5g61000.1
  misc_feature (58)..(665): Homolog of NCBI NO: 15241489 NR Description: replication factor A - like protein; protein id:
  misc_feature (53)..(669): Homolog of NCBI NO: 31580977 NR Description: replication protein A 70b [Oryza sativa (japonica
  misc_feature (53)..(669): Homolog of NCBI NO: 7440032 NR Description: probable replication protein A1 - rice
ARDHYLEHPNRKSSTHLRRRSTFPPRPNLSTRNLLSPGRRFVRERKEARGAMDAAKLVTPIAVSHILAHPSAGSDGAVTDLVVQVLDLKSVGTGSRFSFTATDGKDKIKAMLPTNFGSEVRSGNLKNLGLIRIIDYTCNVVKGKDDKVLVVIKCELVCQALDAEINGEAKKEEPPIVLKPKDECVGVTPPLAMKPKQEVKSASQIVNEQRGNTAPVKPLSMTKRVHPLITLNPYQGNWVIKVRVTSKGNLRTYRNARGEGCVFNVELTDEDGTQIQATMFNDAAKKFYPIFELGNVYYVSKGSLRIANKQFKTVQNDYEMSLNENAIVEEAEGETCIPQVQYNLVKIDQLGSYVGGRELVDIVGVVQSVSPTLSVRRKIDNETIPKRDIVVADDSGKTVSISLWNDLATTTGQELLDMADSSPVVAIKSLKVSDFQGVSLSTVGKSTLAINPDLHEAQNLKSWYDSEGKDTSLAPIGAEMGAARAGGFKSTYSDRVFLSHITSDPAMGQEKPVFFSLYATISHIKPDQNMWYRACKTCNKKVTETFGSGYWCEGCQKNDSECSLRYIMVVKVSDPTGEAWVSVFNEHAEKIIGCSADELDRIRKEEGDDSYALKLKEATWVPHLFRVSVTQHEYNNEKRQRITVRSEAPVEHAAESKYLLEQIAKLTAC

SEQ ID NO: 18394 - protein, 618 aa, Zea mays subsp. mays
  peptide (1)..(618): Ceres Seq. ID no. 12361136
  misc_feature (187)..(271): Pfam Name: OB-fold nucleic acid binding domain Pfam Description: OB-fold nucleic acid binding domain
  misc_feature (31)..(615): Homolog of NCBI NO: 7488291 NR Description: replication protein A1 homolog T18B16.100 -
  misc_feature (30)..(612): Homolog of NCBI NO: 32404590 NR Description: hypothetical protein [Neurospora crassa]
  misc_feature (28)..(108): Homolog of NCBI NO: 15242405 NR Description: replication protein A1-like; protein id:
  misc_feature (161)..(615): Homolog of NCBI NO: 15242405 NR Description: replication protein A1-like; protein id:
  misc_feature (24)..(108): Homolog of NCBI NO: 15225129 NR Description: putative replication protein A1; protein id:
  misc_feature (161)..(614): Homolog of NCBI NO: 15225129 NR Description: putative replication protein A1; protein id:
  misc_feature (7)..(613): Homolog of NCBI NO: 15239494 NR Description: RNA helicase; protein id: At5g61000.1
  misc_feature (7)..(614): Homolog of NCBI NO: 15241489 NR Description: replication factor A - like protein; protein id:
  misc_feature (2)..(618): Homolog of NCBI NO: 31580977 NR Description: replication protein A 70b [Oryza sativa (japonica
  misc_feature (2)..(618): Homolog of NCBI NO: 7440032 NR Description: probable replication protein A1 - rice
MDAAKLVTPIAVSHILAHPSAGSDGAVTDLVVQVLDLKSVGTGSRFSFTATDGKDKIKAMLPTNFGSEVRSGNLKNLGLIRIIDYTCNVVKGKDDKVLVVIKCELVCQALDAEINGEAKKEEPPIVLKPKDECVGVTPPLAMKPKQEVKSASQIVNEQRGNTAPVKPLSMTKRVHPLITLNPYQGNWVIKVRVTSKGNLRTYRNARGEGCVFNVELTDEDGTQIQATMFNDAAKKFYPIFELGNVYYVSKGSLRIANKQFKTVQNDYEMSLNENAIVEEAEGETCIPQVQYNLVKIDQLGSYVGGRELVDIVGVVQSVSPTLSVRRKIDNETIPKRDIVVADDSGKTVSISLWNDLATTTGQELLDMADSSPVVAIKSLKVSDFQGVSLSTVGKSTLAINPDLHEAQNLKSWYDSEGKDTSLAPIGAEMGAARAGGFKSTYSDRVFLSHITSDPAMGQEKPVFFSLYATISHIKPDQNMWYRACKTCNKKVTETFGSGYWCEGCQKNDSECSLRYIMVVKVSDPTGEAWVSVFNEHAEKIIGCSADELDRIRKEEGDDSYALKLKEATWVPHLFRVSVTQHEYNNEKRQRITVRSEAPVEHAAESKYLLEQIAKLTAC

SEQ ID NO: 18395 - protein, 559 aa, Zea mays subsp. mays
  peptide (1)..(559): Ceres Seq. ID no. 12361137
  misc_feature (128)..(212): Pfam Name: OB-fold nucleic acid binding domain Pfam Description: OB-fold nucleic acid binding domain
  misc_feature (1)..(556): Homolog of NCBI NO: 7488291 NR Description: replication protein A1 homolog T18B16.100 -
  misc_feature (1)..(553): Homolog of NCBI NO: 32404590 NR Description: hypothetical protein [Neurospora crassa]
  misc_feature (1)..(49): Homolog of NCBI NO: 15242405 NR Description: replication protein A1-like; protein id:
  misc_feature (102)..(556): Homolog of NCBI NO: 15242405 NR Description: replication protein A1-like; protein id:
  misc_feature (1)..(49): Homolog of NCBI NO: 15225129 NR Description: putative replication protein A1; protein id:
  misc_feature (102)..(555): Homolog of NCBI NO: 15225129 NR Description: putative replication protein A1; protein id:
  misc_feature (1)..(554): Homolog of NCBI NO: 15239494 NR Description: RNA helicase; protein id: At5g61000.1
  misc_feature (1)..(555): Homolog of NCBI NO: 15241489 NR Description: replication factor A - like protein; protein id:
  misc_feature (1)..(559): Homolog of NCBI NO: 31580977 NR Description: replication protein A 70b [Oryza sativa (japonica
  misc_feature (1)..(559): Homolog of NCBI NO: 7440032 NR Description: probable replication protein A1 - rice
MLPTNFGSEVRSGNLKNLGLIRIIDYTCNVVKGKDDKVLVVIKCELVCQALDAEINGEAKKEEPPIVLKPKDECVGVTPPLAMKPKQEVKSASQIVNEQRGNTAPVKPLSMTKRVHPLITLNPYQGNWVIKVRVTSKGNLRTYRNARGEGCVFNVELTDEDGTQIQATMFNDAAKKFYPIFELGNVYYVSKGSLRIANKQFKTVQNDYEMSLNENAIVEEAEGETCIPQVQYNLVKIDQLGSYVGGRELVDIVGVVQSVSPTLSVRRKIDNETIPKRDIVVADDSGKTVSISLWNDLATTTGQELLDMADSSPVVAIKSLKVSDFQGVSLSTVGKSTLAINPDLHEAQNLKSWYDSEGKDTSLAPIGAEMGAARAGGFKSTYSDRVFLSHITSDPAMGQEKPVFFSLYATISHIKPDQNMWYRACKTCNKKVTETFGSGYWCEGCQKNDSECSLRYIMVVKVSDPTGEAWVSVFNEHAEKIIGCSADELDRIRKEEGDDSYALKLKEATWVPHLFRVSVTQHEYNNEKRQRITVRSEAPVEHAAESKYLLEQIAKLTAC

SEQ ID NO: 18396 - DNA, 795 bp, Zea mays subsp. mays
  misc_feature (1)..(795): Ceres Seq. ID no. 12359553
  misc_feature: MA Experiment ID: 108528 Result: Up-regulated in Transcription
  misc_feature: MA Experiment 108528 PARAMETER Experiment Name: Zm_Imbibed_Seeds_P Parameter: Age (day) Value: 5 vs. 2
  misc_feature: MA Experiment 108528 PARAMETER Experiment Name: Zm_Imbibed_Seeds_P Parameter: Organism Value: Zea mays
  misc_feature: MA Experiment 108528 PARAMETER Experiment Name: Zm_Imbibed_Seeds_P Parameter: Plant Line Value: 35A19
  misc_feature: MA Experiment 108528 PARAMETER Experiment Name: Zm_Imbibed_Seeds_P Parameter: Tissue Value: Aerial vs. Embryo
  misc_feature: MA Experiment ID: 108530 Result: Up-regulated in Transcription
  misc_feature: MA Experiment 108530 PARAMETER Experiment Name: Zm_Imbibed_Seeds_P Parameter: Age (day) Value: 6 vs. 2
  misc_feature: MA Experiment 108530 PARAMETER Experiment Name: Zm_Imbibed_Seeds_P Parameter: Organism Value: Zea mays
  misc_feature: MA Experiment 108530 PARAMETER Experiment Name: Zm_Imbibed_Seeds_P Parameter: Plant Line Value: 35A19
  misc_feature: MA Experiment 108530 PARAMETER Experiment Name: Zm_Imbibed_Seeds_P Parameter: Tissue Value: Aerial vs. Embryo
  misc_feature: MA Experiment ID: 108536 Result: Down-regulated in Transcription
  misc_feature: MA Experiment 108536 PARAMETER Experiment Name: Zm_Meristem_P Parameter: Age (day) Value: 8
  misc_feature: MA Experiment 108536 PARAMETER Experiment Name: Zm_Meristem_P Parameter: Organism Value: Zea mays
  misc_feature: MA Experiment 108536 PARAMETER Experiment Name: Zm_Meristem_P Parameter: Plant Line Value: 35A19
  misc_feature: MA Experiment 108536 PARAMETER Experiment Name: Zm_Meristem_P Parameter: Tissue Value: Shoot Meristem vs. Above Shoot Meristem
  misc_feature: MA Experiment ID: 108544 Result: Up-regulated in Transcription
  misc_feature: MA Experiment ID: 108545 Result: Up-regulated in Transcription
  misc_feature: MA Experiment 108545 PARAMETER Experiment Name: Zm_Imbibed_Seeds_P Parameter: Age (day) Value: 3 vs. 2
  misc_feature: MA Experiment 108545 PARAMETER Experiment Name: Zm_Imbibed_Seeds_P Parameter: Organism Value: Zea mays
  misc_feature: MA Experiment 108545 PARAMETER Experiment Name: Zm_Imbibed_Seeds_P Parameter: Plant Line Value: 35A19
  misc_feature: MA Experiment 108545 PARAMETER Experiment Name: Zm_Imbibed_Seeds_P Parameter: Tissue Value: Aerial vs. Embryo
  misc_feature: MA Experiment ID: 108556 Result: Up-regulated in Transcription
  misc_feature: MA Experiment 108556 PARAMETER Experiment Name: Zm_Drought_P Parameter: Age (day) Value: 9
  misc_feature: MA Experiment 108556 PARAMETER Experiment Name: Zm_Drought_P Parameter: Organism Value: Zea mays
  misc_feature: MA Experiment 108556 PARAMETER Experiment Name: Zm_Drought_P Parameter: Plant Line Value: 35A19
  misc_feature: MA Experiment 108556 PARAMETER Experiment Name: Zm_Drought_P Parameter: Timepoint (hr) Value: 24
  misc_feature: MA Experiment 108556 PARAMETER Experiment Name: Zm_Drought_P Parameter: Tissue Value: Aerial
  misc_feature: MA Experiment 108556 PARAMETER Experiment Name: Zm_Drought_P Parameter: Treatment Value: Drought vs. No Drought
  misc_feature: MA Experiment ID: 108689 Result: Up-regulated in Transcription
  misc_feature: MA Experiment 108689 PARAMETER Experiment Name: Zm_Drought_Roots_P Parameter: Age (day) Value: 9
  misc_feature: MA Experiment 108689 PARAMETER Experiment Name: Zm_Drought_Roots_P Parameter: Organism Value: Zea mays
  misc_feature: MA Experiment 108689 PARAMETER Experiment Name: Zm_Drought_Roots_P Parameter: Plant Line Value: 35A19
  misc_feature: MA Experiment 108689 PARAMETER Experiment Name: Zm_Drought_Roots_P Parameter: Timepoint (hr) Value: 24
  misc_feature: MA Experiment 108689 PARAMETER Experiment Name: Zm_Drought_Roots_P Parameter: Tissue Value: Roots
  misc_feature: MA Experiment 108689 PARAMETER Experiment Name: Zm_Drought_Roots_P Parameter: Treatment Value: Drought vs. No Drought
  misc_feature: MA Experiment ID: 20000480 Result: Up-regulated in Transcription
  misc_feature: MA Experiment 20000480 PARAMETER Experiment Name: Zm_Drought_P Parameter: Age (day) Value: 11
  misc_feature: MA Experiment 20000480 PARAMETER Experiment Name: Zm_Drought_P Parameter: Organism Value: Zea mays
  misc_feature: MA Experiment 20000480 PARAMETER Experiment Name: Zm_Drought_P Parameter: Plant Line Value: 35A19
  misc_feature: MA Experiment 20000480 PARAMETER Experiment Name: Zm_Drought_P Parameter: Timepoint (hr) Value: 72
  misc_feature: MA Experiment 20000480 PARAMETER Experiment Name: Zm_Drought_P Parameter: Tissue Value: Aerial
  misc_feature: MA Experiment 20000480 PARAMETER Experiment Name: Zm_Drought_P Parameter: Treatment Value: Drought vs. No Drought
  misc_feature: MA Experiment ID: 20000535 Result: Up-regulated in Transcription
  misc_feature: MA Experiment 20000535 PARAMETER Experiment Name: Zm_Hybrid_Seed_Dev_P Parameter: DAP Value: 30 vs. 12
  misc_feature: MA Experiment 20000535 PARAMETER Experiment Name: Zm_Hybrid_Seed_Dev_P Parameter: Organism Value: Zea mays
  misc_feature: MA Experiment 20000535 PARAMETER Experiment Name: Zm_Hybrid_Seed_Dev_P Parameter: Plant Line Value: 35A19
  misc_feature: MA Experiment 20000535 PARAMETER Experiment Name: Zm_Hybrid_Seed_Dev_P Parameter: Tissue Value: Embryo vs. Unfert Floret
acgcgctcttcggcggcaactactgttggatcgtagggcgaaggaaggaaggaaggggagccatgggaaacgcgtcgtccatgctgacccagtacgacatcgaggaggtgcaggagcactgcagctacctcttctcgcagcaggagatcgtgtcgctgtacgagcgcttctgccagttggaccgcagcgccaagggcttcatctccgaggacgagttcctctccatccccgagttctccctcaacccgctctccaagaggttgctccgtatggttgatggattgaacttcaaggattttgttgcgtttctttctaccttcagtgcaaaggccagccttcgtcagaagatcgagtttatattcaaggtttatgacatcgatggcaagggaaaaattaccttcaaggatctgctagaggttttacgggacctaacagggtcattcatgtccgaggaacaaagagagcaagtggtaactgaagttctggaagaagcagggtacacgagggattacgcattctcgcttgaagattttatccagatcatcgaccatcctggccttaagatggaggtggaagtgccaatcgactagtgaaatgtggaaaacaagcttccggttttgtctgcagaacatggttagtgtcatgtagcagggcaatgaccgttcactttcgtcatcttatttgtttccggtccacttgcctaaacttttgtaatctttgttggcttggccttttcgaatatatccaaaacaaaaaaaaatgtcctgcgatgagattttcgtcggttctatgctg

SEQ ID NO: 18397 - protein, 195 aa, Zea mays subsp. mays
  peptide (1)..(195): Ceres Seq. ID no. 12359554
  misc_feature (51)..(79): Pfam Name: EF hand Pfam Description: EF hand
  misc_feature (94)..(192): Homolog of NCBI NO: 39593284 NR Description: Hypothetical protein CBG09544 [Caenorhabditis
  misc_feature (21)..(106): Homolog of NCBI NO: 17566934 NR Description: Calcium binding protein P22 like family member,
  misc_feature (94)..(192): Homolog of NCBI NO: 17566934 NR Description: Calcium binding protein P22 like family member,
  misc_feature (21)..(183): Homolog of NCBI NO: 2645886 NR Description: calcineurin subunit B [Neurospora crassa]
  misc_feature (44)..(190): Homolog of NCBI NO: 3929338 NR Description: Calcineurin B subunit (Protein phosphatase 2B
  misc_feature (21)..(192): Homolog of NCBI NO: 13445166 NR Description: calcineurin B [Dictyostelium discoideum]
  misc_feature (21)..(192): Homolog of NCBI NO: 1168750 NR Description: Calcineurin B subunit (Protein phosphatase 2B
  misc_feature (21)..(195): Homolog of NCBI NO: 21592761 NR Description: calcineurin-like protein [Arabidopsis thaliana]
  misc_feature (21)..(195): Homolog of NCBI NO: 18401887 NR Description: expressed protein
  misc_feature (21)..(195): Homolog of NCBI NO: 16550928 NR Description: calcineurin-like protein [Eucalyptus grandis]
ALFGGNYCWIVGRRKEGRGAMGNASSMLTQYDIEEVQEHCSYLFSQQEIVSLYERFCQLDRSAKGFISEDEFLSIPEFSLNPLSKRLLRMVDGLNFKDFVAFLSTFSAKASLRQKIEFIFKVYDIDGKGKITFKDLLEVLRDLTGSFMSEEQREQVVTEVLEEAGYTRDYAFSLEDFIQIIDHPGLKMEVEVPID

SEQ ID NO: 18398 - protein, 175 aa, Zea mays subsp. mays
  peptide (1)..(175): Ceres Seq. ID no. 12359555
  misc_feature (31)..(59): Pfam Name: EF hand Pfam Description: EF hand
  misc_feature (74)..(172): Homolog of NCBI NO: 39593284 NR Description: Hypothetical protein CBG09544 [Caenorhabditis
  misc_feature (1)..(86): Homolog of NCBI NO: 17566934 NR Description: Calcium binding protein P22 like family member,
  misc_feature (74)..(172): Homolog of NCBI NO: 17566934 NR Description: Calcium binding protein P22 like family member,
  misc_feature (1)..(163): Homolog of NCBI NO: 2645886 NR Description: calcineurin subunit B [Neurospora crassa]
  misc_feature (24)..(170): Homolog of NCBI NO: 3929338 NR Description: Calcineurin B subunit (Protein phosphatase 2B
  misc_feature (1)..(172): Homolog of NCBI NO: 13445166 NR Description: calcineurin B [Dictyostelium discoideum]
  misc_feature (1)..(172): Homolog of NCBI NO: 1168750 NR Description: Calcineurin B subunit (Protein phosphatase 2B
  misc_feature (1)..(175): Homolog of NCBI NO: 21592761 NR Description: calcineurin-like protein [Arabidopsis thaliana]
  misc_feature (1)..(175): Homolog of NCBI NO: 18401887 NR Description: expressed protein
  misc_feature (1)..(175): Homolog of NCBI NO: 16550928 NR Description: calcineurin-like protein [Eucalyptus grandis]
MGNASSMLTQYDIEEVQEHCSYLFSQQEIVSLYERFCQLDRSAKGFISEDEFLSIPEFSLNPLSKRLLRMVDGLNFKDFVAFLSTFSAKASLRQKIEFIFKVYDIDGKGKITFKDLLEVLRDLTGSFMSEEQREQVVTEVLEEAGYTRDYAFSLEDFIQIIDHPGLKMEVEVPID

SEQ ID NO: 18399 - protein, 169 aa, Zea mays subsp. mays
  peptide (1)..(169): Ceres Seq. ID no. 12359556
  misc_feature (25)..(53): Pfam Name: EF hand Pfam Description: EF hand
  misc_feature (68)..(166): Homolog of NCBI NO: 39593284 NR Description: Hypothetical protein CBG09544 [Caenorhabditis
  misc_feature (1)..(80): Homolog of NCBI NO: 17566934 NR Description: Calcium binding protein P22 like family member,
  misc_feature (68)..(166): Homolog of NCBI NO: 17566934 NR Description: Calcium binding protein P22 like family member,
  misc_feature (1)..(157): Homolog of NCBI NO: 2645886 NR Description: calcineurin subunit B [Neurospora crassa]
  misc_feature (18)..(164): Homolog of NCBI NO: 3929338 NR Description: Calcineurin B subunit (Protein phosphatase 2B
  misc_feature (1)..(166): Homolog of NCBI NO: 13445166 NR Description: calcineurin B [Dictyostelium discoideum]
  misc_feature (1)..(166): Homolog of NCBI NO: 1168750 NR Description: Calcineurin B subunit (Protein phosphatase 2B
  misc_feature (1)..(169): Homolog of NCBI NO: 21592761 NR Description: calcineurin-like protein [Arabidopsis thaliana]
  misc_feature (1)..(169): Homolog of NCBI NO: 18401887 NR Description: expressed protein
  misc_feature (1)..(169): Homolog of NCBI NO: 16550928 NR Description: calcineurin-like protein [Eucalyptus grandis]
MLTQYDIEEVQEHCSYLFSQQEIVSLYERFCQLDRSAKGFISEDEFLSIPEFSLNPLSKRLLRMVDGLNFKDFVAFLSTFSAKASLRQKIEFIFKVYDIDGKGKITFKDLLEVLRDLTGSFMSEEQREQVVTEVLEEAGYTRDYAFSLEDFIQIIDHPGLKMEVEVPID

SEQ ID NO: 18400 - DNA, 3056 bp, Zea mays subsp. mays
  misc_feature (1)..(3056): Ceres Seq. ID no. 12377950
  misc_feature: MA Experiment ID: 108504 Result: Down-regulated in Transcription
  misc_feature: MA Experiment 108504 PARAMETER Experiment Name: Zm_Drought_P Parameter: Age (day) Value: 8
  misc_feature: MA Experiment 108504 PARAMETER Experiment Name: Zm_Drought_P Parameter: Organism Value: Zea mays
  misc_feature: MA Experiment 108504 PARAMETER Experiment Name: Zm_Drought_P Parameter: Plant Line Value: 35A19
  misc_feature: MA Experiment 108504 PARAMETER Experiment Name: Zm_Drought_P Parameter: Timepoint (hr) Value: 12
  misc_feature: MA Experiment 108504 PARAMETER Experiment Name: Zm_Drought_P Parameter: Tissue Value: Aerial
  misc_feature: MA Experiment 108504 PARAMETER Experiment Name: Zm_Drought_P Parameter: Treatment Value: Drought vs. No Drought
  misc_feature: MA Experiment ID: 108535 Result: Up-regulated in Transcription
  misc_feature: MA Experiment 108535 PARAMETER Experiment Name: Zm_Meristem_P Parameter: Age (day) Value: 8
  misc_feature: MA Experiment 108535 PARAMETER Experiment Name: Zm_Meristem_P Parameter: Organism Value: Zea mays
  misc_feature: MA Experiment 108535 PARAMETER Experiment Name: Zm_Meristem_P Parameter: Plant Line Value: 35A19
  misc_feature: MA Experiment 108535 PARAMETER Experiment Name: Zm_Meristem_P Parameter: Tissue Value: Root Meristem vs. Above Root Meristem
  misc_feature: MA Experiment ID: 108544 Result: Down-regulated in Transcription
  misc_feature: MA Experiment ID: 108556 Result: Down-regulated in Transcription
  misc_feature: MA Experiment 108556 PARAMETER Experiment Name: Zm_Drought_P Parameter: Age (day) Value: 9
  misc_feature: MA Experiment 108556 PARAMETER Experiment Name: Zm_Drought_P Parameter: Organism Value: Zea mays
  misc_feature: MA Experiment 108556 PARAMETER Experiment Name: Zm_Drought_P Parameter: Plant Line Value: 35A19
  misc_feature: MA Experiment 108556 PARAMETER Experiment Name: Zm_Drought_P Parameter: Timepoint (hr) Value: 24
  misc_feature: MA Experiment 108556 PARAMETER Experiment Name: Zm_Drought_P Parameter: Tissue Value: Aerial
  misc_feature: MA Experiment 108556 PARAMETER Experiment Name: Zm_Drought_P Parameter: Treatment Value: Drought vs. No Drought
  misc_feature: MA Experiment ID: 20000477 Result: Down-regulated in Transcription
  misc_feature: MA Experiment 20000477 PARAMETER Experiment Name: Zm_5mM_SA_P Parameter: Age (day) Value: 10
  misc_feature: MA Experiment 20000477 PARAMETER Experiment Name: Zm_5mM_SA_P Parameter: Organism Value: Zea mays
  misc_feature: MA Experiment 20000477 PARAMETER Experiment Name: Zm_5mM_SA_P Parameter: Plant Line Value: 35A19
  misc_feature: MA Experiment 20000477 PARAMETER Experiment Name: Zm_5mM_SA_P Parameter: Timepoint (hr) Value: 48
  misc_feature: MA Experiment 20000477 PARAMETER Experiment Name: Zm_5mM_SA_P Parameter: Tissue Value: Aerial
  misc_feature: MA Experiment 20000477 PARAMETER Experiment Name: Zm_5mM_SA_P Parameter: Treatment Value: 5mM SA vs. No Treatment
  misc_feature: MA Experiment ID: 20000478 Result: Down-regulated in Transcription
  misc_feature: MA Experiment 20000478 PARAMETER Experiment Name: Zm_5mM_SA_P Parameter: Age (day) Value: 11
  misc_feature: MA Experiment 20000478 PARAMETER Experiment Name: Zm_5mM_SA_P Parameter: Organism Value: Zea mays
  misc_feature: MA Experiment 20000478 PARAMETER Experiment Name: Zm_5mM_SA_P Parameter: Plant Line Value: 35A19
  misc_feature: MA Experiment 20000478 PARAMETER Experiment Name: Zm_5mM_SA_P Parameter: Timepoint (hr) Value: 72
  misc_feature: MA Experiment 20000478 PARAMETER Experiment Name: Zm_5mM_SA_P Parameter: Tissue Value: Aerial
  misc_feature: MA Experiment 20000478 PARAMETER Experiment Name: Zm_5mM_SA_P Parameter: Treatment Value: 5mM SA vs. No Treatment
  misc_feature: MA Experiment ID: 20000479 Result: Down-regulated in Transcription
  misc_feature: MA Experiment 20000479 PARAMETER Experiment Name: Zm_Drought_P Parameter: Age (day) Value: 10
  misc_feature: MA Experiment 20000479 PARAMETER Experiment Name: Zm_Drought_P Parameter: Organism Value: Zea mays
  misc_feature: MA Experiment 20000479 PARAMETER Experiment Name: Zm_Drought_P Parameter: Plant Line Value: 35A19
  misc_feature: MA Experiment 20000479 PARAMETER Experiment Name: Zm_Drought_P Parameter: Timepoint (hr) Value: 48
  misc_feature: MA Experiment 20000479 PARAMETER Experiment Name: Zm_Drought_P Parameter: Tissue Value: Aerial
  misc_feature: MA Experiment 20000479 PARAMETER Experiment Name: Zm_Drought_P Parameter: Treatment Value: Drought vs. No Drought
  misc_feature: MA Experiment ID: 20000488 Result: Up-regulated in Transcription
  misc_feature: MA Experiment 20000488 PARAMETER Experiment Name: Zm_50mM_NH4NO3_L_to_H_P Parameter: Organism Value: Zea mays
  misc_feature: MA Experiment 20000488 PARAMETER Experiment Name: Zm_50mM_NH4NO3_L_to_H_P Parameter: Timepoint (hr) Value: 8
  misc_feature: MA Experiment 20000488 PARAMETER Experiment Name: Zm_50mM_NH4NO3_L_to_H_P Parameter: Tissue Value: Leaves
  misc_feature: MA Experiment 20000488 PARAMETER Experiment Name: Zm_50mM_NH4NO3_L_to_H_P Parameter: Treatment Value: 50mM NH4NO3 vs. 100mM Mannitol
  misc_feature: MA Experiment ID: 20000492 Result: Up-regulated in Transcription
  misc_feature: MA Experiment 20000492 PARAMETER Experiment Name: Zm_Hybrid_Seed_Dev_P Parameter: DAP Value: 12
  misc_feature: MA Experiment 20000492 PARAMETER Experiment Name: Zm_Hybrid_Seed_Dev_P Parameter: Organism Value: Zea mays
  misc_feature: MA Experiment 20000492 PARAMETER Experiment Name: Zm_Hybrid_Seed_Dev_P Parameter: Plant Line Value: 35A19
  misc_feature: MA Experiment 20000492 PARAMETER Experiment Name: Zm_Hybrid_Seed_Dev_P Parameter: Tissue Value: Fert Kernel vs. Unfert Floret
  misc_feature: MA Experiment ID: 20000534 Result: Down-regulated in Transcription
  misc_feature: MA Experiment 20000534 PARAMETER Experiment Name: Zm_Hybrid_Pollen_P Parameter: Age (day) Value: 8
  misc_feature: MA Experiment 20000534 PARAMETER Experiment Name: Zm_Hybrid_Pollen_P Parameter: Organism Value: Zea mays
  misc_feature: MA Experiment 20000534 PARAMETER Experiment Name: Zm_Hybrid_Pollen_P Parameter: Plant Line Value: 35A19
  misc_feature: MA Experiment 20000534 PARAMETER Experiment Name: Zm_Hybrid_Pollen_P Parameter: Tissue Value: Pollen vs. Aerial
  misc_feature: MA Experiment ID: 20000535 Result: Up-regulated in Transcription
  misc_feature: MA Experiment 20000535 PARAMETER Experiment Name: Zm_Hybrid_Seed_Dev_P Parameter: DAP Value: 30 vs. 12
  misc_feature: MA Experiment 20000535 PARAMETER Experiment Name: Zm_Hybrid_Seed_Dev_P Parameter: Organism Value: Zea mays
  misc_feature: MA Experiment 20000535 PARAMETER Experiment Name: Zm_Hybrid_Seed_Dev_P Parameter: Plant Line Value: 35A19
  misc_feature: MA Experiment 20000535 PARAMETER Experiment Name: Zm_Hybrid_Seed_Dev_P Parameter: Tissue Value: Embryo vs. Unfert Floret
  misc_feature: MA Experiment ID: 20000626 Result: Up-regulated in Transcription
  misc_feature: MA Experiment 20000626 PARAMETER Experiment Name: Zm_Herbicide-Treatments_P Parameter: Timepoint (hr) Value: 12
  misc_feature: MA Experiment 20000626 PARAMETER Experiment Name: Zm_Herbicide-Treatments_P Parameter: Tissue Value: Aerial
  misc_feature: MA Experiment 20000626 PARAMETER Experiment Name: Zm_Herbicide-Treatments_P Parameter: Treatment Value: Roundup vs. No Treatment
  misc_feature: MA Experiment ID: 20000632 Result: Down-regulated in Transcription
  misc_feature: MA Experiment 20000632 PARAMETER Experiment Name: Zm_Herbicide-Treatments_P Parameter: Timepoint (hr) Value: 4
  misc_feature: MA Experiment 20000632 PARAMETER Experiment Name: Zm_Herbicide-Treatments_P Parameter: Tissue Value: Aerial
  misc_feature: MA Experiment 20000632 PARAMETER Experiment Name: Zm_Herbicide-Treatments_P Parameter: Treatment Value: Glean vs. No Treatment
gcacgagaccattacctagaacatcctaatccaaaaatccaattttctctctctctcccgcctcctgttcagtttcccactcgccggaaccgccgcctctccaatccccgctaaccctcgctccgttttatcgcccccctctgcttccaaatcgaatcgcgtcctctccattctgccgtctcctctcctactcctcccccctgccgccgcaagatccaccagggctctcgaccgcaatggagccgcagctgacgcccggcgcggtggcggcggtctccgcccacgccgacggcaacggcacgctgcagccggtgctgcaggtggtggacgtgcggatggtcaacaacgccaagaacccctccgccgagcgcttccggatggtgctctccgacggcgaacacaccatgcagtccatgctcgccaccgccgagaacgcgcgcgtccgggacggctccatccagaagggctccatcgtccacctcctggagtgcacctgcagcaccatccagtctcgcaggatcattatcgttatcaaacttgatgttctgcaaagtgagtgtgccataattggaaaccccaggccctatgaaatgagaaaccaacctaatgagcagggcaccaacataccggccaatgctgctcaagctaatactggaacgtattccagtggccctggtttgctgggatcacctgctgcttcaaggccagcacaagttgctaataatgtaccatacagtggatcctatggtggttatcatggtacggtggtccctccgattgcccctgcagtagaatctgttcccaatgtggcatcgggtgtcacttatggtacaacttcagcgcataatacaatgaatgcgggcatgacacagtcaaacttgcagcagcgttcactgaactctcacccgaaccaaaggtttgcagttccttccatggctggtggcagtggtgctcctgggaatacatatggacaacctgcacagtcgttttatcagcaaccgcctccagggcatatgaatagaactcctgtgtctaagaacgatgcatatcgtcttgtcccattggctcaattgaacccttatctagataaatggacaatcaaggtcagggtaactgcaaagactgatctcaggttctacaacaatgctagaggtgctggaaaagtcttttcctttgatctccttgatgaacagcgtggagaaatccgtgcaacatgcttcaatacgcaggctgatcagttttttaacctcattgaggttgataaggtgtacctgatatctaaagggtcgttgaaaccagcacagaagaagtttaactccttgaatcacgagtatgagataagtctggattccagaacatctattgaagtttgtgctgatgatgatagcaacatccctaggcagcagtataatttccggaagataagtgaaattgagaacattgagaaagatgctattttggacttgattggaattgtcacatcagttggcccttctgtcacgtttatccgaaaggatggcgtggaaacccagagaagaacacttgaactgaaagacatgtctggtcgaagtgtacaacttaccttatgggggaagttgtgtgttgctgaaggcaaccagctgcagtcgctgtgcgattctggtttgaatcctgttctagctttgaaaggtgcccgcgttactgactacagtggtagatctgtgtcctcagctggctcaactcagttaaaaatagacccagaaattcctgaggctgagagtctgcggcgctggtacgcaactggaggaaagacagctgcttgtgtttctctgtcagtggtaagtatgggtggtacttgtgtccggaaatcaatcgctcagatcaaggatgaaaatctggggcagttagagaagccagactttatcactgttaaagctgcaatttcacatctgatagcagataatttttgttatcctgcttgcaccattgacgtgaatggtaggatgtgcaacaaaaaggtaacagataatggtgatgggacatggcgttgtgacaaatgcgaccagagcttaccaaattgtgagtacagatacgtgctgaatggccagatccaggaccacagtggggtcaccaattttactgcattcgaagatgctgctaaggtgatgattggccacagtggccacgagctcaacaacattagtgtagaagactcggaacgatttgcagagatcttgcaggcggctcgttggcagcagtttctgttcacgctgaaagtcaaggaggagatctataatgatgcgccgcaagtcaagtgcaacattactaaagcagagaagctggatccggcaatagagagttcttaccttctaggggtaatcaatggcctgttgcaggatgacactggctcaccttctggggcgcaaggtgccatggcctacaatgctggtatcagcaacactggcgctggacgaagtgtgccaacctccaacagtgcctacaccaccaatttgagtggtccaaggtatggcgagtctgcaaaccagctcgcgcagcaggaaagcacgtacaccggggtgaccactccagtgtcggcggcacggaatgtgcagcagacctgcgtgtcctgcgggtcaagtgggcacaacgtgcagaactgccctgcaggaacatacaggcagcaggcggctgcaagcgcagcaagctcctacggtacttcgcagcctcgcaatggactgtgcttcaaatgcaatcagcctggacactttgccaactcttgtccactactggctcctgctccccagcagcagcagcagtatcggagcggcggcgctccctcaggcggttatggtaggcagcagccctatgttggggctaccaactactgaaagtcattatctctgtcgagtcagtcgtgatgttggttttgcttagatgcctgtcctgaatggcatcgctgcgtccatgtgaagtagatgcaaaccattcctttttatgtttgtgtgtgaagttagaactatgtatcagtactttatgttttcgtcttataaatcctcgttgccgtgtcagttctgttg

SEQ ID NO: 18401 - protein, 876 aa, Zea mays subsp. mays
  peptide (1)..(876): Ceres Seq. ID no. 12377951
  misc_feature (286)..(376): Pfam Name: OB-fold nucleic acid binding domain Pfam Description: OB-fold nucleic acid binding domain
  misc_feature (1)..(158): Homolog of NCBI NO: 19111884 NR Description: replication factor-a protein 1
  misc_feature (219)..(708): Homolog of NCBI NO: 19111884 NR Description: replication factor-a protein 1
  misc_feature (370)..(826): Homolog of NCBI NO: 18415246 NR Description: replication A protein-like; protein id:
  misc_feature (112)..(824): Homolog of NCBI NO: 15242405 NR Description: replication protein A1-like; protein id:
  misc_feature (4)..(214): Homolog of NCBI NO: 13536993 NR Description: replication protein A 70kDa
  misc_feature (209)..(709): Homolog of NCBI NO: 13536993 NR Description: replication protein A 70kDa
  misc_feature (1)..(131): Homolog of NCBI NO: 15225129 NR Description: putative replication protein A1; protein id:
  misc_feature (183)..(708): Homolog of NCBI NO: 15225129 NR Description: putative replication protein A1; protein id:
  misc_feature (1)..(170): Homolog of NCBI NO: 7488291 NR Description: replication protein A1 homolog T18B16.100 -
  misc_feature (237)..(826): Homolog of NCBI NO: 7488291 NR Description: replication protein A1 homolog T18B16.100 -
MEPQLTPGAVAAVSAHADGNGTLQPVLQVVDVRMVNNAKNPSAERFRMVLSDGEHTMQSMLATAENARVRDGSIQKGSIVHLLECTCSTIQSRRIIIVIKLDVLQSECAIIGNPRPYEMRNQPNEQGTNIPANAAQANTGTYSSGPGLLGSPAASRPAQVANNVPYSGSYGGYHGTVVPPIAPAVESVPNVASGVTYGTTSAHNTMNAGMTQSNLQQRSLNSHPNQRFAVPSMAGGSGAPGNTYGQPAQSFYQQPPPGHMNRTPVSKNDAYRLVPLAQLNPYLDKWTIKVRVTAKTDLRFYNNARGAGKVFSFDLLDEQRGEIRATCFNTQADQFFNLIEVDKVYLISKGSLKPAQKKFNSLNHEYEISLDSRTSIEVCADDDSNIPRQQYNFRKISEIENIEKDAILDLIGIVTSVGPSVTFIRKDGVETQRRTLELKDMSGRSVQLTLWGKLCVAEGNQLQSLCDSGLNPVLALKGARVTDYSGRSVSSAGSTQLKIDPEIPEAESLRRWYATGGKTAACVSLSVVSMGGTCVRKSIAQIKDENLGQLEKPDFITVKAAISHLIADNFCYPACTIDVNGRMCNKKVTDNGDGTWRCDKCDQSLPNCEYRYVLNGQIQDHSGVTNFTAFEDAAKVMIGHSGHELNNISVEDSERFAEILQAARWQQFLFTLKVKEEIYNDAPQVKCNITKAEKLDPAIESSYLLGVINGLLQDDTGSPSGAQGAMAYNAGISNTGAGRSVPTSNSAYTTNLSGPRYGESANQLAQQESTYTGVTTPVSAARNVQQTCVSCGSSGHNVQNCPAGTYRQQAAASAASSYGTSQPRNGLCFKCNQPGHFANSCPLLAPAPQQQQQYRSGGAPSGGYGRQQPYVGATNY

SEQ ID NO: 18402 - protein, 843 aa, Zea mays subsp. mays
  peptide (1)..(843): Ceres Seq. ID no. 12377952
  misc_feature (253)..(343): Pfam Name: OB-fold nucleic acid binding domain Pfam Description: OB-fold nucleic acid binding domain
  misc_feature (1)..(125): Homolog of NCBI NO: 19111884 NR Description: replication factor-a protein 1
  misc_feature (186)..(675): Homolog of NCBI NO: 19111884 NR Description: replication factor-a protein 1
  misc_feature (337)..(793): Homolog of NCBI NO: 18415246 NR Description: replication A protein-like; protein id:
  misc_feature (79)..(791): Homolog of NCBI NO: 15242405 NR Description: replication protein A1-like; protein id:
  misc_feature (1)..(181): Homolog of NCBI NO: 13536993 NR Description: replication protein A 70kDa
  misc_feature (176)..(676): Homolog of NCBI NO: 13536993 NR Description: replication protein A 70kDa
  misc_feature (1)..(98): Homolog of NCBI NO: 15225129 NR Description: putative replication protein A1; protein id:
  misc_feature (150)..(675): Homolog of NCBI NO: 15225129 NR Description: putative replication protein A1; protein id:
  misc_feature (1)..(137): Homolog of NCBI NO: 7488291 NR Description: replication protein A1 homolog T18B16.100 -
  misc_feature (204)..(793): Homolog of NCBI NO: 7488291 NR Description: replication protein A1 homolog T18B16.100 -
MVNNAKNPSAERFRMVLSDGEHTMQSMLATAENARVRDGSIQKGSIVHLLECTCSTIQSRRIIIVIKLDVLQSECAIIGNPRPYEMRNQPNEQGTNIPANAAQANTGTYSSGPGLLGSPAASRPAQVANNVPYSGSYGGYHGTVVPPIAPAVESVPNVASGVTYGTTSAHNTMNAGMTQSNLQQRSLNSHPNQRFAVPSMAGGSGAPGNTYGQPAQSFYQQPPPGHMNRTPVSKNDAYRLVPLAQLNPYLDKWTIKVRVTAKTDLRFYNNARGAGKVFSFDLLDEQRGEIRATCFNTQADQFFNLIEVDKVYLISKGSLKPAQKKFNSLNHEYEISLDSRTSIEVCADDDSNIPRQQYNFRKISEIENIEKDAILDLIGIVTSVGPSVTFIRKDGVETQRRTLELKDMSGRSVQLTLWGKLCVAEGNQLQSLCDSGLNPVLALKGARVTDYSGRSVSSAGSTQLKIDPEIPEAESLRRWYATGGKTAACVSLSVVSMGGTCVRKSIAQIKDENLGQLEKPDFITVKAAISHLIADNFCYPACTIDVNGRMCNKKVTDNGDGTWRCDKCDQSLPNCEYRYVLNGQIQDHSGVTNFTAFEDAAKVMIGHSGHELNNISVEDSERFAEILQAARWQQFLFTLKVKEEIYNDAPQVKCNITKAEKLDPAIESSYLLGVINGLLQDDTGSPSGAQGAMAYNAGISNTGAGRSVPTSNSAYTTNLSGPRYGESANQLAQQESTYTGVTTPVSAARNVQQTCVSCGSSGHNVQNCPAGTYRQQAAASAASSYGTSQPRNGLCFKCNQPGHFANSCPLLAPAPQQQQQYRSGGAPSGGYGRQQPYVGATNY

SEQ ID NO: 18403 - protein, 829 aa, Zea mays subsp. mays
  peptide (1)..(829): Ceres Seq. ID no. 12377953
  misc_feature (239)..(329): Pfam Name: OB-fold nucleic acid binding domain Pfam Description: OB-fold nucleic acid binding domain
  misc_feature (1)..(111): Homolog of NCBI NO: 19111884 NR Description: replication factor-a protein 1
  misc_feature (172)..(661): Homolog of NCBI NO: 19111884 NR Description: replication factor-a protein 1
  misc_feature (323)..(779): Homolog of NCBI NO: 18415246 NR Description: replication A protein-like; protein id:
  misc_feature (65)..(777): Homolog of NCBI NO: 15242405 NR Description: replication protein A1-like; protein id:
  misc_feature (1)..(167): Homolog of NCBI NO: 13536993 NR Description: replication protein A 70kDa
  misc_feature (162)..(662): Homolog of NCBI NO: 13536993 NR Description: replication protein A 70kDa
  misc_feature (1)..(84): Homolog of NCBI NO: 15225129 NR Description: putative replication protein A1; protein id:
  misc_feature (136)..(661): Homolog of NCBI NO: 15225129 NR Description: putative replication protein A1; protein id:
  misc_feature (1)..(123): Homolog of NCBI NO: 7488291 NR Description: replication protein A1 homolog T18B16.100 -
  misc_feature (190)..(779): Homolog of NCBI NO: 7488291 NR Description: replication protein A1 homolog T18B16.100 -
MVLSDGEHTMQSMLATAENARVRDGSIQKGSIVHLLECTCSTIQSRRIIIVIKLDVLQSECAIIGNPRPYEMRNQPNEQGTNIPANAAQANTGTYSSGPGLLGSPAASRPAQVANNVPYSGSYGGYHGTVVPPIAPAVESVPNVASGVTYGTTSAHNTMNAGMTQSNLQQRSLNSHPNQRFAVPSMAGGSGAPGNTYGQPAQSFYQQPPPGHMNRTPVSKNDAYRLVPLAQLNPYLDKWTIKVRVTAKTDLRFYNNARGAGKVFSFDLLDEQRGEIRATCFNTQADQFFNLIEVDKVYLISKGSLKPAQKKFNSLNHEYEISLDSRTSIEVCADDDSNIPRQQYNFRKISEIENIEKDAILDLIGIVTSVGPSVTFIRKDGVETQRRTLELKDMSGRSVQLTLWGKLCVAEGNQLQSLCDSGLNPVLALKGARVTDYSGRSVSSAGSTQLKIDPEIPEAESLRRWYATGGKTAACVSLSVVSMGGTCVRKSIAQIKDENLGQLEKPDFITVKAAISHLIADNFCYPACTIDVNGRMCNKKVTDNGDGTWRCDKCDQSLPNCEYRYVLNGQIQDHSGVTNFTAFEDAAKVMIGHSGHELNNISVEDSERFAEILQAARWQQFLFTLKVKEEIYNDAPQVKCNITKAEKLDPAIESSYLLGVINGLLQDDTGSPSGAQGAMAYNAGISNTGAGRSVPTSNSAYTTNLSGPRYGESANQLAQQESTYTGVTTPVSAARNVQQTCVSCGSSGHNVQNCPAGTYRQQAAASAASSYGTSQPRNGLCFKCNQPGHFANSCPLLAPAPQQQQQYRSGGAPSGGYGRQQPYVGATNY

SEQ ID NO: 18404 - DNA, 701 bp, Zea mays subsp. mays
  misc_feature (1)..(701): Ceres Seq. ID no. 12358026
  misc_feature: MA Experiment ID: 108504 Result: Up-regulated in Transcription
  misc_feature: MA Experiment 108504 PARAMETER Experiment Name: Zm_Drought_P Parameter: Age (day) Value: 8
  misc_feature: MA Experiment 108504 PARAMETER Experiment Name: Zm_Drought_P Parameter: Organism Value: Zea mays
  misc_feature: MA Experiment 108504 PARAMETER Experiment Name: Zm_Drought_P Parameter: Plant Line Value: 35A19
  misc_feature: MA Experiment 108504 PARAMETER Experiment Name: Zm_Drought_P Parameter: Timepoint (hr) Value: 12
  misc_feature: MA Experiment 108504 PARAMETER Experiment Name: Zm_Drought_P Parameter: Tissue Value: Aerial
  misc_feature: MA Experiment 108504 PARAMETER Experiment Name: Zm_Drought_P Parameter: Treatment Value: Drought vs. No Drought
  misc_feature: MA Experiment ID: 108527 Result: Up-regulated in Transcription
  misc_feature: MA Experiment 108527 PARAMETER Experiment Name: Zm_5mM_NO_P Parameter: Age (day) Value: 8
  misc_feature: MA Experiment 108527 PARAMETER Experiment Name: Zm_5mM_NO_P Parameter: Organism Value: Zea mays
  misc_feature: MA Experiment 108527 PARAMETER Experiment Name: Zm_5mM_NO_P Parameter: Plant Line Value: 35A19
  misc_feature: MA Experiment 108527 PARAMETER Experiment Name: Zm_5mM_NO_P Parameter: Timepoint (hr) Value: 6
  misc_feature: MA Experiment 108527 PARAMETER Experiment Name: Zm_5mM_NO_P Parameter: Tissue Value: Aerial
  misc_feature: MA Experiment 108527 PARAMETER Experiment Name: Zm_5mM_NO_P Parameter: Treatment Value: 5mM NO vs. No Treatment
  misc_feature: MA Experiment ID: 108540 Result: Up-regulated in Transcription
  misc_feature: MA Experiment 108540 PARAMETER Experiment Name: Zm_20percent_PEG_P Parameter: Age (day) Value: 8
  misc_feature: MA Experiment 108540 PARAMETER Experiment Name: Zm_20percent_PEG_P Parameter: Organism Value: Zea mays
  misc_feature: MA Experiment 108540 PARAMETER Experiment Name: Zm_20percent_PEG_P Parameter: Plant Line Value: 35A19
  misc_feature: MA Experiment 108540 PARAMETER Experiment Name: Zm_20percent_PEG_P Parameter: Timepoint (hr) Value: 6
  misc_feature: MA Experiment 108540 PARAMETER Experiment Name: Zm_20percent_PEG_P Parameter: Tissue Value: Aerial
  misc_feature: MA Experiment 108540 PARAMETER Experiment Name: Zm_20percent_PEG_P Parameter: Treatment Value: 20percent PEG vs. No Treatment
  misc_feature: MA Experiment ID: 108556 Result: Up-regulated in Transcription
  misc_feature: MA Experiment 108556 PARAMETER Experiment Name: Zm_Drought_P Parameter: Age (day) Value: 9
  misc_feature: MA Experiment 108556 PARAMETER Experiment Name: Zm_Drought_P Parameter: Organism Value: Zea mays
  misc_feature: MA Experiment 108556 PARAMETER Experiment Name: Zm_Drought_P Parameter: Plant Line Value: 35A19
  misc_feature: MA Experiment 108556 PARAMETER Experiment Name: Zm_Drought_P Parameter: Timepoint (hr) Value: 24
  misc_feature: MA Experiment 108556 PARAMETER Experiment Name: Zm_Drought_P Parameter: Tissue Value: Aerial
  misc_feature: MA Experiment 108556 PARAMETER Experiment Name: Zm_Drought_P Parameter: Treatment Value: Drought vs. No Drought
  misc_feature: MA Experiment ID: 108559 Result: Up-regulated in Transcription
  misc_feature: MA Experiment 108559 PARAMETER Experiment Name: Zm_5mM_NO_P Parameter: Age (day) Value: 8
  misc_feature: MA Experiment 108559 PARAMETER Experiment Name: Zm_5mM_NO_P Parameter: Organism Value: Zea mays
  misc_feature: MA Experiment 108559 PARAMETER Experiment Name: Zm_5mM_NO_P Parameter: Plant Line Value: 35A19
  misc_feature: MA Experiment 108559 PARAMETER Experiment Name: Zm_5mM_NO_P Parameter: Timepoint (hr) Value: 12
  misc_feature: MA Experiment 108559 PARAMETER Experiment Name: Zm_5mM_NO_P Parameter: Tissue Value: Aerial
  misc_feature: MA Experiment 108559 PARAMETER Experiment Name: Zm_5mM_NO_P Parameter: Treatment Value: 5mM NO vs. No Treatment
  misc_feature: MA Experiment ID: 20000478 Result: Up-regulated in Transcription
  misc_feature: MA Experiment 20000478 PARAMETER Experiment Name: Zm_5mM_SA_P Parameter: Age (day) Value: 11
  misc_feature: MA Experiment 20000478 PARAMETER Experiment Name: Zm_5mM_SA_P Parameter: Organism Value: Zea mays
  misc_feature: MA Experiment 20000478 PARAMETER Experiment Name: Zm_5mM_SA_P Parameter: Plant Line Value: 35A19
  misc_feature: MA Experiment 20000478 PARAMETER Experiment Name: Zm_5mM_SA_P Parameter: Timepoint (hr) Value: 72
  misc_feature: MA Experiment 20000478 PARAMETER Experiment Name: Zm_5mM_SA_P Parameter: Tissue Value: Aerial
  misc_feature: MA Experiment 20000478 PARAMETER Experiment Name: Zm_5mM_SA_P Parameter: Treatment Value: 5mM SA vs. No Treatment
  misc_feature: MA Experiment ID: 20000479 Result: Up-regulated in Transcription
  misc_feature: MA Experiment 20000479 PARAMETER Experiment Name: Zm_Drought_P Parameter: Age (day) Value: 10
  misc_feature: MA Experiment 20000479 PARAMETER Experiment Name: Zm_Drought_P Parameter: Organism Value: Zea mays
  misc_feature: MA Experiment 20000479 PARAMETER Experiment Name: Zm_Drought_P Parameter: Plant Line Value: 35A19
  misc_feature: MA Experiment 20000479 PARAMETER Experiment Name: Zm_Drought_P Parameter: Timepoint (hr) Value: 48
  misc_feature: MA Experiment 20000479 PARAMETER Experiment Name: Zm_Drought_P Parameter: Tissue Value: Aerial
  misc_feature: MA Experiment 20000479 PARAMETER Experiment Name: Zm_Drought_P Parameter: Treatment Value: Drought vs. No Drought
  misc_feature: MA Experiment ID: 20000626 Result: Up-regulated in Transcription
  misc_feature: MA Experiment 20000626 PARAMETER Experiment Name: Zm_Herbicide-Treatments_P Parameter: Timepoint (hr) Value: 12
  misc_feature: MA Experiment 20000626 PARAMETER Experiment Name: Zm_Herbicide-Treatments_P Parameter: Tissue Value: Aerial
  misc_feature: MA Experiment 20000626 PARAMETER Experiment Name: Zm_Herbicide-Treatments_P Parameter: Treatment Value: Roundup vs. No Treatment
ctcttatcatggttagcaatcccgcaattcagttcatgctatatgagactcttctgaagaaattgaagaagagacgagcctctaatttcaagggagctgatggattgactgctcttgaaatttttcttcttggtgctgttgcgaaacttggtgcaaccgtcgttacgtatccccttctagttgttaaggcaagacttcaggcaaagcacatgattaacgatgacaagaggcatcgctacaaaggtacacttgatgcgttcacaaagatggtacgatatgagggtctgtcagggatgtacaaaggaatgggcacaaaaattgtgcaaagtgtttttgcttctgctttgctttttatgattaaggaggagctggtgaagggtgctcgactattggtaactggtaacactagtctggttaagaaactaccatcaaagtcatcaagatgaactacgggcatcgcaagcgttagtatatgttcccaaaaagccatttattatccgcataaacagtaaaacaaggtcgacaagctatagagctcgcctctgctttggagatgtcaactgtaggttacacaatagccagtatgattcacgtagggaccaaagactatgttggatagatatttgtatcattcatgtaaaatgtatgtggaagattgaaacagaagaaaataaataagtatgataatttgaacttcggcc

SEQ ID NO: 18405 - protein, 147 aa, Zea mays subsp. mays
  peptide (1)..(147): Ceres Seq. ID no. 12358027
  misc_feature (1)..(134): Homolog of NCBI NO: 24657533 NR Description: CG32250-PA [Drosophila melanogaster]
  misc_feature (1)..(139): Homolog of NCBI NO: 29789024 NR Description: solute carrier family 25 (mitochondrial carrier
  misc_feature (1)..(133): Homolog of NCBI NO: 5050969 NR Description: dJ362J20.1 (PEROXISOMAL INTEGRAL MEMBRANE
  misc_feature (1)..(133): Homolog of NCBI NO: 27662946 NR Description: similar to solute carrier family 25
  misc_feature (1)..(133): Homolog of NCBI NO: 10946712 NR Description: peroxisomal integral membrane protein [Mus
  misc_feature (1)..(133): Homolog of NCBI NO: 5453918 NR Description: solute carrier family 25 (mitochondrial carrier
  misc_feature (1)..(124): Homolog of NCBI NO: 28828484 NR Description: hypothetical protein [Dictyostelium discoideum]
  misc_feature (1)..(136): Homolog of NCBI NO: 15225602 NR Description: 36kDa-peroxisomal membrane protein (PMP36)
  misc_feature (1)..(137): Homolog of NCBI NO: 21593883 NR Description: putative peroxisomal membrane carrier protein
  misc_feature (1)..(147): Homolog of NCBI NO: 34901996 NR Description: unknown protein [Oryza sativa (japonica
LIMVSNPAIQFMLYETLLKKLKKRRASNFKGADGLTALEIFLLGAVAKLGATVVTYPLLVVKARLQAKHMINDDKRHRYKGTLDAFTKMVRYEGLSGMYKGMGTKIVQSVFASALLFMIKEELVKGARLLVTGNTSLVKKLPSKSSR

SEQ ID NO: 18406 - protein, 145 aa, Zea mays subsp. mays
  peptide (1)..(145): Ceres Seq. ID no. 12358028
  misc_feature (1)..(132): Homolog of NCBI NO: 24657533 NR Description: CG32250-PA [Drosophila melanogaster]
  misc_feature (1)..(137): Homolog of NCBI NO: 29789024 NR Description: solute carrier family 25 (mitochondrial carrier
  misc_feature (1)..(131): Homolog of NCBI NO: 5050969 NR Description: dJ362J20.1 (PEROXISOMAL INTEGRAL MEMBRANE
  misc_feature (1)..(131): Homolog of NCBI NO: 27662946 NR Description: similar to solute carrier family 25
  misc_feature (1)..(131): Homolog of NCBI NO: 10946712 NR Description: peroxisomal integral membrane protein [Mus
  misc_feature (1)..(131): Homolog of NCBI NO: 5453918 NR Description: solute carrier family 25 (mitochondrial carrier
  misc_feature (1)..(122): Homolog of NCBI NO: 28828484 NR Description: hypothetical protein [Dictyostelium discoideum]
  misc_feature (1)..(134): Homolog of NCBI NO: 15225602 NR Description: 36kDa-peroxisomal membrane protein (PMP36)
  misc_feature (1)..(135): Homolog of NCBI NO: 21593883 NR Description: putative peroxisomal membrane carrier protein
  misc_feature (1)..(145): Homolog of NCBI NO: 34901996 NR Description: unknown protein [Oryza sativa (japonica
MVSNPAIQFMLYETLLKKLKKRRASNFKGADGLTALEIFLLGAVAKLGATVVTYPLLVVKARLQAKHMINDDKRHRYKGTLDAFTKMVRYEGLSGMYKGMGTKIVQSVFASALLFMIKEELVKGARLLVTGNTSLVKKLPSKSSR

SEQ ID NO: 18407 - protein, 136 aa, Zea mays subsp. mays
  peptide (1)..(136): Ceres Seq. ID no. 12358029
  misc_feature (1)..(123): Homolog of NCBI NO: 24657533 NR Description: CG32250-PA [Drosophila melanogaster]
  misc_feature (1)..(128): Homolog of NCBI NO: 29789024 NR Description: solute carrier family 25 (mitochondrial carrier
  misc_feature (1)..(122): Homolog of NCBI NO: 5050969 NR Description: dJ362J20.1 (PEROXISOMAL INTEGRAL MEMBRANE
  misc_feature (1)..(122): Homolog of NCBI NO: 10946712 NR Description: peroxisomal integral membrane protein [Mus
  misc_feature (1)..(122): Homolog of NCBI NO: 27662946 NR Description: similar to solute carrier family 25
  misc_feature (1)..(122): Homolog of NCBI NO: 5453918 NR Description: solute carrier family 25 (mitochondrial carrier
  misc_feature (1)..(113): Homolog of NCBI NO: 28828484 NR Description: hypothetical protein [Dictyostelium discoideum]
  misc_feature (1)..(125): Homolog of NCBI NO: 15225602 NR Description: 36kDa-peroxisomal membrane protein (PMP36)
  misc_feature (1)..(126): Homolog of NCBI NO: 21593883 NR Description: putative peroxisomal membrane carrier protein
  misc_feature (1)..(136): Homolog of NCBI NO: 34901996 NR Description: unknown protein [Oryza sativa (japonica
MLYETLLKKLKKRRASNFKGADGLTALEIFLLGAVAKLGATVVTYPLLVVKARLQAKHMINDDKRHRYKGTLDAFTKMVRYEGLSGMYKGMGTKIVQSVFASALLFMIKEELVKGARLLVTGNTSLVKKLPSKSSR

SEQ ID NO: 18408 - DNA, 2200 bp, Zea mays subsp. mays
  misc_feature (1)..(2200): Ceres Seq. ID no. 12362570
  misc_feature: MA Experiment ID: 108523 Result: Up-regulated in Transcription
  misc_feature: MA Experiment 108523 PARAMETER Experiment Name: Zm_42deg_Heat_P Parameter: Age (day) Value: 8
  misc_feature: MA Experiment 108523 PARAMETER Experiment Name: Zm_42deg_Heat_P Parameter: Organism Value: Zea mays
  misc_feature: MA Experiment 108523 PARAMETER Experiment Name: Zm_42deg_Heat_P Parameter: Plant Line Value: 35A19
  misc_feature: MA Experiment 108523 PARAMETER Experiment Name: Zm_42deg_Heat_P Parameter: Temperature (deg C) Value: 42 vs. 22
  misc_feature: MA Experiment 108523 PARAMETER Experiment Name: Zm_42deg_Heat_P Parameter: Timepoint (hr) Value: 6
  misc_feature: MA Experiment 108523 PARAMETER Experiment Name: Zm_42deg_Heat_P Parameter: Tissue Value: Aerial
gcacgagaccattacctagaacatcctaatcgaaaaaccataccctagttcttccttcccgaaccctcgcgccgccaccgccgccgtctagcattttcctacacccaatctgatctgaccaagccctctgaacaccaccgcccatcctcctcctcctccgccgccgccgcccaagatgggcttcgacgtgggcctcgtcccctacaaccccgacgggtggggtccacctgaagttgccgccgcgccgccttccctcggtggtggctcctcgtctgtccccttcgctcccttctcccgctccgacaagctgggccgcatcgccgactggacgcgcaacccgccgggccccggggctttcgccgcagctcgcgacgccgtcttcgatttcgcggggctcgaggactccatcgggctcgcgtccgcggacgactcgtccttccgcctcgtcgatggcaaaccgccgccgcggcacccgcggtttggacctcgctggcgcttccagcagcggccccaactcccgcagcgccgcgacgaagaggtcgaggctcggcgtcgcgaggccgagaaggagcgcgcccgccgcgaccgccactggcagcagaaccgccgcacgcaccaccagttcaaccgcggcgggccctcctcgtcgtctgccaaaccgtccgttgacatccagcccgagtggtcggtgaaggagcagatccctttctcatccttctccaagctctccttcgccgtcgccgaccagcccgaggatctcctcgtctgtggcgcagtcgagtactacgaccggacctacgatcgcgtcacccccagggccgagcgtcgcctcgagcgcttcaagtcgcggaacttcttcaaggtcaccactaccgacgaccccgtcatccgccgtcttgctgagaatgacacggccacggtcttcgccaatgacaccatcctggccgcactcatgtgtgcgccccgtagcgtccagtcctgggatatcgtaattcagcgtgttggcaacaagttgttcttcgacaagcgtgatggctctcagcttgatcttctcaccgtcaacgaaaccgcccaggaggcactccctgaggccaaggaagacatcaactccgcgcattcgctggcggttgaagccacatacgtcaatcagaacttctcgcagcaggtgctgctccgcaatggtgagaaggtcacgttcgacgagcctaacccgtttgccactgaaggggaggaagctgcttccgttgcttaccgctaccgccgctggaagcttgatgaggagacaagcttggttgctcggtgcgaggttcatgccgtgagcgttgatctacgcggcgagcaccagttccttacactcaacgccctcaacgagttcgatcccaaggtcactggtgttgactggaggaagaagcttgagacccagcggggtgctgtgcttgccactgagctcaagaacaatgccaacaagcttgcacgctggactgcccaggcgctgcttgccggcgcagacatgatgaagttgggttatgtgtcacggctgcacccacgcgaccagtacaaccattccattctcagtgtgatcgggtacaagccaagggatttcgctgcacagatcaatctcaacaccgcaaatatgtgggggatcgtgaagtctattgtggatgtctgcatgaagcttggagaggggaagtatgtgcttgtgaaggacccagtgaaaccacaggtccggctttatgaagtgccaaatgatgcattcgagaatgactacgttgaggaaccactccctgaggaagagcaagtgcgtcccttctccgaggatgttgatgccagcgcgaaggaaatggatgctgccgcagaagcggaggctactggaacaactgcaggcgctgagaagagtggtgatgtcgctgctgtgtgaaggcggtggctacaacctgaagaggtctttttcggaccttgaataaggttaccttggctagctatctactacaatcatgggcatctggatacaggtttgatgtttctaccatcgaaggttatgctattattgttcgctgaatcttgagttgtgttccctttatgtgtccttatggctggacttaaatggaatcctcaaactatattgcactttccaagactcacatgttgtggattgccagttctgtttactgtgatttgagttgtggtgattgcatttgcc

SEQ ID NO: 18409 - protein, 580 aa, Zea mays subsp. mays
  peptide (1)..(580): Ceres Seq. ID no. 12362571
  misc_feature (21)..(540): Pfam Name: Eukaryotic translation initiation factor 3 Pfam Description: Eukaryotic translation initiation factor 3
  misc_feature (21)..(540): Pfam Name: Eukaryotic translation initiation factor 3 Pfam Description: Eukaryotic translation initiation factor 3
  misc_feature (3)..(541): Homolog of NCBI NO: 26337171 NR Description: unnamed protein product [Mus musculus]
  misc_feature (3)..(542): Homolog of NCBI NO: 27882463 NR Description: Similar to eukaryotic translation initiation
  misc_feature (3)..(541): Homolog of NCBI NO: 34866902 NR Description: similar to eukaryotic translation initiation
  misc_feature (3)..(541): Homolog of NCBI NO: 4503523 NR Description: eukaryotic translation initiation factor 3
  misc_feature (1)..(574): Homolog of NCBI NO: 31207329 NR Description: ENSANGP00000015368 [Anopheles gambiae]
  misc_feature (3)..(541): Homolog of NCBI NO: 26337171 NR Description: unnamed protein product [Mus musculus]
  misc_feature (3)..(541): Homolog of NCBI NO: 34866902 NR Description: similar to eukaryotic translation initiation
  misc_feature (1)..(574): Homolog of NCBI NO: 31207329 NR Description: ENSANGP00000015368 [Anopheles gambiae]
  misc_feature (21)..(563): Homolog of NCBI NO: 15233469 NR Description: translation initiation factor eIF3 - like protein
  misc_feature (21)..(563): Homolog of NCBI NO: 17528988 NR Description: putative translation initiation factor eIF3
  misc_feature (3)..(554): Homolog of NCBI NO: 15241470 NR Description: eukaryotic translation initiation factor 3
  misc_feature (157)..(563): Homolog of NCBI NO: 12407755 NR Description: initiation factor 3d [Arabidopsis thaliana]
  misc_feature (3)..(548): Homolog of NCBI NO: 31418925 NR Description: Unknown (protein for MGC:64097) [Danio rerio]
  misc_feature (3)..(541): Homolog of NCBI NO: 4503523 NR Description: eukaryotic translation initiation factor 3
  misc_feature (3)..(542): Homolog of NCBI NO: 27882463 NR Description: Similar to eukaryotic translation initiation
  misc_feature (3)..(548): Homolog of NCBI NO: 31418925 NR Description: Unknown (protein for MGC:64097) [Danio rerio]
  misc_feature (157)..(563): Homolog of NCBI NO: 12407755 NR Description: initiation factor 3d [Arabidopsis thaliana]
  misc_feature (3)..(554): Homolog of NCBI NO: 15241470 NR Description: eukaryotic translation initiation factor 3
  misc_feature (21)..(563): Homolog of NCBI NO: 17528988 NR Description: putative translation initiation factor eIF3
  misc_feature (21)..(563): Homolog of NCBI NO: 15233469 NR Description: translation initiation factor eIF3 - like protein
MGFDVGLVPYNPDGWGPPEVAAAPPSLGGGSSSVPFAPFSRSDKLGRIADWTRNPPGPGAFAAARDAVFDFAGLEDSIGLASADDSSFRLVDGKPPPRHPRFGPRWRFQQRPQLPQRRDEEVEARRREAEKERARRDRHWQQNRRTHHQFNRGGPSSSSAKPSVDIQPEWSVKEQIPFSSFSKLSFAVADQPEDLLVCGAVEYYDRTYDRVTPRAERRLERFKSRNFFKVTTTDDPVIRRLAENDTATVFANDTILAALMCAPRSVQSWDIVIQRVGNKLFFDKRDGSQLDLLTVNETAQEALPEAKEDINSAHSLAVEATYVNQNFSQQVLLRNGEKVTFDEPNPFATEGEEAASVAYRYRRWKLDEETSLVARCEVHAVSVDLRGEHQFLTLNALNEFDPKVTGVDWRKKLETQRGAVLATELKNNANKLARWTAQALLAGADMMKLGYVSRLHPRDQYNHSILSVIGYKPRDFAAQINLNTANMWGIVKSIVDVCMKLGEGKYVLVKDPVKPQVRLYEVPNDAFENDYVEEPLPEEEQVRPFSEDVDASAKEMDAAAEAEATGTTAGAEKSGDVAAV

SEQ ID NO: 18410 - protein, 321 aa, Zea mays subsp. mays
  peptide (1)..(321): Ceres Seq. ID no. 12362572
  misc_feature (1)..(281): Pfam Name: Eukaryotic translation initiation factor 3 Pfam Description: Eukaryotic translation initiation factor 3
  misc_feature (1)..(281): Pfam Name: Eukaryotic translation initiation factor 3 Pfam Description: Eukaryotic translation initiation factor 3
  misc_feature (1)..(282): Homolog of NCBI NO: 26337171 NR Description: unnamed protein product [Mus musculus]
  misc_feature (1)..(283): Homolog of NCBI NO: 27882463 NR Description: Similar to eukaryotic translation initiation
  misc_feature (1)..(282): Homolog of NCBI NO: 34866902 NR Description: similar to eukaryotic translation initiation
  misc_feature (1)..(282): Homolog of NCBI NO: 4503523 NR Description: eukaryotic translation initiation factor 3
  misc_feature (1)..(315): Homolog of NCBI NO: 31207329 NR Description: ENSANGP00000015368 [Anopheles gambiae]
  misc_feature (1)..(282): Homolog of NCBI NO: 26337171 NR Description: unnamed protein product [Mus musculus]
  misc_feature (1)..(282): Homolog of NCBI NO: 34866902 NR Description: similar to eukaryotic translation initiation
  misc_feature (1)..(315): Homolog of NCBI NO: 31207329 NR Description: ENSANGP00000015368 [Anopheles gambiae]
  misc_feature (1)..(304): Homolog of NCBI NO: 15233469 NR Description: translation initiation factor eIF3 - like protein
  misc_feature (1)..(304): Homolog of NCBI NO: 17528988 NR Description: putative translation initiation factor eIF3
  misc_feature (1)..(295): Homolog of NCBI NO: 15241470 NR Description: eukaryotic translation initiation factor 3
  misc_feature (1)..(304): Homolog of NCBI NO: 12407755 NR Description: initiation factor 3d [Arabidopsis thaliana]
  misc_feature (1)..(289): Homolog of NCBI NO: 31418925 NR Description: Unknown (protein for MGC:64097) [Danio rerio]
  misc_feature (1)..(282): Homolog of NCBI NO: 4503523 NR Description: eukaryotic translation initiation factor 3
  misc_feature (1)..(283): Homolog of NCBI NO: 27882463 NR Description: Similar to eukaryotic translation initiation
  misc_feature (1)..(289): Homolog of NCBI NO: 31418925 NR Description: Unknown (protein for MGC:64097) [Danio rerio]
  misc_feature (1)..(304): Homolog of NCBI NO: 12407755 NR Description: initiation factor 3d [Arabidopsis thaliana]
  misc_feature (1)..(295): Homolog of NCBI NO: 15241470 NR Description: eukaryotic translation initiation factor 3
  misc_feature (1)..(304): Homolog of NCBI NO: 17528988 NR Description: putative translation initiation factor eIF3
  misc_feature (1)..(304): Homolog of NCBI NO: 15233469 NR Description: translation initiation factor eIF3 - like protein
MCAPRSVQSWDIVIQRVGNKLFFDKRDGSQLDLLTVNETAQEALPEAKEDINSAHSLAVEATYVNQNFSQQVLLRNGEKVTFDEPNPFATEGEEAASVAYRYRRWKLDEETSLVARCEVHAVSVDLRGEHQFLTLNALNEFDPKVTGVDWRKKLETQRGAVLATELKNNANKLARWTAQALLAGADMMKLGYVSRLHPRDQYNHSILSVIGYKPRDFAAQINLNTANMWGIVKSIVDVCMKLGEGKYVLVKDPVKPQVRLYEVPNDAFENDYVEEPLPEEEQVRPFSEDVDASAKEMDAAAEAEATGTTAGAEKSGDVAAV

SEQ ID NO: 18411 - DNA, 2143 bp, Zea mays subsp. mays
  misc_feature (1)..(2143): Ceres Seq. ID no. 12424075
  misc_feature: MA Experiment ID: 108522 Result: Up-regulated in Transcription
  misc_feature: MA Experiment 108522 PARAMETER Experiment Name: Zm_42deg_Heat_P Parameter: Age (day) Value: 8
  misc_feature: MA Experiment 108522 PARAMETER Experiment Name: Zm_42deg_Heat_P Parameter: Organism Value: Zea mays
  misc_feature: MA Experiment 108522 PARAMETER Experiment Name: Zm_42deg_Heat_P Parameter: Plant Line Value: 35A19
  misc_feature: MA Experiment 108522 PARAMETER Experiment Name: Zm_42deg_Heat_P Parameter: Temperature (deg C) Value: 42 vs. 22
  misc_feature: MA Experiment 108522 PARAMETER Experiment Name: Zm_42deg_Heat_P Parameter: Timepoint (hr) Value: 1
  misc_feature: MA Experiment 108522 PARAMETER Experiment Name: Zm_42deg_Heat_P Parameter: Tissue Value: Aerial
  misc_feature: MA Experiment ID: 108535 Result: Down-regulated in Transcription
  misc_feature: MA Experiment 108535 PARAMETER Experiment Name: Zm_Meristem_P Parameter: Age (day) Value: 8
  misc_feature: MA Experiment 108535 PARAMETER Experiment Name: Zm_Meristem_P Parameter: Organism Value: Zea mays
  misc_feature: MA Experiment 108535 PARAMETER Experiment Name: Zm_Meristem_P Parameter: Plant Line Value: 35A19
  misc_feature: MA Experiment 108535 PARAMETER Experiment Name: Zm_Meristem_P Parameter: Tissue Value: Root Meristem vs. Above Root Meristem
  misc_feature: MA Experiment ID: 108544 Result: Up-regulated in Transcription
  misc_feature: MA Experiment ID: 108689 Result: Up-regulated in Transcription
  misc_feature: MA Experiment 108689 PARAMETER Experiment Name: Zm_Drought_Roots_P Parameter: Age (day) Value: 9
  misc_feature: MA Experiment 108689 PARAMETER Experiment Name: Zm_Drought_Roots_P Parameter: Organism Value: Zea mays
  misc_feature: MA Experiment 108689 PARAMETER Experiment Name: Zm_Drought_Roots_P Parameter: Plant Line Value: 35A19
  misc_feature: MA Experiment 108689 PARAMETER Experiment Name: Zm_Drought_Roots_P Parameter: Timepoint (hr) Value: 24
  misc_feature: MA Experiment 108689 PARAMETER Experiment Name: Zm_Drought_Roots_P Parameter: Tissue Value: Roots
  misc_feature: MA Experiment 108689 PARAMETER Experiment Name: Zm_Drought_Roots_P Parameter: Treatment Value: Drought vs. No Drought
  misc_feature: MA Experiment ID: 20000492 Result: Down-regulated in Transcription
  misc_feature: MA Experiment 20000492 PARAMETER Experiment Name: Zm_Hybrid_Seed_Dev_P Parameter: DAP Value: 12
  misc_feature: MA Experiment 20000492 PARAMETER Experiment Name: Zm_Hybrid_Seed_Dev_P Parameter: Organism Value: Zea mays
  misc_feature: MA Experiment 20000492 PARAMETER Experiment Name: Zm_Hybrid_Seed_Dev_P Parameter: Plant Line Value: 35A19
  misc_feature: MA Experiment 20000492 PARAMETER Experiment Name: Zm_Hybrid_Seed_Dev_P Parameter: Tissue Value: Fert Kernel vs. Unfert Floret
  misc_feature: MA Experiment ID: 20000535 Result: Down-regulated in Transcription
  misc_feature: MA Experiment 20000535 PARAMETER Experiment Name: Zm_Hybrid_Seed_Dev_P Parameter: DAP Value: 30 vs. 12
  misc_feature: MA Experiment 20000535 PARAMETER Experiment Name: Zm_Hybrid_Seed_Dev_P Parameter: Organism Value: Zea mays
  misc_feature: MA Experiment 20000535 PARAMETER Experiment Name: Zm_Hybrid_Seed_Dev_P Parameter: Plant Line Value: 35A19
  misc_feature: MA Experiment 20000535 PARAMETER Experiment Name: Zm_Hybrid_Seed_Dev_P Parameter: Tissue Value: Embryo vs. Unfert Floret
acaaattaagacgggcgtcgttggcttcaaatactggtctctcccctgtccaaaagtctctcgaatctccaccctggttccgcaccggttccagaattttctcccatttccagggtctccccgtttctgtccggcggttctgccgttccactgcttttgatttcggagtgtgagcttacatcttgctggacaataaagattggattttaagcgatttggggggtgcttgcctgatctccccctgcgaggtactgccgggggattggatttcggggaagttttggtggtttgatattcggcttggccggagcaggaatgacgatcgacatgtccattcccaggagctccgggctgctgaacgctgcggggaagagggacatgaagttcttcagcaacccctacgtgcttgcgctcacgggcgctgcaggaatcggtggattcctctttggctacgatacaggtgtcatatctggagcccttctgtatatccgcgatgattttccagcggtcaaggacaattacttcttacaggaaacgattgttagcatggccttagtcggagctatgattggagctgctgggggtggttggatcaatgatgcatacggtcgcaagaagtctactcttcttgctgatttgatgtttgctcttggctcacttgtcatgtgtgctgctgctggtccttacattctaattatcggaaggctcctcgttggtttgggtgtgggtgttgcatcagtcacagcaccggtatacattgctgaagctgctccttcagaaatcaggggaggtttggtgtcaactaatgtactcatgattaccggtggccaattcttctcctatcttatcaatcttggctttactgaggtgcctggaacatggcgctggatgcttggtgttgctgctgttcctgccattatacagtttgtgctgatgctattcctgccagaatctccgcgttggctttactggaaggatgagaaggcaaaagctattgccgtccttgagaggatctatgaatcggaccgcttggaggaagaggtagagctgcttgctacatcctccatgcatgaattccagtccaacaataccggaagctatctggatgtcttcaagtcgaaagaattgaggctagctttctttgctggggctggccttcaggccttccagcaatttactgggatcaacaccgtgatgtattacagccccacgatagtccagatggctggtttctcctccaacaggctggccttgctcctctccctgatcgtggcggccatgaacgccgccggaaccatcgtcgggatctacctaatcgaccgttgcggccgccgccgcctggccctcacaagcttggccggggtcgtggtctccctggccatcctcgccacggccttcatactgcagtcatcatccggcctctgcgcgagcgccgccagcggcacgtgccagggcgcgctaggctggttcgcggtggccggcctcgctctgtacatcgccttcttctccccgggcatggggcccgtgccgtgggccgtgaactcggagatctaccccgaggcgtaccgtgggatgtgcggcggcatgtcggccaccgtgaactgggtctctaacctcgtcgtggcacagacgttcctgtcgatcgtggggctggtcgggaccggcccgacgttcctgatcgtcgccgggatcgcggtgctggccttcgtcttcgtggccacgtacgtgccggagacgaagggcctgacttttgagcaggtggagcagatgtggagggagagagcgtgggggaacagcggcggcaactgcgagagccttttggcgggtactgcttctgcgccgtaggctacccgttgtcagcactggtcaagcgcgtcagttttagtatggccgcgctgggcttgatcggctccgtcctggcattagttggaagaaagtaaaaaacaaattggagatgcagatgcaaactgttgtatgtggtggtgctttatattgctatcctgttgcctgattgtacgtgttgtcatcgtggcaaatgtgcagtgggtgtaaaatatgaggtcataccgtaacgtcaaactaaggcaaaagggcagttgtatgacccagatgggtgattataattatttgtacagtttccggc

SEQ ID NO: 18412 - protein, 509 aa, Zea mays subsp. mays
  peptide (1)..(509): Ceres Seq. ID no. 12424076
  misc_feature (33)..(486): Pfam Name: Sugar (and other) transporter Pfam Description: Sugar (and other) transporter
  misc_feature (25)..(361): Homolog of NCBI NO: 15220697 NR Description: hypothetical protein
  misc_feature (1)..(502): Homolog of NCBI NO: 29501739 NR Description: putative Na+/myo-inositol symporter
  misc_feature (1)..(496): Homolog of NCBI NO: 25308955 NR Description: probable membrane transporter [imported] -
  misc_feature (25)..(362): Homolog of NCBI NO: 32488451 NR Description: OSJNBa0004N05.8 [Oryza sativa (japonica
  misc_feature (27)..(361): Homolog of NCBI NO: 33146705 NR Description: putative proton myo-inositol transporter
  misc_feature (378)..(490): Homolog of NCBI NO: 15220697 NR Description: hypothetical protein
  misc_feature (378)..(489): Homolog of NCBI NO: 33146705 NR Description: putative proton myo-inositol transporter
  misc_feature (378)..(489): Homolog of NCBI NO: 32488451 NR Description: OSJNBa0004N05.8 [Oryza sativa (japonica
  misc_feature (1)..(496): Homolog of NCBI NO: 30689342 NR Description: sugar transporter family [Arabidopsis thaliana]
  misc_feature (1)..(506): Homolog of NCBI NO: 38347452 NR Description: OSJNBa0076N16.21 [Oryza sativa (japonica
MTIDMSIPRSSGLLNAAGKRDMKFFSNPYVLALTGAAGIGGFLFGYDTGVISGALLYIRDDFPAVKDNYFLQETIVSMALVGAMIGAAGGGWINDAYGRKKSTLLADLMFALGSLVMCAAAGPYILIIGRLLVGLGVGVASVTAPVYIAEAAPSEIRGGLVSTNVLMITGGQFFSYLINLGFTEVPGTWRWMLGVAAVPAIIQFVLMLFLPESPRWLYWKDEKAKAIAVLERIYESDRLEEEVELLATSSMHEFQSNNTGSYLDVFKSKELRLAFFAGAGLQAFQQFTGINTVMYYSPTIVQMAGFSSNRLALLLSLIVAAMNAAGTIVGIYLIDRCGRRRLALTSLAGVVVSLAILATAFILQSSSGLCASAASGTCQGALGWFAVAGLALYIAFFSPGMGPVPWAVNSEIYPEAYRGMCGGMSATVNWVSNLVVAQTFLSIVGLVGTGPTFLIVAGIAVLAFVFVATYVPETKGLTFEQVEQMWRERAWGNSGGNCESLLAGTASAP

SEQ ID NO: 18413 - protein, 505 aa, Zea mays subsp. mays
  peptide (1)..(505): Ceres Seq. ID no. 12424077
  misc_feature (29)..(482): Pfam Name: Sugar (and other) transporter Pfam Description: Sugar (and other) transporter
  misc_feature (374)..(485): Homolog of NCBI NO: 32488451 NR Description: OSJNBa0004N05.8 [Oryza sativa (japonica
  misc_feature (21)..(358): Homolog of NCBI NO: 32488451 NR Description: OSJNBa0004N05.8 [Oryza sativa (japonica
  misc_feature (374)..(485): Homolog of NCBI NO: 33146705 NR Description: putative proton myo-inositol transporter
  misc_feature (23)..(357): Homolog of NCBI NO: 33146705 NR Description: putative proton myo-inositol transporter
  misc_feature (374)..(486): Homolog of NCBI NO: 15220697 NR Description: hypothetical protein
  misc_feature (21)..(357): Homolog of NCBI NO: 15220697 NR Description: hypothetical protein
  misc_feature (1)..(498): Homolog of NCBI NO: 29501739 NR Description: putative Na+/myo-inositol symporter
  misc_feature (1)..(492): Homolog of NCBI NO: 25308955 NR Description: probable membrane transporter [imported] -
  misc_feature (1)..(492): Homolog of NCBI NO: 30689342 NR Description: sugar transporter family [Arabidopsis thaliana]
  misc_feature (1)..(502): Homolog of NCBI NO: 38347452 NR Description: OSJNBa0076N16.21 [Oryza sativa (japonica
MSIPRSSGLLNAAGKRDMKFFSNPYVLALTGAAGIGGFLFGYDTGVISGALLYIRDDFPAVKDNYFLQETIVSMALVGAMIGAAGGGWINDAYGRKKSTLLADLMFALGSLVMCAAAGPYILIIGRLLVGLGVGVASVTAPVYIAEAAPSEIRGGLVSTNVLMITGGQFFSYLINLGFTEVPGTWRWMLGVAAVPAIIQFVLMLFLPESPRWLYWKDEKAKAIAVLERIYESDRLEEEVELLATSSMHEFQSNNTGSYLDVFKSKELRLAFFAGAGLQAFQQFTGINTVMYYSPTIVQMAGFSSNRLALLLSLIVAAMNAAGTIVGIYLIDRCGRRRLALTSLAGVVVSLAILATAFILQSSSGLCASAASGTCQGALGWFAVAGLALYIAFFSPGMGPVPWAVNSEIYPEAYRGMCGGMSATVNWVSNLVVAQTFLSIVGLVGTGPTFLIVAGIAVLAFVFVATYVPETKGLTFEQVEQMWRERAWGNSGGNCESLLAGTASAP

SEQ ID NO: 18414 - protein, 488 aa, Zea mays subsp. mays
  peptide (1)..(488): Ceres Seq. ID no. 12424078
  misc_feature (12)..(465): Pfam Name: Sugar (and other) transporter Pfam Description: Sugar (and other) transporter
  misc_feature (357)..(468): Homolog of NCBI NO: 32488451 NR Description: OSJNBa0004N05.8 [Oryza sativa (japonica
  misc_feature (4)..(341): Homolog of NCBI NO: 32488451 NR Description: OSJNBa0004N05.8 [Oryza sativa (japonica
  misc_feature (357)..(468): Homolog of NCBI NO: 33146705 NR Description: putative proton myo-inositol transporter
  misc_feature (6)..(340): Homolog of NCBI NO: 33146705 NR Description: putative proton myo-inositol transporter
  misc_feature (357)..(469): Homolog of NCBI NO: 15220697 NR Description: hypothetical protein
  misc_feature (4)..(340): Homolog of NCBI NO: 15220697 NR Description: hypothetical protein
  misc_feature (1)..(481): Homolog of NCBI NO: 29501739 NR Description: putative Na+/myo-inositol symporter
  misc_feature (1)..(475): Homolog of NCBI NO: 25308955 NR Description: probable membrane transporter [imported] -
  misc_feature (1)..(475): Homolog of NCBI NO: 30689342 NR Description: sugar transporter family [Arabidopsis thaliana]
  misc_feature (1)..(485): Homolog of NCBI NO: 38347452 NR Description: OSJNBa0076N16.21 [Oryza sativa (japonica
MKFFSNPYVLALTGAAGIGGFLFGYDTGVISGALLYIRDDFPAVKDNYFLQETIVSMALVGAMIGAAGGGWINDAYGRKKSTLLADLMFALGSLVMCAAAGPYILIIGRLLVGLGVGVASVTAPVYIAEAAPSEIRGGLVSTNVLMITGGQFFSYLINLGFTEVPGTWRWMLGVAAVPAIIQFVLMLFLPESPRWLYWKDEKAKAIAVLERIYESDRLEEEVELLATSSMHEFQSNNTGSYLDVFKSKELRLAFFAGAGLQAFQQFTGINTVMYYSPTIVQMAGFSSNRLALLLSLIVAAMNAAGTIVGIYLIDRCGRRRLALTSLAGVVVSLAILATAFILQSSSGLCASAASGTCQGALGWFAVAGLALYIAFFSPGMGPVPWAVNSEIYPEAYRGMCGGMSATVNWVSNLVVAQTFLSIVGLVGTGPTFLIVAGIAVLAFVFVATYVPETKGLTFEQVEQMWRERAWGNSGGNCESLLAGTASAP

SEQ ID NO: 18415 - DNA, 1058 bp, Zea mays subsp. mays
  misc_feature (1)..(1058): Ceres Seq. ID no. 12417219
  misc_feature: MA Experiment ID: 108529 Result: Up-regulated in Transcription
  misc_feature: MA Experiment 108529 PARAMETER Experiment Name: Zm_Imbibed_Seeds_P Parameter: Age (day) Value: 5 vs. 2
  misc_feature: MA Experiment 108529 PARAMETER Experiment Name: Zm_Imbibed_Seeds_P Parameter: Organism Value: Zea mays
  misc_feature: MA Experiment 108529 PARAMETER Experiment Name: Zm_Imbibed_Seeds_P Parameter: Plant Line Value: 35A19
  misc_feature: MA Experiment 108529 PARAMETER Experiment Name: Zm_Imbibed_Seeds_P Parameter: Tissue Value: Roots vs. Embryo
  misc_feature: MA Experiment ID: 108535 Result: Down-regulated in Transcription
  misc_feature: MA Experiment 108535 PARAMETER Experiment Name: Zm_Meristem_P Parameter: Age (day) Value: 8
  misc_feature: MA Experiment 108535 PARAMETER Experiment Name: Zm_Meristem_P Parameter: Organism Value: Zea mays
  misc_feature: MA Experiment 108535 PARAMETER Experiment Name: Zm_Meristem_P Parameter: Plant Line Value: 35A19
  misc_feature: MA Experiment 108535 PARAMETER Experiment Name: Zm_Meristem_P Parameter: Tissue Value: Root Meristem vs. Above Root Meristem
  misc_feature: MA Experiment ID: 108546 Result: Up-regulated in Transcription
  misc_feature: MA Experiment 108546 PARAMETER Experiment Name: Zm_Imbibed_Seeds_P Parameter: Age (day) Value: 3 vs. 2
  misc_feature: MA Experiment 108546 PARAMETER Experiment Name: Zm_Imbibed_Seeds_P Parameter: Organism Value: Zea mays
  misc_feature: MA Experiment 108546 PARAMETER Experiment Name: Zm_Imbibed_Seeds_P Parameter: Plant Line Value: 35A19
  misc_feature: MA Experiment 108546 PARAMETER Experiment Name: Zm_Imbibed_Seeds_P Parameter: Tissue Value: Roots vs. Embryo
  misc_feature: MA Experiment ID: 20000535 Result: Down-regulated in Transcription
  misc_feature: MA Experiment 20000535 PARAMETER Experiment Name: Zm_Hybrid_Seed_Dev_P Parameter: DAP Value: 30 vs. 12
  misc_feature: MA Experiment 20000535 PARAMETER Experiment Name: Zm_Hybrid_Seed_Dev_P Parameter: Organism Value: Zea mays
  misc_feature: MA Experiment 20000535 PARAMETER Experiment Name: Zm_Hybrid_Seed_Dev_P Parameter: Plant Line Value: 35A19
  misc_feature: MA Experiment 20000535 PARAMETER Experiment Name: Zm_Hybrid_Seed_Dev_P Parameter: Tissue Value: Embryo vs. Unfert Floret
ttgttgtcgtaattgctggcttgaacctgacagaagagcgtgaggacttcgacagagtgagccttctccttccaggcaagcagatgggcctcatacatgccattgctagtgtagcgaagaagccccttgtgttggttctcctgggtggtggtcctgttgatgtttcgtttgcaaagcaagatccacgaatcgcaagcattctttggctcggatatcctggcgaggttggtggacaagtccttccagaaattcttttcggagagtacaacccaggaggaaagctgcctataacttggtatcctgaatcctttactgctattcccatgactgatatgaacatgagagctgatccttcacgaggctaccctgggagaacatatcgattttacactggagatgtagtgtatggctttggatatggtttaagtttactccaaatatttcatatagcatctcctcggctccgaagaagatcaccgtgtcgcgttcatccgatttgggcattatcagcagaaagcctgcatacncaaggagggatggactaggctctgtgaaaactgaagatatcgcttcatgtgaagctctggttttctctgttcacgtcgctgtttcgaatcatggtagcatggatgggagtcatgctgttcttctgttcgcgagatcgaaatcaagcgtcccgggctttcctataaaacagctggttggctttgagagtgtccacacggcggctggcagtgcatccaatgtggagattactgttgacccctgcaagcaaatgagcgcagccaatcctgaaggcaaaagggtacttctgttgggtgcccatgttctaacggtgggtgatgaagagttcgaattatccattgaactctgacagggatgtgccaagtcctaccattttatggagttcaaagttgggaataatctgatgaaacttgtaaagaaacacgttgtaaagattcattattgagctggatgcgtgtacggtaaacatgctgtgacctgtgaagattcatcatttgagttgggtgctagtacaattgcagccattttgcggt

SEQ ID NO: 18416 - protein, 180 aa, Zea mays subsp. mays
  peptide (1)..(180): Ceres Seq. ID no. 12417220
  misc_feature (1)..(142): Pfam Name: Glycosyl hydrolase family 3 C terminal domain Pfam Description: Glycosyl hydrolase family 3 C terminal domain
  misc_feature (2)..(142): Homolog of NCBI NO: 32481073 NR Description: auxin-induced beta-glucosidase [Chenopodium
  misc_feature (1)..(142): Homolog of NCBI NO: 15218202 NR Description: glycosyl hydrolase family 3
  misc_feature (2)..(148): Homolog of NCBI NO: 30316196 NR Description: Putative beta-D-xylosidase (PpAz152)
  misc_feature (1)..(142): Homolog of NCBI NO: 6573772 NR Description: F28K19.27 [Arabidopsis thaliana]
  misc_feature (2)..(152): Homolog of NCBI NO: 38344900 NR Description: OSJNBb0079B02.3 [Oryza sativa (japonica
  misc_feature (1)..(148): Homolog of NCBI NO: 18025342 NR Description: beta-D-xylosidase [Hordeum vulgare]
  misc_feature (1)..(148): Homolog of NCBI NO: 40363751 NR Description: putative beta-xylosidase [Triticum aestivum]
  misc_feature (1)..(155): Homolog of NCBI NO: 15238197 NR Description: glycosyl hydrolase family 3
  misc_feature (1)..(155): Homolog of NCBI NO: 26449574 NR Description: putative beta-xylosidase [Arabidopsis thaliana]
  misc_feature (1)..(142): Homolog of NCBI NO: 38346629 NR Description: OSJNBa0074L08.23 [Oryza sativa (japonica
  misc_feature (175)..(175): Xaa is any aa, unknown or other
VVVIAGLNLTEEREDFDRVSLLLPGKQMGLIHAIASVAKKPLVLVLLGGGPVDVSFAKQDPRIASILWLGYPGEVGGQVLPEILFGEYNPGGKLPITWYPESFTAIPMTDMNMRADPSRGYPGRTYRFYTGDVVYGFGYGLSLLQIFHIASPRLRRRSPCRVHPIWALSAESLHXQGGMD

SEQ ID NO: 18417 - protein, 153 aa, Zea mays subsp. mays
  peptide (1)..(153): Ceres Seq. ID no. 12417221
  misc_feature (1)..(115): Pfam Name: Glycosyl hydrolase family 3 C terminal domain Pfam Description: Glycosyl hydrolase family 3 C terminal domain
  misc_feature (1)..(115): Homolog of NCBI NO: 32481073 NR Description: auxin-induced beta-glucosidase [Chenopodium
  misc_feature (1)..(115): Homolog of NCBI NO: 15218202 NR Description: glycosyl hydrolase family 3
  misc_feature (1)..(121): Homolog of NCBI NO: 30316196 NR Description: Putative beta-D-xylosidase (PpAz152)
  misc_feature (1)..(115): Homolog of NCBI NO: 6573772 NR Description: F28K19.27 [Arabidopsis thaliana]
  misc_feature (1)..(125): Homolog of NCBI NO: 38344900 NR Description: OSJNBb0079B02.3 [Oryza sativa (japonica
  misc_feature (1)..(121): Homolog of NCBI NO: 18025342 NR Description: beta-D-xylosidase [Hordeum vulgare]
  misc_feature (1)..(121): Homolog of NCBI NO: 40363751 NR Description: putative beta-xylosidase [Triticum aestivum]
  misc_feature (1)..(128): Homolog of NCBI NO: 15238197 NR Description: glycosyl hydrolase family 3
  misc_feature (1)..(128): Homolog of NCBI NO: 26449574 NR Description: putative beta-xylosidase [Arabidopsis thaliana]
  misc_feature (1)..(115): Homolog of NCBI NO: 38346629 NR Description: OSJNBa0074L08.23 [Oryza sativa (japonica
  misc_feature (148)..(148): Xaa is any aa, unknown or other
MGLIHAIASVAKKPLVLVLLGGGPVDVSFAKQDPRIASILWLGYPGEVGGQVLPEILFGEYNPGGKLPITWYPESFTAIPMTDMNMRADPSRGYPGRTYRFYTGDVVYGFGYGLSLLQIFHIASPRLRRRSPCRVHPIWALSAESLHXQGGMD

SEQ ID NO: 18418 - DNA, 1833 bp, Zea mays subsp. mays
  misc_feature (1)..(1833): Ceres Seq. ID no. 12366371
  misc_feature: MA Experiment ID: 108504 Result: Up-regulated in Transcription
  misc_feature: MA Experiment 108504 PARAMETER Experiment Name: Zm_Drought_P Parameter: Age (day) Value: 8
  misc_feature: MA Experiment 108504 PARAMETER Experiment Name: Zm_Drought_P Parameter: Organism Value: Zea mays
  misc_feature: MA Experiment 108504 PARAMETER Experiment Name: Zm_Drought_P Parameter: Plant Line Value: 35A19
  misc_feature: MA Experiment 108504 PARAMETER Experiment Name: Zm_Drought_P Parameter: Timepoint (hr) Value: 12
  misc_feature: MA Experiment 108504 PARAMETER Experiment Name: Zm_Drought_P Parameter: Tissue Value: Aerial
  misc_feature: MA Experiment 108504 PARAMETER Experiment Name: Zm_Drought_P Parameter: Treatment Value: Drought vs. No Drought
  misc_feature: MA Experiment ID: 108522 Result: Down-regulated in Transcription
  misc_feature: MA Experiment 108522 PARAMETER Experiment Name: Zm_42deg_Heat_P Parameter: Age (day) Value: 8
  misc_feature: MA Experiment 108522 PARAMETER Experiment Name: Zm_42deg_Heat_P Parameter: Organism Value: Zea mays
  misc_feature: MA Experiment 108522 PARAMETER Experiment Name: Zm_42deg_Heat_P Parameter: Plant Line Value: 35A19
  misc_feature: MA Experiment 108522 PARAMETER Experiment Name: Zm_42deg_Heat_P Parameter: Temperature (deg C) Value: 42 vs. 22
  misc_feature: MA Experiment 108522 PARAMETER Experiment Name: Zm_42deg_Heat_P Parameter: Timepoint (hr) Value: 1
  misc_feature: MA Experiment 108522 PARAMETER Experiment Name: Zm_42deg_Heat_P Parameter: Tissue Value: Aerial
  misc_feature: MA Experiment ID: 108529 Result: Up-regulated in Transcription
  misc_feature: MA Experiment 108529 PARAMETER Experiment Name: Zm_Imbibed_Seeds_P Parameter: Age (day) Value: 5 vs. 2
  misc_feature: MA Experiment 108529 PARAMETER Experiment Name: Zm_Imbibed_Seeds_P Parameter: Organism Value: Zea mays
  misc_feature: MA Experiment 108529 PARAMETER Experiment Name: Zm_Imbibed_Seeds_P Parameter: Plant Line Value: 35A19
  misc_feature: MA Experiment 108529 PARAMETER Experiment Name: Zm_Imbibed_Seeds_P Parameter: Tissue Value: Roots vs. Embryo
  misc_feature: MA Experiment ID: 108535 Result: Down-regulated in Transcription
  misc_feature: MA Experiment 108535 PARAMETER Experiment Name: Zm_Meristem_P Parameter: Age (day) Value: 8
  misc_feature: MA Experiment 108535 PARAMETER Experiment Name: Zm_Meristem_P Parameter: Organism Value: Zea mays
  misc_feature: MA Experiment 108535 PARAMETER Experiment Name: Zm_Meristem_P Parameter: Plant Line Value: 35A19
  misc_feature: MA Experiment 108535 PARAMETER Experiment Name: Zm_Meristem_P Parameter: Tissue Value: Root Meristem vs. Above Root Meristem
  misc_feature: MA Experiment ID: 108536 Result: Up-regulated in Transcription
  misc_feature: MA Experiment 108536 PARAMETER Experiment Name: Zm_Meristem_P Parameter: Age (day) Value: 8
  misc_feature: MA Experiment 108536 PARAMETER Experiment Name: Zm_Meristem_P Parameter: Organism Value: Zea mays
  misc_feature: MA Experiment 108536 PARAMETER Experiment Name: Zm_Meristem_P Parameter: Plant Line Value: 35A19
  misc_feature: MA Experiment 108536 PARAMETER Experiment Name: Zm_Meristem_P Parameter: Tissue Value: Shoot Meristem vs. Above Shoot Meristem
  misc_feature: MA Experiment ID: 108540 Result: Up-regulated in Transcription
  misc_feature: MA Experiment 108540 PARAMETER Experiment Name: Zm_20percent_PEG_P Parameter: Age (day) Value: 8
  misc_feature: MA Experiment 108540 PARAMETER Experiment Name: Zm_20percent_PEG_P Parameter: Organism Value: Zea mays
  misc_feature: MA Experiment 108540 PARAMETER Experiment Name: Zm_20percent_PEG_P Parameter: Plant Line Value: 35A19
  misc_feature: MA Experiment 108540 PARAMETER Experiment Name: Zm_20percent_PEG_P Parameter: Timepoint (hr) Value: 6
  misc_feature: MA Experiment 108540 PARAMETER Experiment Name: Zm_20percent_PEG_P Parameter: Tissue Value: Aerial
  misc_feature: MA Experiment 108540 PARAMETER Experiment Name: Zm_20percent_PEG_P Parameter: Treatment Value: 20percent PEG vs. No Treatment
  misc_feature: MA Experiment ID: 108543 Result: Down-regulated in Transcription
  misc_feature: MA Experiment ID: 108545 Result: Down-regulated in Transcription
  misc_feature: MA Experiment 108545 PARAMETER Experiment Name: Zm_Imbibed_Seeds_P Parameter: Age (day) Value: 3 vs. 2
  misc_feature: MA Experiment 108545 PARAMETER Experiment Name: Zm_Imbibed_Seeds_P Parameter: Organism Value: Zea mays
  misc_feature: MA Experiment 108545 PARAMETER Experiment Name: Zm_Imbibed_Seeds_P Parameter: Plant Line Value: 35A19
  misc_feature: MA Experiment 108545 PARAMETER Experiment Name: Zm_Imbibed_Seeds_P Parameter: Tissue Value: Aerial vs. Embryo
  misc_feature: MA Experiment ID: 108547 Result: Down-regulated in Transcription
  misc_feature: MA Experiment 108547 PARAMETER Experiment Name: Zm_Imbibed_Seeds_P Parameter: Age (day) Value: 4 vs. 2
  misc_feature: MA Experiment 108547 PARAMETER Experiment Name: Zm_Imbibed_Seeds_P Parameter: Organism Value: Zea mays
  misc_feature: MA Experiment 108547 PARAMETER Experiment Name: Zm_Imbibed_Seeds_P Parameter: Plant Line Value: 35A19
  misc_feature: MA Experiment 108547 PARAMETER Experiment Name: Zm_Imbibed_Seeds_P Parameter: Tissue Value: Aerial vs. Embryo
  misc_feature: MA Experiment ID: 108556 Result: Up-regulated in Transcription
  misc_feature: MA Experiment 108556 PARAMETER Experiment Name: Zm_Drought_P Parameter: Age (day) Value: 9
  misc_feature: MA Experiment 108556 PARAMETER Experiment Name: Zm_Drought_P Parameter: Organism Value: Zea mays
  misc_feature: MA Experiment 108556 PARAMETER Experiment Name: Zm_Drought_P Parameter: Plant Line Value: 35A19
  misc_feature: MA Experiment 108556 PARAMETER Experiment Name: Zm_Drought_P Parameter: Timepoint (hr) Value: 24
  misc_feature: MA Experiment 108556 PARAMETER Experiment Name: Zm_Drought_P Parameter: Tissue Value: Aerial
  misc_feature: MA Experiment 108556 PARAMETER Experiment Name: Zm_Drought_P Parameter: Treatment Value: Drought vs. No Drought
  misc_feature: MA Experiment ID: 108687 Result: Up-regulated in Transcription
  misc_feature: MA Experiment 108687 PARAMETER Experiment Name: Zm_Embryos-Flowers__P Parameter: Tissue Value: Embryo vs. Aerial+
  misc_feature: MA Experiment ID: 108688 Result: Down-regulated in Transcription
  misc_feature: MA Experiment 108688 PARAMETER Experiment Name: Zm_Embryos-Flowers__P Parameter: Tissue Value: Immature Flowers vs. Aerial+
  misc_feature: MA Experiment ID: 20000487 Result: Up-regulated in Transcription
  misc_feature: MA Experiment 20000487 PARAMETER Experiment Name: Zm_50mM_NH4NO3_L_to_H_P Parameter: Organism Value: Zea mays
  misc_feature: MA Experiment 20000487 PARAMETER Experiment Name: Zm_50mM_NH4NO3_L_to_H_P Parameter: Timepoint (hr) Value: 4
  misc_feature: MA Experiment 20000487 PARAMETER Experiment Name: Zm_50mM_NH4NO3_L_to_H_P Parameter: Tissue Value: Leaves
  misc_feature: MA Experiment 20000487 PARAMETER Experiment Name: Zm_50mM_NH4NO3_L_to_H_P Parameter: Treatment Value: 50mM NH4NO3 vs. 100mM Mannitol
  misc_feature: MA Experiment ID: 20000492 Result: Up-regulated in Transcription
  misc_feature: MA Experiment 20000492 PARAMETER Experiment Name: Zm_Hybrid_Seed_Dev_P Parameter: DAP Value: 12
  misc_feature: MA Experiment 20000492 PARAMETER Experiment Name: Zm_Hybrid_Seed_Dev_P Parameter: Organism Value: Zea mays
  misc_feature: MA Experiment 20000492 PARAMETER Experiment Name: Zm_Hybrid_Seed_Dev_P Parameter: Plant Line Value: 35A19
  misc_feature: MA Experiment 20000492 PARAMETER Experiment Name: Zm_Hybrid_Seed_Dev_P Parameter: Tissue Value: Fert Kernel vs. Unfert Floret
  misc_feature: MA Experiment ID: 20000535 Result: Up-regulated in Transcription
  misc_feature: MA Experiment 20000535 PARAMETER Experiment Name: Zm_Hybrid_Seed_Dev_P Parameter: DAP Value: 30 vs. 12
  misc_feature: MA Experiment 20000535 PARAMETER Experiment Name: Zm_Hybrid_Seed_Dev_P Parameter: Organism Value: Zea mays
  misc_feature: MA Experiment 20000535 PARAMETER Experiment Name: Zm_Hybrid_Seed_Dev_P Parameter: Plant Line Value: 35A19
  misc_feature: MA Experiment 20000535 PARAMETER Experiment Name: Zm_Hybrid_Seed_Dev_P Parameter: Tissue Value: Embryo vs. Unfert Floret
acagcaaaggcggcactgctcaaaccacctctttggccacacacacgcatactgccaccgctactgcttcatcagcagctagcagcaagcggccggtggtgcagcgctgcgcctgcgccgggtaatcgaacacatggctcagatgatctcaaccatgcccatgctagacgccgccccggcctcgtcagccattatgcccaagctgccgcccgccgcctgcctggacgcgccgccggcctcgggcatcaccgtcgtgtcgaggcagcacgttcgcccggacgccgcgtcggcggtcggcgacctcacgctgtccgtctccgacctgcccatgctgtcgtgccactacatccagaaggggctcttcttcccggcacccgacctgcccatgtcctcggtcgtgtcgctgctcctgtcctcgctgtcgcgggcgctcgccgtccgtcccggccctcgccggccgcttcgtcacgctgcccgacgaccgcatcgtcatccgctgcaacgacgcgggcgtggacttcctccacgccgtcgcacccggcctgtcgcttgacgactttctcgtccctgacgccgacgtgccgaccaagcacacaaaggacctgttccccatggaccggaccgtgagctacgatgggcaccgtcgcccgctcacgtcgttccaggtcaccgcactcggagacggcaccgtctttatcggcatcgtcgccaaccacgccgtcgtggacggcacctccttttggcaattcttcaatacctgggcggccatctgccgcggcgagtcccccaaactgccggacttccgccgaaacttcttcggcgagtccactgccgtcctccgcttccccggcggcgtcggcccgtccgtgaccttcgacgtggacgcgcctctccgtgagcgcgtctttcacttcagcgctgacgcaattcgcgagctgaaagcgattgccaaccgccgtccgagcggtggccaagacgccgaggtgtacggcaagatggcgcaggaccccaagaatccccaagtgcgcggggagatctcgtcgttccagtcactgtgcgcgcagatatggctctcggtcacgcgtgcccggaaacgcctggcgcccgacgcgacgacgacgttccgaatggcggtgaactgccggcaccggctgcagccggccatctcccctgtctactttggcaacgccatccagagcgctgcgacgatggcgacagtctccgagctggctcgcagcgatctaaggtgggcggcaggcaagctgaacgcgacccttgcggcctatggcgacggcacgatccggctcgcggcggccgcgtggcaggccgcaccccggtgcttcccgctgggcaaccccgacggctcggtgatcacgatggggagctccaaccggttcccgatgtacgtgggcaacgatttcggctggggccggcccctcgctgtgcggagcgggcgcgccaacaagttcgacggcaagatgtcggcgttcccgggacgcgccggggacggcagcgtggacatcgaggtgtgcctgcctccggagaccatggcggcgctgctccacgacgccgagttcatgcactacgtgtcgtgcccgtcgcatctgttgtgatgtactgcagccgtgcgggcgggcgggcgcgagtgggggccatcggccgtgacatgccatcaggcacctgttggattgctcggtcgtccactcgtccttgcctttcgggattcaggaatactagctagttggtgtcaagacattgtatctgtctcgctttttcggagtgctgcgtgtaatcgtgtgttagcagctactagtagtagtacttggaaattgg

SEQ ID NO: 18419 - protein, 333 aa, Zea mays subsp. mays
  peptide (1)..(333): Ceres Seq. ID no. 12366372
  misc_feature (1)..(323): Pfam Name: Transferase family Pfam Description: Transferase family
  misc_feature (1)..(332): Homolog of NCBI NO: 21636163 NR Description: HCBT-like putative defense response protein
  misc_feature (1)..(105): Homolog of NCBI NO: 38346680 NR Description: OSJNBa0069D17.11 [Oryza sativa (japonica
  misc_feature (143)..(329): Homolog of NCBI NO: 38346680 NR Description: OSJNBa0069D17.11 [Oryza sativa (japonica
  misc_feature (1)..(333): Homolog of NCBI NO: 34899602 NR Description: N-hydroxycinnamoyl benzoyltransferase-like
  misc_feature (1)..(321): Homolog of NCBI NO: 24413968 NR Description: N-hydroxycinnamoyl/benzoyltransferase-like
  misc_feature (1)..(327): Homolog of NCBI NO: 21666314 NR Description: AER [Nicotiana tabacum]
  misc_feature (1)..(327): Homolog of NCBI NO: 15240918 NR Description: anthranilate N-benzoyltransferase - like protein
  misc_feature (125)..(327): Homolog of NCBI NO: 15225603 NR Description: putative anthocyanin 5-aromatic acyltransferase
  misc_feature (1)..(148): Homolog of NCBI NO: 15225603 NR Description: putative anthocyanin 5-aromatic acyltransferase
  misc_feature (1)..(327): Homolog of NCBI NO: 34908396 NR Description: P0529E05.24 [Oryza sativa (japonica
MDRTVSYDGHRRPLTSFQVTALGDGTVFIGIVANHAVVDGTSFWQFFNTWAAICRGESPKLPDFRRNFFGESTAVLRFPGGVGPSVTFDVDAPLRERVFHFSADAIRELKAIANRRPSGGQDAEVYGKMAQDPKNPQVRGEISSFQSLCAQIWLSVTRARKRLAPDATTTFRMAVNCRHRLQPAISPVYFGNAIQSAATMATVSELARSDLRWAAGKLNATLAAYGDGTIRLAAAAWQAAPRCFPLGNPDGSVITMGSSNRFPMYVGNDFGWGRPLAVRSGRANKFDGKMSAFPGRAGDGSVDIEVCLPPETMAALLHDAEFMHYVSCPSHLL

SEQ ID NO: 18420 - protein, 224 aa, Zea mays subsp. mays
  peptide (1)..(224): Ceres Seq. ID no. 12366373
MALGHACPETPGARRDDDVPNGGELPAPAAAGHLPCLLWQRHPERCDDGDSLRAGSQRSKVGGRQAERDPCGLWRRHDPARGGRVAGRTPVLPAGQPRRLGDHDGELQPVPDVRGQRFRLGPAPRCAERARQQVRRQDVGVPGTRRGRQRGHRGVPASGDHGGAAPRRRVHALRVVPVASVVMYCSRAGGRARVGAIGRDMPSGTCWIARSSTRPCLSGFRNTS

SEQ ID NO: 18421 - protein, 208 aa, Zea mays subsp. mays
  peptide (1)..(208): Ceres Seq. ID no. 12366374
  misc_feature (148)..(208): Pfam Name: Equine herpesvirus glycoprotein gp2 Pfam Description: Equine herpesvirus glycoprotein gp2
  misc_feature (100)..(208): Homolog of NCBI NO: 11360494 NR Description: antifreeze glycopeptide AFGP polyprotein
  misc_feature (107)..(208): Homolog of NCBI NO: 11360494 NR Description: antifreeze glycopeptide AFGP polyprotein
  misc_feature (148)..(208): Homolog of NCBI NO: 11360494 NR Description: antifreeze glycopeptide AFGP polyprotein
  misc_feature (149)..(208): Homolog of NCBI NO: 28574039 NR Description: Salivary gland secretion 1 CG3047-PA
  misc_feature (149)..(208): Homolog of NCBI NO: 13592175 NR Description: ppg3 [Leishmania major]
  misc_feature (149)..(208): Homolog of NCBI NO: 28574039 NR Description: Salivary gland secretion 1 CG3047-PA
  misc_feature (135)..(208): Homolog of NCBI NO: 13592175 NR Description: ppg3 [Leishmania major]
  misc_feature (135)..(208): Homolog of NCBI NO: 13592175 NR Description: ppg3 [Leishmania major]
  misc_feature (135)..(208): Homolog of NCBI NO: 13592175 NR Description: ppg3 [Leishmania major]
  misc_feature (103)..(208): Homolog of NCBI NO: 11360494 NR Description: antifreeze glycopeptide AFGP polyprotein
TAKAALLKPPLWPHTRILPPLLLHQQLAASGRWCSAAPAPGNRTHGSDDLNHAHARRRPGLVSHYAQAAARRLPGRAAGLGHHRRVEAARSPGRRVGGRRPHAVRLRPAHAVVPLHPEGALLPGTRPAHVLGRVAAPVLAVAGARRPSRPSPAASSRCPTTASSSAATTRAWTSSTPSHPACRLTTFSSLTPTCRPSTQRTCSPWTGP

SEQ ID NO: 18422 - DNA, 1556 bp, Zea mays subsp. mays
  misc_feature (1)..(1556): Ceres Seq. ID no. 12417369
  misc_feature: MA Experiment ID: 108522 Result: Down-regulated in Transcription
  misc_feature: MA Experiment 108522 PARAMETER Experiment Name: Zm_42deg_Heat_P Parameter: Age (day) Value: 8
  misc_feature: MA Experiment 108522 PARAMETER Experiment Name: Zm_42deg_Heat_P Parameter: Organism Value: Zea mays
  misc_feature: MA Experiment 108522 PARAMETER Experiment Name: Zm_42deg_Heat_P Parameter: Plant Line Value: 35A19
  misc_feature: MA Experiment 108522 PARAMETER Experiment Name: Zm_42deg_Heat_P Parameter: Temperature (deg C) Value: 42 vs. 22
  misc_feature: MA Experiment 108522 PARAMETER Experiment Name: Zm_42deg_Heat_P Parameter: Timepoint (hr) Value: 1
  misc_feature: MA Experiment 108522 PARAMETER Experiment Name: Zm_42deg_Heat_P Parameter: Tissue Value: Aerial
  misc_feature: MA Experiment ID: 108536 Result: Down-regulated in Transcription
  misc_feature: MA Experiment 108536 PARAMETER Experiment Name: Zm_Meristem_P Parameter: Age (day) Value: 8
  misc_feature: MA Experiment 108536 PARAMETER Experiment Name: Zm_Meristem_P Parameter: Organism Value: Zea mays
  misc_feature: MA Experiment 108536 PARAMETER Experiment Name: Zm_Meristem_P Parameter: Plant Line Value: 35A19
  misc_feature: MA Experiment 108536 PARAMETER Experiment Name: Zm_Meristem_P Parameter: Tissue Value: Shoot Meristem vs. Above Shoot Meristem
  misc_feature: MA Experiment ID: 108543 Result: Down-regulated in Transcription
  misc_feature: MA Experiment ID: 108556 Result: Down-regulated in Transcription
  misc_feature: MA Experiment 108556 PARAMETER Experiment Name: Zm_Drought_P Parameter: Age (day) Value: 9
  misc_feature: MA Experiment 108556 PARAMETER Experiment Name: Zm_Drought_P Parameter: Organism Value: Zea mays
  misc_feature: MA Experiment 108556 PARAMETER Experiment Name: Zm_Drought_P Parameter: Plant Line Value: 35A19
  misc_feature: MA Experiment 108556 PARAMETER Experiment Name: Zm_Drought_P Parameter: Timepoint (hr) Value: 24
  misc_feature: MA Experiment 108556 PARAMETER Experiment Name: Zm_Drought_P Parameter: Tissue Value: Aerial
  misc_feature: MA Experiment 108556 PARAMETER Experiment Name: Zm_Drought_P Parameter: Treatment Value: Drought vs. No Drought
  misc_feature: MA Experiment ID: 108597 Result: Down-regulated in Transcription
  misc_feature: MA Experiment 108597 PARAMETER Experiment Name: Zm_100uM_ABA_P Parameter: Age (day) Value: 9
  misc_feature: MA Experiment 108597 PARAMETER Experiment Name: Zm_100uM_ABA_P Parameter: Organism Value: Zea mays
  misc_feature: MA Experiment 108597 PARAMETER Experiment Name: Zm_100uM_ABA_P Parameter: Plant Line Value: 35A19
  misc_feature: MA Experiment 108597 PARAMETER Experiment Name: Zm_100uM_ABA_P Parameter: Timepoint (hr) Value: 24
  misc_feature: MA Experiment 108597 PARAMETER Experiment Name: Zm_100uM_ABA_P Parameter: Tissue Value: Aerial
  misc_feature: MA Experiment 108597 PARAMETER Experiment Name: Zm_100uM_ABA_P Parameter: Treatment Value: 100uM ABA vs. No Treatment
  misc_feature: MA Experiment ID: 108599 Result: Down-regulated in Transcription
  misc_feature: MA Experiment 108599 PARAMETER Experiment Name: Zm_RT1_P Parameter: Age (day) Value: 11
  misc_feature: MA Experiment 108599 PARAMETER Experiment Name: Zm_RT1_P Parameter: Organism Value: Zea mays
  misc_feature: MA Experiment 108599 PARAMETER Experiment Name: Zm_RT1_P Parameter: Plant Line Value: rt1 mut vs. rt1 wt
  misc_feature: MA Experiment 108599 PARAMETER Experiment Name: Zm_RT1_P Parameter: Tissue Value: Roots
  misc_feature: MA Experiment ID: 20000478 Result: Up-regulated in Transcription
  misc_feature: MA Experiment 20000478 PARAMETER Experiment Name: Zm_5mM_SA_P Parameter: Age (day) Value: 11
  misc_feature: MA Experiment 20000478 PARAMETER Experiment Name: Zm_5mM_SA_P Parameter: Organism Value: Zea mays
  misc_feature: MA Experiment 20000478 PARAMETER Experiment Name: Zm_5mM_SA_P Parameter: Plant Line Value: 35A19
  misc_feature: MA Experiment 20000478 PARAMETER Experiment Name: Zm_5mM_SA_P Parameter: Timepoint (hr) Value: 72
  misc_feature: MA Experiment 20000478 PARAMETER Experiment Name: Zm_5mM_SA_P Parameter: Tissue Value: Aerial
  misc_feature: MA Experiment 20000478 PARAMETER Experiment Name: Zm_5mM_SA_P Parameter: Treatment Value: 5mM SA vs. No Treatment
  misc_feature: MA Experiment ID: 20000479 Result: Down-regulated in Transcription
  misc_feature: MA Experiment 20000479 PARAMETER Experiment Name: Zm_Drought_P Parameter: Age (day) Value: 10
  misc_feature: MA Experiment 20000479 PARAMETER Experiment Name: Zm_Drought_P Parameter: Organism Value: Zea mays
  misc_feature: MA Experiment 20000479 PARAMETER Experiment Name: Zm_Drought_P Parameter: Plant Line Value: 35A19
  misc_feature: MA Experiment 20000479 PARAMETER Experiment Name: Zm_Drought_P Parameter: Timepoint (hr) Value: 48
  misc_feature: MA Experiment 20000479 PARAMETER Experiment Name: Zm_Drought_P Parameter: Tissue Value: Aerial
  misc_feature: MA Experiment 20000479 PARAMETER Experiment Name: Zm_Drought_P Parameter: Treatment Value: Drought vs. No Drought
  misc_feature: MA Experiment ID: 20000480 Result: Down-regulated in Transcription
  misc_feature: MA Experiment 20000480 PARAMETER Experiment Name: Zm_Drought_P Parameter: Age (day) Value: 11
  misc_feature: MA Experiment 20000480 PARAMETER Experiment Name: Zm_Drought_P Parameter: Organism Value: Zea mays
  misc_feature: MA Experiment 20000480 PARAMETER Experiment Name: Zm_Drought_P Parameter: Plant Line Value: 35A19
  misc_feature: MA Experiment 20000480 PARAMETER Experiment Name: Zm_Drought_P Parameter: Timepoint (hr) Value: 72
  misc_feature: MA Experiment 20000480 PARAMETER Experiment Name: Zm_Drought_P Parameter: Tissue Value: Aerial
  misc_feature: MA Experiment 20000480 PARAMETER Experiment Name: Zm_Drought_P Parameter: Treatment Value: Drought vs. No Drought
  misc_feature: MA Experiment ID: 20000488 Result: Down-regulated in Transcription
  misc_feature: MA Experiment 20000488 PARAMETER Experiment Name: Zm_50mM_NH4NO3_L_to_H_P Parameter: Organism Value: Zea mays
  misc_feature: MA Experiment 20000488 PARAMETER Experiment Name: Zm_50mM_NH4NO3_L_to_H_P Parameter: Timepoint (hr) Value: 8
  misc_feature: MA Experiment 20000488 PARAMETER Experiment Name: Zm_50mM_NH4NO3_L_to_H_P Parameter: Tissue Value: Leaves
  misc_feature: MA Experiment 20000488 PARAMETER Experiment Name: Zm_50mM_NH4NO3_L_to_H_P Parameter: Treatment Value: 50mM NH4NO3 vs. 100mM Mannitol
  misc_feature: MA Experiment ID: 20000626 Result: Down-regulated in Transcription
  misc_feature: MA Experiment 20000626 PARAMETER Experiment Name: Zm_Herbicide-Treatments_P Parameter: Timepoint (hr) Value: 12
  misc_feature: MA Experiment 20000626 PARAMETER Experiment Name: Zm_Herbicide-Treatments_P Parameter: Tissue Value: Aerial
  misc_feature: MA Experiment 20000626 PARAMETER Experiment Name: Zm_Herbicide-Treatments_P Parameter: Treatment Value: Roundup vs. No Treatment
acgcagctcacgtacacgcgatgagcacaccgcgtcgcggcgggcagcaccacggcgacaagcgcaccgtgacacgagcagcctcccgaaacagcgacggacacggcgcaggcgacttgagcttcgggtccacggcggggcctcggttcgccgtcgccccgccgcgcccttgggcgccgccgcctgagcacgcggccgtcttcgcgcagccaccagacgatccgtcgacgttgaccatgctgtggggaccgcccggcgaggtgcccgttgccggcttcgctgcggcaccggaagggcgaccggatgcgttcgctggcagcgcgtcgtgcctgccgctcgcgaggcaggtcggcggccagcagggggcgcgcaacggcgcaacttcgtggtgtcgccgctgtcgttccacgcggcgctcgcgctggtggccgcgggcgcgcggggcgagacgcagcgggagctcctgcgcttcttggactccgagtcgctggtcgagctgcaccgcgccgcggcgacggcgctggtcgccaggctcagcgacctcccgcaggcgtccttcgcctgcggcgtctgggtggaccggagccgcgcgctcacgccggagttcatagaaaccgccgcgtcgcgctacgcggcggtcgcggagtccgtcgacttcttgaagaactccgaaggcggcaagggcagcaagtcaacgacttcgtgaaaggagcaacgaaagggctcatcgacgacgtcctgcctcccggctccgtcgactcgtccacggcgctcgtcctcgccaacgccatctacttcaagggggcgtgggctcggccgttcgatccgtcgagaaccatcttcgcgccgttccatctccccgacggcggcaccgtgcgcgtgccgttcatgactacgactacgagcggtttcgaggaccagcgggttgccgtgttccccggattcaaggcgctcaagctgccctacaagaacgacggcggcgcgcagcaggacgcgttctacatgcttctactcctccccgacggtgagaccctaaccctcaatgatctctatgataaggtcgtgtcgtcgccgggattcatcaggaagcacacgccggtggacgaggtcccggtcgggcggttcatggtgccgaagttcaagttcacgttcgagtttgaggcgtctcacgatatccagaagctgggagtcaaccgagcctttcaaagcggtgacttctccggcatggtctccggtggaaacgggctcatcatctcaggagtgtaccacaaggcaaccgtagaggtggacgaggccggcaccgtggccgccgcggccacggtcgagttcatgtcgtttgtatgtgcaagaatcgatccgcctgtggatttcgtggcggaccggccgttcttgttcgccatcgtggagagaagtggcgtcgtgctgtttcttgggcatgtggtgaaccctctggttgagtgatgacacaggagtggcagctatattttagtcgttatggctttacggaaatgacgttgttatttaacaataaataaataccgtccattatgtggttc

SEQ ID NO: 18423 - protein, 385 aa, Zea mays subsp. mays
  peptide (1)..(385): Ceres Seq. ID no. 12417370
  misc_feature (128)..(382): Pfam Name: Serpin (serine protease inhibitor) Pfam Description: Serpin (serine protease inhibitor)
  misc_feature (129)..(384): Homolog of NCBI NO: 7438218 NR Description: serpin - barley
  misc_feature (129)..(384): Homolog of NCBI NO: 5734504 NR Description: serpin [Triticum aestivum]
  misc_feature (128)..(385): Homolog of NCBI NO: 34903126 NR Description: unnamed protein product [Oryza sativa (japonica
MRSLAARRACRSRGRSAASRGRATAQLRGVAAVVPRGARAGGRGRAGRDAAGAPALLGLRVAGRAAPRRGDGAGRQAQRPPAGVLRLRRLGGPEPRAHAGVHRNRRVALRGGRGVRRLLEELRRRQGQQVNDFVKGATKGLIDDVLPPGSVDSSTALVLANAIYFKGAWARPFDPSRTIFAPFHLPDGGTVRVPFMTTTTSGFEDQRVAVFPGFKALKLPYKNDGGAQQDAFYMLLLLPDGETLTLNDLYDKVVSSPGFIRKHTPVDEVPVGRFMVPKFKFTFEFEASHDIQKLGVNRAFQSGDFSGMVSGGNGLIISGVYHKATVEVDEAGTVAAAATVEFMSFVCARIDPPVDFVADRPFLFAIVERSGVVLFLGHVVNPLVE

SEQ ID NO: 18424 - protein, 202 aa, Zea mays subsp. mays
  peptide (1)..(202): Ceres Seq. ID no. 12417371
AAHVHAMSTPRRGGQHHGDKRTVTRAASRNSDGHGAGDLSFGSTAGPRFAVAPPRPWAPPPEHAAVFAQPPDDPSTLTMLWGPPGEVPVAGFAAAPEGRPDAFAGSASCLPLARQVGGQQGARNGATSWCRRCRSTRRSRWWPRARGARRSGSSCASWTPSRWSSCTAPRRRRWSPGSATSRRRPSPAASGWTGAARSRRSS

SEQ ID NO: 18425 - protein, 196 aa, Zea mays subsp. mays
  peptide (1)..(196): Ceres Seq. ID no. 12417372
MSTPRRGGQHHGDKRTVTRAASRNSDGHGAGDLSFGSTAGPRFAVAPPRPWAPPPEHAAVFAQPPDDPSTLTMLWGPPGEVPVAGFAAAPEGRPDAFAGSASCLPLARQVGGQQGARNGATSWCRRCRSTRRSRWWPRARGARRSGSSCASWTPSRWSSCTAPRRRRWSPGSATSRRRPSPAASGWTGAARSRRSS

SEQ ID NO: 18426 - DNA, 2453 bp, Zea mays subsp. mays
  misc_feature (1)..(2453): Ceres Seq. ID no. 12361174
  misc_feature: MA Experiment ID: 108535 Result: Up-regulated in Transcription
  misc_feature: MA Experiment 108535 PARAMETER Experiment Name: Zm_Meristem_P Parameter: Age (day) Value: 8
  misc_feature: MA Experiment 108535 PARAMETER Experiment Name: Zm_Meristem_P Parameter: Organism Value: Zea mays
  misc_feature: MA Experiment 108535 PARAMETER Experiment Name: Zm_Meristem_P Parameter: Plant Line Value: 35A19
  misc_feature: MA Experiment 108535 PARAMETER Experiment Name: Zm_Meristem_P Parameter: Tissue Value: Root Meristem vs. Above Root Meristem
gcacgagaccattacctagaacatcctaatcaaaaagtaaattcttataatagcttacagggaaaagactcttcaatctgaagcaaaatgtaccgggaatgttgaagagcgggactcttaagcagtagtgagatgcggcggtggtggtcgccggcgttggcggctgtggagccgcggtccgtgcagctcctgctcctgggcgtcgctctcgtcgcagcttctttctacgccggcaccctcttcggctcctccgcgtcccctgcgctcgtactgcccccttcgcgcccccgatcgcccgattccttcagggccaaagttacagatgttccagtgtttaccaacagagtttctcgtacgtaccgggcaaaatcagtgacagttccagatcacggagttgatgtgtgtcctttggaatacaatgagtatgtcccctgccatgatggagcctatataagcagcttgaagagcctggatacatctaggcatgaggatcttgaaagtatttgtcctccatgggagaagcggttgttttgtttggtgccccctccaaatgactacaagataccaataagatggccaacaagccgagactacgtatggcgtagtaatgtcaaccattcacatcttgctgaggtcaaaggaggacagaactgggtgcatgagaagggcaaactttggtggtttcctggaggtggcactcacttcaaacatggtgcatcagaatacatagagaggctaggaaatatgacgacaaatagtactggtgatcttcgttctgccggagtagttcaagttttggatgttggatgtggtgttgctagcttttctgcatatcttcttccgctagacattcgaaccatgtcatttgctccaaaagatggccatgagaatcaaatccagtttgctttagaacgtgggattggtgcaatgatctctgtgttggccacaaaacaattaccttatcctgaaaattcatttgaaatggttcactgttcaagatgtcgtgttgattggcatgaaaatgatggaatattactcaaagaggtagaccgtcttttgcgacctaatgggtattttgtatactctgctccaccagcttatagaaaagataaggactttcctgttatttgggagaagctagttaatattacaacaacaatgtgttggaagcttattgctaagcatgttcaaacagctatttgggttaaacctgaagatgagtcctgcagacagaaaaatgttgatatgaatctactgagtatttgtgaatccaatgacaacatttcaccatcatggaaaattccgttaatgaattgtgtgaagctcaacaaggacaaatccaatattcagaaattgccttccagatctgatcgcctatcattttattccaagagtttggagataataggagttgcaccagagaggtttgagaagaataaccagttctggaagaaccaggttcacaagtattggtcatttcttcatgttgaaaagactagcattcgaaacgtcatggacatgaatgctaattatggtggatttgctgcagcactaagcagtgaccctgtctggattatgaatatagtaccctataccatgatgaacacattgcctgttatctatgaccgtgggttactcggttcttaccatgactggtgtgagccattctcaacatatcctagatcctatgacttgttgcatgctttccacctcttttctcattataaacgccgcaaggaagattgtttgttggaggatatcatgttagaaatggatcgcatcattcgaccacagggttttatcattattagagacgagaatgacactctctcaagaatcatcaatctagcaccgaagttcctttgggatgttaccacgcacatgttggaaaatgaggaaagcgggacagatcaagttctgttttgcaggaagaaattctgggctattgtttgagttatacttgggtggaaattgggaagctgccatattttatcctacttttggttgccctttgtatcagtgacagagcagagcgtaaggagagctgtttggcatgatagatgttccaatgaaacataatatttcattgcacgttctctgcagttgacagtagtgcattgttgagaaggcatatggtacggtggtgcggttgacagggttatccagaaactagctcggataatttttgcttttgagctgtactatttgtctacgaaggacatgggtgagccggtaaggtgtagtcttactgacagtgtttgtagtttctctcataatgaatagccgttaattcttttgttatcttattcactaatggctaattaggtttaggttctcaagttctcaacaatatgttggtagtgctgtttctgttgttccatctggggagcatctgtagtactataaaccttatgtaaggtactgtttccagccaatgccgaggtgcatttgtt

SEQ ID NO: 18427 - protein, 606 aa, Zea mays subsp. mays
  peptide (1)..(606): Ceres Seq. ID no. 12361175
  misc_feature (97)..(600): Pfam Name: Putative methyltransferase Pfam Description: Putative methyltransferase
  misc_feature (20)..(603): Homolog of NCBI NO: 14423548 NR Description: Unknown protein [Arabidopsis thaliana]
  misc_feature (20)..(603): Homolog of NCBI NO: 21536697 NR Description: ankyrin-like protein [Arabidopsis thaliana]
  misc_feature (20)..(603): Homolog of NCBI NO: 18390392 NR Description: ankyrin-like protein
  misc_feature (90)..(603): Homolog of NCBI NO: 18414198 NR Description: ankyrin like protein
  misc_feature (88)..(605): Homolog of NCBI NO: 11357548 NR Description: hypothetical protein F18O22.220 - Arabidopsis
  misc_feature (83)..(605): Homolog of NCBI NO: 22326809 NR Description: putative protein
  misc_feature (90)..(603): Homolog of NCBI NO: 37535372 NR Description: hypothetical protein [Oryza sativa (japonica
  misc_feature (88)..(606): Homolog of NCBI NO: 6056205 NR Description: unknown protein [Arabidopsis thaliana]
  misc_feature (15)..(606): Homolog of NCBI NO: 30681189 NR Description: dehydration-induced protein-related [Arabidopsis
  misc_feature (15)..(606): Homolog of NCBI NO: 15237607 NR Description: putative protein
MRRWWSPALAAVEPRSVQLLLLGVALVAASFYAGTLFGSSASPALVLPPSRPRSPDSFRAKVTDVPVFTNRVSRTYRAKSVTVPDHGVDVCPLEYNEYVPCHDGAYISSLKSLDTSRHEDLESICPPWEKRLFCLVPPPNDYKIPIRWPTSRDYVWRSNVNHSHLAEVKGGQNWVHEKGKLWWFPGGGTHFKHGASEYIERLGNMTTNSTGDLRSAGVVQVLDVGCGVASFSAYLLPLDIRTMSFAPKDGHENQIQFALERGIGAMISVLATKQLPYPENSFEMVHCSRCRVDWHENDGILLKEVDRLLRPNGYFVYSAPPAYRKDKDFPVIWEKLVNITTTMCWKLIAKHVQTAIWVKPEDESCRQKNVDMNLLSICESNDNISPSWKIPLMNCVKLNKDKSNIQKLPSRSDRLSFYSKSLEIIGVAPERFEKNNQFWKNQVHKYWSFLHVEKTSIRNVMDMNANYGGFAAALSSDPVWIMNIVPYTMMNTLPVIYDRGLLGSYHDWCEPFSTYPRSYDLLHAFHLFSHYKRRKEDCLLEDIMLEMDRIIRPQGFIIIRDENDTLSRIINLAPKFLWDVTTHMLENEESGTDQVLFCRKKFWAIV

SEQ ID NO: 18428 - protein, 402 aa, Zea mays subsp. mays
  peptide (1)..(402): Ceres Seq. ID no. 12361176
  misc_feature (1)..(396): Pfam Name: Putative methyltransferase Pfam Description: Putative methyltransferase
  misc_feature (1)..(399): Homolog of NCBI NO: 18414198 NR Description: ankyrin like protein
  misc_feature (1)..(401): Homolog of NCBI NO: 11357548 NR Description: hypothetical protein F18O22.220 - Arabidopsis
  misc_feature (1)..(401): Homolog of NCBI NO: 22326809 NR Description: putative protein
  misc_feature (1)..(399): Homolog of NCBI NO: 37535372 NR Description: hypothetical protein [Oryza sativa (japonica
  misc_feature (1)..(399): Homolog of NCBI NO: 21536697 NR Description: ankyrin-like protein [Arabidopsis thaliana]
  misc_feature (1)..(399): Homolog of NCBI NO: 18390392 NR Description: ankyrin-like protein
  misc_feature (1)..(399): Homolog of NCBI NO: 14423548 NR Description: Unknown protein [Arabidopsis thaliana]
  misc_feature (1)..(402): Homolog of NCBI NO: 6056205 NR Description: unknown protein [Arabidopsis thaliana]
  misc_feature (1)..(402): Homolog of NCBI NO: 30681189 NR Description: dehydration-induced protein-related [Arabidopsis
  misc_feature (1)..(402): Homolog of NCBI NO: 15237607 NR Description: putative protein
MTTNSTGDLRSAGVVQVLDVGCGVASFSAYLLPLDIRTMSFAPKDGHENQIQFALERGIGAMISVLATKQLPYPENSFEMVHCSRCRVDWHENDGILLKEVDRLLRPNGYFVYSAPPAYRKDKDFPVIWEKLVNITTTMCWKLIAKHVQTAIWVKPEDESCRQKNVDMNLLSICESNDNISPSWKIPLMNCVKLNKDKSNIQKLPSRSDRLSFYSKSLEIIGVAPERFEKNNQFWKNQVHKYWSFLHVEKTSIRNVMDMNANYGGFAAALSSDPVWIMNIVPYTMMNTLPVIYDRGLLGSYHDWCEPFSTYPRSYDLLHAFHLFSHYKRRKEDCLLEDIMLEMDRIIRPQGFIIIRDENDTLSRIINLAPKFLWDVTTHMLENEESGTDQVLFCRKKFWAIV

SEQ ID NO: 18429 - protein, 364 aa, Zea mays subsp. mays
  peptide (1)..(364): Ceres Seq. ID no. 12361177
  misc_feature (1)..(358): Pfam Name: Putative methyltransferase Pfam Description: Putative methyltransferase
  misc_feature (1)..(361): Homolog of NCBI NO: 14423548 NR Description: Unknown protein [Arabidopsis thaliana]
  misc_feature (1)..(361): Homolog of NCBI NO: 21536697 NR Description: ankyrin-like protein [Arabidopsis thaliana]
  misc_feature (1)..(361): Homolog of NCBI NO: 18390392 NR Description: ankyrin-like protein
  misc_feature (1)..(361): Homolog of NCBI NO: 18414198 NR Description: ankyrin like protein
  misc_feature (1)..(363): Homolog of NCBI NO: 11357548 NR Description: hypothetical protein F18O22.220 - Arabidopsis
  misc_feature (1)..(363): Homolog of NCBI NO: 22326809 NR Description: putative protein
  misc_feature (1)..(361): Homolog of NCBI NO: 37535372 NR Description: hypothetical protein [Oryza sativa (japonica
  misc_feature (1)..(364): Homolog of NCBI NO: 6056205 NR Description: unknown protein [Arabidopsis thaliana]
  misc_feature (1)..(364): Homolog of NCBI NO: 30681189 NR Description: dehydration-induced protein-related [Arabidopsis
  misc_feature (1)..(364): Homolog of NCBI NO: 15237607 NR Description: putative protein
MSFAPKDGHENQIQFALERGIGAMISVLATKQLPYPENSFEMVHCSRCRVDWHENDGILLKEVDRLLRPNGYFVYSAPPAYRKDKDFPVIWEKLVNITTTMCWKLIAKHVQTAIWVKPEDESCRQKNVDMNLLSICESNDNISPSWKIPLMNCVKLNKDKSNIQKLPSRSDRLSFYSKSLEIIGVAPERFEKNNQFWKNQVHKYWSFLHVEKTSIRNVMDMNANYGGFAAALSSDPVWIMNIVPYTMMNTLPVIYDRGLLGSYHDWCEPFSTYPRSYDLLHAFHLFSHYKRRKEDCLLEDIMLEMDRIIRPQGFIIIRDENDTLSRIINLAPKFLWDVTTHMLENEESGTDQVLFCRKKFWAIV

SEQ ID NO: 18430 - DNA, 2854 bp, Zea mays subsp. mays
  misc_feature (1)..(2854): Ceres Seq. ID no. 12417119
  misc_feature: MA Experiment ID: 108522 Result: Up-regulated in Transcription
  misc_feature: MA Experiment 108522 PARAMETER Experiment Name: Zm_42deg_Heat_P Parameter: Age (day) Value: 8
  misc_feature: MA Experiment 108522 PARAMETER Experiment Name: Zm_42deg_Heat_P Parameter: Organism Value: Zea mays
  misc_feature: MA Experiment 108522 PARAMETER Experiment Name: Zm_42deg_Heat_P Parameter: Plant Line Value: 35A19
  misc_feature: MA Experiment 108522 PARAMETER Experiment Name: Zm_42deg_Heat_P Parameter: Temperature (deg C) Value: 42 vs. 22
  misc_feature: MA Experiment 108522 PARAMETER Experiment Name: Zm_42deg_Heat_P Parameter: Timepoint (hr) Value: 1
  misc_feature: MA Experiment 108522 PARAMETER Experiment Name: Zm_42deg_Heat_P Parameter: Tissue Value: Aerial
  misc_feature: MA Experiment ID: 108523 Result: Up-regulated in Transcription
  misc_feature: MA Experiment 108523 PARAMETER Experiment Name: Zm_42deg_Heat_P Parameter: Age (day) Value: 8
  misc_feature: MA Experiment 108523 PARAMETER Experiment Name: Zm_42deg_Heat_P Parameter: Organism Value: Zea mays
  misc_feature: MA Experiment 108523 PARAMETER Experiment Name: Zm_42deg_Heat_P Parameter: Plant Line Value: 35A19
  misc_feature: MA Experiment 108523 PARAMETER Experiment Name: Zm_42deg_Heat_P Parameter: Temperature (deg C) Value: 42 vs. 22
  misc_feature: MA Experiment 108523 PARAMETER Experiment Name: Zm_42deg_Heat_P Parameter: Timepoint (hr) Value: 6
  misc_feature: MA Experiment 108523 PARAMETER Experiment Name: Zm_42deg_Heat_P Parameter: Tissue Value: Aerial
  misc_feature: MA Experiment ID: 108543 Result: Up-regulated in Transcription
  misc_feature: MA Experiment ID: 20000477 Result: Down-regulated in Transcription
  misc_feature: MA Experiment 20000477 PARAMETER Experiment Name: Zm_5mM_SA_P Parameter: Age (day) Value: 10
  misc_feature: MA Experiment 20000477 PARAMETER Experiment Name: Zm_5mM_SA_P Parameter: Organism Value: Zea mays
  misc_feature: MA Experiment 20000477 PARAMETER Experiment Name: Zm_5mM_SA_P Parameter: Plant Line Value: 35A19
  misc_feature: MA Experiment 20000477 PARAMETER Experiment Name: Zm_5mM_SA_P Parameter: Timepoint (hr) Value: 48
  misc_feature: MA Experiment 20000477 PARAMETER Experiment Name: Zm_5mM_SA_P Parameter: Tissue Value: Aerial
  misc_feature: MA Experiment 20000477 PARAMETER Experiment Name: Zm_5mM_SA_P Parameter: Treatment Value: 5mM SA vs. No Treatment
  misc_feature: MA Experiment ID: 20000492 Result: Down-regulated in Transcription
  misc_feature: MA Experiment 20000492 PARAMETER Experiment Name: Zm_Hybrid_Seed_Dev_P Parameter: DAP Value: 12
  misc_feature: MA Experiment 20000492 PARAMETER Experiment Name: Zm_Hybrid_Seed_Dev_P Parameter: Organism Value: Zea mays
  misc_feature: MA Experiment 20000492 PARAMETER Experiment Name: Zm_Hybrid_Seed_Dev_P Parameter: Plant Line Value: 35A19
  misc_feature: MA Experiment 20000492 PARAMETER Experiment Name: Zm_Hybrid_Seed_Dev_P Parameter: Tissue Value: Fert Kernel vs. Unfert Floret
  misc_feature: MA Experiment ID: 20000626 Result: Down-regulated in Transcription
  misc_feature: MA Experiment 20000626 PARAMETER Experiment Name: Zm_Herbicide-Treatments_P Parameter: Timepoint (hr) Value: 12
  misc_feature: MA Experiment 20000626 PARAMETER Experiment Name: Zm_Herbicide-Treatments_P Parameter: Tissue Value: Aerial
  misc_feature: MA Experiment 20000626 PARAMETER Experiment Name: Zm_Herbicide-Treatments_P Parameter: Treatment Value: Roundup vs. No Treatment
  misc_feature: MA Experiment ID: 20000629 Result: Down-regulated in Transcription
  misc_feature: MA Experiment 20000629 PARAMETER Experiment Name: Zm_Herbicide-Treatments_P Parameter: Timepoint (hr) Value: 12
  misc_feature: MA Experiment 20000629 PARAMETER Experiment Name: Zm_Herbicide-Treatments_P Parameter: Tissue Value: Aerial
  misc_feature: MA Experiment 20000629 PARAMETER Experiment Name: Zm_Herbicide-Treatments_P Parameter: Treatment Value: Trimec vs. No Treatment
actcgtcaggcccttccgccgtcccggaggctcgaacccctcggcccgcggacgggaccctaaacccgccccaccactcgcgcggggttcgcccgcgacccatgcgcggcggcggctggtaccctcggcagccggcgatcgccggaaatctgcggggacagtgcggcggcttgcacgagtgccggacacggcgggagtggggaacgtaggggagatggcggcgggaggaaagggctgggcggagcgggtacgccgcggggcgaggaccgcttggttcatggtggccatggtggcctcgctgctcgtggcgtcgtcgccggcgctggtggcggcggtcgacatggcagtggcgctctggctcgaggcgcggctcggctgcttccgaggcgacggcctgcggggccacctccagcgctaccgttttcggaactcgcttgccgacatacctctcgtctccgtcgttcgatccatcgtcatcacctgtaagccctcccgctgcctgctaactcattgatgctttagaatgggcagatggcctaaaaaccaacccgttcgcttgagttcgatttccttttcttctactatttctcccctttgtggtttatttgctctggtgatgtagagagtgtttactgtttagaatcatttttttgggtgaggtcttagcttgagaagatcttttcgcattcctctatgaggatttggtgatctgaaagctacagtactcactacggctgtgcttgtcttcttttgcttgcacggagctttcggcggaatctgcgtgtatctgcagttattaatcacagagtatagctgttgcctgctctcttttcttgggaggtagttaaactaagcctgttgtttagctggacctggactggttgtaagaaattgggaacctctcgaataccaaattctgctctgttcttaatttgagggcaaagactaaccttatgttctgcggcttctgcaggtgtgtacctcatgtctgatacttctggcctctctcatggtccttaccttggaacaacaactttctgttccttggcttctctgctcatcttgttaattaaggcatctgtttatagtccggcgcaggacattgggcctgagctctcgccgtcgttaccagatcacaagctcaatctcaagaatctatggggaatgcctgtacttttcctgtcttccttggtgtttgctcttggccatgttattgttgcttacagaacaagcggcagggctcgacggaagcttctcattcaccgcattgaccctgaatcgattttagcatacaagaatgccttttctggatgctacaaggttccacggtctcctacaccatacagcggaaagctttttacaaggagtgaaagtgagactaagagaaaatcacttatccaggacgatcgtgatttgccaatcagttttcttgcagacagtgatagcatgttcattgcttgccaggggatcactatacactacaaagtttccgatccagcagccagcctaccttcatcccctggcttcttttcagagagagatactcatcacgatgtaatttcatcaagcatttctcctagaagacagaggcatgagagtccaccatctgcttcctctaatacccgtcgcgttctgaataggagctttagccatcaataccataatacttcgctatatgcaccactattggtagaaccagtggcatctccaactttgttggatgatattcctctgatgtgtattgatgatggcaatgctgatggatgtctgagtcatgtgggctttgaccttgaggctggagggcagggtaaattcgctgtagttttggtgcatggatttggagggggagtattctcgtggagacatgtttccaatttgttagctcgacaattgggatgcactgtgatggcatttgatcgcccaggatggggattaacatctcgacctcgtaggaaggactgggaagataagaagttaccgaatccatatgagctggagtctcaggttgatcttcttatttcattttgttcagagatgggcttgcactctgtggttttagttggtcatgatgatgggggcttgcttgccttgaaggctgcggagaagctgcgcacttatggaggtgacagagaggttgaagtgaagggagtagttcttattggtgtgagcttatcaagagaagtcattcctgcatttgctcgtatactcctgcatacacctctgaggaaaaagcacatggttcgaccacttctacgtactgaaatcgttcaagttatcaatcggcgggcatggtatgatgccacaaagttgacgacagaaatacttaacctatacaaggctccgctatttgttgagggctgggatgaagcacttcatgaagtaggccggctttcgttttctactgtcctgccatcaaaacgagcagcggatctactaagatcagtggaagaccttccggttctggtggtagcgggctccgaggatgctcttgtttctctgaagtcggcacaagccatggcttcgaaatttgtaaattctaggatagtaattatatcggggtgtggacatctgccgcacgaggagtgccccaaggcgttgctctcggctcttgctcctttcatctctacattggtaccctcagaagatttgttgcaaagactgtagaatatactcgttcctttttcgtttttttaagaacttttttctagctggtgagtttgtatgagcccattgtagcgcgaagtagtagtggagcctgacccaaaatctcaagggttcctagagctcccctgatttttttgtcacatgttaatggttccccctgaacgatttcaattaagcaagttgaatgtgt

SEQ ID NO: 18431 - protein, 559 aa, Zea mays subsp. mays
  peptide (1)..(559): Ceres Seq. ID no. 12417120
  misc_feature (305)..(544): Pfam Name: alpha/beta hydrolase fold Pfam Description: alpha/beta hydrolase fold
  misc_feature (1)..(113): Homolog of NCBI NO: 30688139 NR Description: expressed protein [Arabidopsis thaliana]
  misc_feature (276)..(371): Homolog of NCBI NO: 30681503 NR Description: hydrolase, alpha/beta fold family [Arabidopsis
  misc_feature (386)..(546): Homolog of NCBI NO: 30681503 NR Description: hydrolase, alpha/beta fold family [Arabidopsis
  misc_feature (276)..(371): Homolog of NCBI NO: 6630546 NR Description: putative alpha/beta hydrolase [Arabidopsis
  misc_feature (386)..(546): Homolog of NCBI NO: 6630546 NR Description: putative alpha/beta hydrolase [Arabidopsis
  misc_feature (44)..(551): Homolog of NCBI NO: 22330208 NR Description: unknown protein
  misc_feature (44)..(551): Homolog of NCBI NO: 25405595 NR Description: unknown protein, 18223-15857 [imported] -
  misc_feature (1)..(555): Homolog of NCBI NO: 15218212 NR Description: unknown protein
  misc_feature (1)..(554): Homolog of NCBI NO: 15220097 NR Description: unknown protein
  misc_feature (1)..(559): Homolog of NCBI NO: 34911750 NR Description: P0038D11.18 [Oryza sativa (japonica
MSDTSGLSHGPYLGTTTFCSLASLLILLIKASVYSPAQDIGPELSPSLPDHKLNLKNLWGMPVLFLSSLVFALGHVIVAYRTSGRARRKLLIHRIDPESILAYKNAFSGCYKVPRSPTPYSGKLFTRSESETKRKSLIQDDRDLPISFLADSDSMFIACQGITIHYKVSDPAASLPSSPGFFSERDTHHDVISSSISPRRQRHESPPSASSNTRRVLNRSFSHQYHNTSLYAPLLVEPVASPTLLDDIPLMCIDDGNADGCLSHVGFDLEAGGQGKFAVVLVHGFGGGVFSWRHVSNLLARQLGCTVMAFDRPGWGLTSRPRRKDWEDKKLPNPYELESQVDLLISFCSEMGLHSVVLVGHDDGGLLALKAAEKLRTYGGDREVEVKGVVLIGVSLSREVIPAFARILLHTPLRKKHMVRPLLRTEIVQVINRRAWYDATKLTTEILNLYKAPLFVEGWDEALHEVGRLSFSTVLPSKRAADLLRSVEDLPVLVVAGSEDALVSLKSAQAMASKFVNSRIVIISGCGHLPHEECPKALLSALAPFISTLVPSEDLLQRL

SEQ ID NO: 18432 - protein, 499 aa, Zea mays subsp. mays
  peptide (1)..(499): Ceres Seq. ID no. 12417121
  misc_feature (245)..(484): Pfam Name: alpha/beta hydrolase fold Pfam Description: alpha/beta hydrolase fold
  misc_feature (1)..(53): Homolog of NCBI NO: 30688139 NR Description: expressed protein [Arabidopsis thaliana]
  misc_feature (216)..(311): Homolog of NCBI NO: 30681503 NR Description: hydrolase, alpha/beta fold family [Arabidopsis
  misc_feature (326)..(486): Homolog of NCBI NO: 30681503 NR Description: hydrolase, alpha/beta fold family [Arabidopsis
  misc_feature (216)..(311): Homolog of NCBI NO: 6630546 NR Description: putative alpha/beta hydrolase [Arabidopsis
  misc_feature (326)..(486): Homolog of NCBI NO: 6630546 NR Description: putative alpha/beta hydrolase [Arabidopsis
  misc_feature (1)..(491): Homolog of NCBI NO: 22330208 NR Description: unknown protein
  misc_feature (1)..(491): Homolog of NCBI NO: 25405595 NR Description: unknown protein, 18223-15857 [imported] -
  misc_feature (1)..(495): Homolog of NCBI NO: 15218212 NR Description: unknown protein
  misc_feature (1)..(494): Homolog of NCBI NO: 15220097 NR Description: unknown protein
  misc_feature (1)..(499): Homolog of NCBI NO: 34911750 NR Description: P0038D11.18 [Oryza sativa (japonica
MPVLFLSSLVFALGHVIVAYRTSGRARRKLLIHRIDPESILAYKNAFSGCYKVPRSPTPYSGKLFTRSESETKRKSLIQDDRDLPISFLADSDSMFIACQGITIHYKVSDPAASLPSSPGFFSERDTHHDVISSSISPRRQRHESPPSASSNTRRVLNRSFSHQYHNTSLYAPLLVEPVASPTLLDDIPLMCIDDGNADGCLSHVGFDLEAGGQGKFAVVLVHGFGGGVFSWRHVSNLLARQLGCTVMAFDRPGWGLTSRPRRKDWEDKKLPNPYELESQVDLLISFCSEMGLHSVVLVGHDDGGLLALKAAEKLRTYGGDREVEVKGVVLIGVSLSREVIPAFARILLHTPLRKKHMVRPLLRTEIVQVINRRAWYDATKLTTEILNLYKAPLFVEGWDEALHEVGRLSFSTVLPSKRAADLLRSVEDLPVLVVAGSEDALVSLKSAQAMASKFVNSRIVIISGCGHLPHEECPKALLSALAPFISTLVPSEDLLQRL

SEQ ID NO: 18433 - protein, 405 aa, Zea mays subsp. mays
  peptide (1)..(405): Ceres Seq. ID no. 12417122
  misc_feature (151)..(390): Pfam Name: alpha/beta hydrolase fold Pfam Description: alpha/beta hydrolase fold
  misc_feature (119)..(396): Homolog of NCBI NO: 21673775 NR Description: hydrolase, alpha/beta hydrolase fold family
  misc_feature (122)..(217): Homolog of NCBI NO: 30681503 NR Description: hydrolase, alpha/beta fold family [Arabidopsis
  misc_feature (232)..(392): Homolog of NCBI NO: 30681503 NR Description: hydrolase, alpha/beta fold family [Arabidopsis
  misc_feature (122)..(217): Homolog of NCBI NO: 6630546 NR Description: putative alpha/beta hydrolase [Arabidopsis
  misc_feature (232)..(392): Homolog of NCBI NO: 6630546 NR Description: putative alpha/beta hydrolase [Arabidopsis
  misc_feature (1)..(397): Homolog of NCBI NO: 22330208 NR Description: unknown protein
  misc_feature (1)..(397): Homolog of NCBI NO: 25405595 NR Description: unknown protein, 18223-15857 [imported] -
  misc_feature (1)..(401): Homolog of NCBI NO: 15218212 NR Description: unknown protein
  misc_feature (1)..(400): Homolog of NCBI NO: 15220097 NR Description: unknown protein
  misc_feature (1)..(405): Homolog of NCBI NO: 34911750 NR Description: P0038D11.18 [Oryza sativa (japonica
MFIACQGITIHYKVSDPAASLPSSPGFFSERDTHHDVISSSISPRRQRHESPPSASSNTRRVLNRSFSHQYHNTSLYAPLLVEPVASPTLLDDIPLMCIDDGNADGCLSHVGFDLEAGGQGKFAVVLVHGFGGGVFSWRHVSNLLARQLGCTVMAFDRPGWGLTSRPRRKDWEDKKLPNPYELESQVDLLISFCSEMGLHSVVLVGHDDGGLLALKAAEKLRTYGGDREVEVKGVVLIGVSLSREVIPAFARILLHTPLRKKHMVRPLLRTEIVQVINRRAWYDATKLTTEILNLYKAPLFVEGWDEALHEVGRLSFSTVLPSKRAADLLRSVEDLPVLVVAGSEDALVSLKSAQAMASKFVNSRIVIISGCGHLPHEECPKALLSALAPFISTLVPSEDLLQRL

SEQ ID NO: 18434 - DNA, 1311 bp, Zea mays subsp. mays
  misc_feature (1)..(1311): Ceres Seq. ID no. 12417377
  misc_feature: MA Experiment ID: 108523 Result: Down-regulated in Transcription
  misc_feature: MA Experiment 108523 PARAMETER Experiment Name: Zm_42deg_Heat_P Parameter: Age (day) Value: 8
  misc_feature: MA Experiment 108523 PARAMETER Experiment Name: Zm_42deg_Heat_P Parameter: Organism Value: Zea mays
  misc_feature: MA Experiment 108523 PARAMETER Experiment Name: Zm_42deg_Heat_P Parameter: Plant Line Value: 35A19
  misc_feature: MA Experiment 108523 PARAMETER Experiment Name: Zm_42deg_Heat_P Parameter: Temperature (deg C) Value: 42 vs. 22
  misc_feature: MA Experiment 108523 PARAMETER Experiment Name: Zm_42deg_Heat_P Parameter: Timepoint (hr) Value: 6
  misc_feature: MA Experiment 108523 PARAMETER Experiment Name: Zm_42deg_Heat_P Parameter: Tissue Value: Aerial
  misc_feature: MA Experiment ID: 108527 Result: Down-regulated in Transcription
  misc_feature: MA Experiment 108527 PARAMETER Experiment Name: Zm_5mM_NO_P Parameter: Age (day) Value: 8
  misc_feature: MA Experiment 108527 PARAMETER Experiment Name: Zm_5mM_NO_P Parameter: Organism Value: Zea mays
  misc_feature: MA Experiment 108527 PARAMETER Experiment Name: Zm_5mM_NO_P Parameter: Plant Line Value: 35A19
  misc_feature: MA Experiment 108527 PARAMETER Experiment Name: Zm_5mM_NO_P Parameter: Timepoint (hr) Value: 6
  misc_feature: MA Experiment 108527 PARAMETER Experiment Name: Zm_5mM_NO_P Parameter: Tissue Value: Aerial
  misc_feature: MA Experiment 108527 PARAMETER Experiment Name: Zm_5mM_NO_P Parameter: Treatment Value: 5mM NO vs. No Treatment
  misc_feature: MA Experiment ID: 108528 Result: Up-regulated in Transcription
  misc_feature: MA Experiment 108528 PARAMETER Experiment Name: Zm_Imbibed_Seeds_P Parameter: Age (day) Value: 5 vs. 2
  misc_feature: MA Experiment 108528 PARAMETER Experiment Name: Zm_Imbibed_Seeds_P Parameter: Organism Value: Zea mays
  misc_feature: MA Experiment 108528 PARAMETER Experiment Name: Zm_Imbibed_Seeds_P Parameter: Plant Line Value: 35A19
  misc_feature: MA Experiment 108528 PARAMETER Experiment Name: Zm_Imbibed_Seeds_P Parameter: Tissue Value: Aerial vs. Embryo
  misc_feature: MA Experiment ID: 108529 Result: Up-regulated in Transcription
  misc_feature: MA Experiment 108529 PARAMETER Experiment Name: Zm_Imbibed_Seeds_P Parameter: Age (day) Value: 5 vs. 2
  misc_feature: MA Experiment 108529 PARAMETER Experiment Name: Zm_Imbibed_Seeds_P Parameter: Organism Value: Zea mays
  misc_feature: MA Experiment 108529 PARAMETER Experiment Name: Zm_Imbibed_Seeds_P Parameter: Plant Line Value: 35A19
  misc_feature: MA Experiment 108529 PARAMETER Experiment Name: Zm_Imbibed_Seeds_P Parameter: Tissue Value: Roots vs. Embryo
  misc_feature: MA Experiment ID: 108530 Result: Up-regulated in Transcription
  misc_feature: MA Experiment 108530 PARAMETER Experiment Name: Zm_Imbibed_Seeds_P Parameter: Age (day) Value: 6 vs. 2
  misc_feature: MA Experiment 108530 PARAMETER Experiment Name: Zm_Imbibed_Seeds_P Parameter: Organism Value: Zea mays
  misc_feature: MA Experiment 108530 PARAMETER Experiment Name: Zm_Imbibed_Seeds_P Parameter: Plant Line Value: 35A19
  misc_feature: MA Experiment 108530 PARAMETER Experiment Name: Zm_Imbibed_Seeds_P Parameter: Tissue Value: Aerial vs. Embryo
  misc_feature: MA Experiment ID: 108533 Result: Up-regulated in Transcription
  misc_feature: MA Experiment 108533 PARAMETER Experiment Name: Zm_4deg_Cold_P Parameter: Age (hr) Value: 8
  misc_feature: MA Experiment 108533 PARAMETER Experiment Name: Zm_4deg_Cold_P Parameter: Organism Value: Zea mays
  misc_feature: MA Experiment 108533 PARAMETER Experiment Name: Zm_4deg_Cold_P Parameter: Plant Line Value: 35A19
  misc_feature: MA Experiment 108533 PARAMETER Experiment Name: Zm_4deg_Cold_P Parameter: Temperature (deg C) Value: 4 vs. 22
  misc_feature: MA Experiment 108533 PARAMETER Experiment Name: Zm_4deg_Cold_P Parameter: Timepoint (hr) Value: 1
  misc_feature: MA Experiment 108533 PARAMETER Experiment Name: Zm_4deg_Cold_P Parameter: Tissue Value: Aerial
  misc_feature: MA Experiment ID: 108539 Result: Down-regulated in Transcription
  misc_feature: MA Experiment 108539 PARAMETER Experiment Name: Zm_20percent_PEG_P Parameter: Age (day) Value: 8
  misc_feature: MA Experiment 108539 PARAMETER Experiment Name: Zm_20percent_PEG_P Parameter: Organism Value: Zea mays
  misc_feature: MA Experiment 108539 PARAMETER Experiment Name: Zm_20percent_PEG_P Parameter: Plant Line Value: 35A19
  misc_feature: MA Experiment 108539 PARAMETER Experiment Name: Zm_20percent_PEG_P Parameter: Timepoint (hr) Value: 1
  misc_feature: MA Experiment 108539 PARAMETER Experiment Name: Zm_20percent_PEG_P Parameter: Tissue Value: Aerial
  misc_feature: MA Experiment 108539 PARAMETER Experiment Name: Zm_20percent_PEG_P Parameter: Treatment Value: 20percent PEG vs. No Treatment
  misc_feature: MA Experiment ID: 108540 Result: Down-regulated in Transcription
  misc_feature: MA Experiment 108540 PARAMETER Experiment Name: Zm_20percent_PEG_P Parameter: Age (day) Value: 8
  misc_feature: MA Experiment 108540 PARAMETER Experiment Name: Zm_20percent_PEG_P Parameter: Organism Value: Zea mays
  misc_feature: MA Experiment 108540 PARAMETER Experiment Name: Zm_20percent_PEG_P Parameter: Plant Line Value: 35A19
  misc_feature: MA Experiment 108540 PARAMETER Experiment Name: Zm_20percent_PEG_P Parameter: Timepoint (hr) Value: 6
  misc_feature: MA Experiment 108540 PARAMETER Experiment Name: Zm_20percent_PEG_P Parameter: Tissue Value: Aerial
  misc_feature: MA Experiment 108540 PARAMETER Experiment Name: Zm_20percent_PEG_P Parameter: Treatment Value: 20percent PEG vs. No Treatment
  misc_feature: MA Experiment ID: 108545 Result: Up-regulated in Transcription
  misc_feature: MA Experiment 108545 PARAMETER Experiment Name: Zm_Imbibed_Seeds_P Parameter: Age (day) Value: 3 vs. 2
  misc_feature: MA Experiment 108545 PARAMETER Experiment Name: Zm_Imbibed_Seeds_P Parameter: Organism Value: Zea mays
  misc_feature: MA Experiment 108545 PARAMETER Experiment Name: Zm_Imbibed_Seeds_P Parameter: Plant Line Value: 35A19
  misc_feature: MA Experiment 108545 PARAMETER Experiment Name: Zm_Imbibed_Seeds_P Parameter: Tissue Value: Aerial vs. Embryo
  misc_feature: MA Experiment ID: 108546 Result: Up-regulated in Transcription
  misc_feature: MA Experiment 108546 PARAMETER Experiment Name: Zm_Imbibed_Seeds_P Parameter: Age (day) Value: 3 vs. 2
  misc_feature: MA Experiment 108546 PARAMETER Experiment Name: Zm_Imbibed_Seeds_P Parameter: Organism Value: Zea mays
  misc_feature: MA Experiment 108546 PARAMETER Experiment Name: Zm_Imbibed_Seeds_P Parameter: Plant Line Value: 35A19
  misc_feature: MA Experiment 108546 PARAMETER Experiment Name: Zm_Imbibed_Seeds_P Parameter: Tissue Value: Roots vs. Embryo
  misc_feature: MA Experiment ID: 108547 Result: Up-regulated in Transcription
  misc_feature: MA Experiment 108547 PARAMETER Experiment Name: Zm_Imbibed_Seeds_P Parameter: Age (day) Value: 4 vs. 2
  misc_feature: MA Experiment 108547 PARAMETER Experiment Name: Zm_Imbibed_Seeds_P Parameter: Organism Value: Zea mays
  misc_feature: MA Experiment 108547 PARAMETER Experiment Name: Zm_Imbibed_Seeds_P Parameter: Plant Line Value: 35A19
  misc_feature: MA Experiment 108547 PARAMETER Experiment Name: Zm_Imbibed_Seeds_P Parameter: Tissue Value: Aerial vs. Embryo
  misc_feature: MA Experiment ID: 108559 Result: Down-regulated in Transcription
  misc_feature: MA Experiment 108559 PARAMETER Experiment Name: Zm_5mM_NO_P Parameter: Age (day) Value: 8
  misc_feature: MA Experiment 108559 PARAMETER Experiment Name: Zm_5mM_NO_P Parameter: Organism Value: Zea mays
  misc_feature: MA Experiment 108559 PARAMETER Experiment Name: Zm_5mM_NO_P Parameter: Plant Line Value: 35A19
  misc_feature: MA Experiment 108559 PARAMETER Experiment Name: Zm_5mM_NO_P Parameter: Timepoint (hr) Value: 12
  misc_feature: MA Experiment 108559 PARAMETER Experiment Name: Zm_5mM_NO_P Parameter: Tissue Value: Aerial
  misc_feature: MA Experiment 108559 PARAMETER Experiment Name: Zm_5mM_NO_P Parameter: Treatment Value: 5mM NO vs. No Treatment
  misc_feature: MA Experiment ID: 20000477 Result: Down-regulated in Transcription
  misc_feature: MA Experiment 20000477 PARAMETER Experiment Name: Zm_5mM_SA_P Parameter: Age (day) Value: 10
  misc_feature: MA Experiment 20000477 PARAMETER Experiment Name: Zm_5mM_SA_P Parameter: Organism Value: Zea mays
  misc_feature: MA Experiment 20000477 PARAMETER Experiment Name: Zm_5mM_SA_P Parameter: Plant Line Value: 35A19
  misc_feature: MA Experiment 20000477 PARAMETER Experiment Name: Zm_5mM_SA_P Parameter: Timepoint (hr) Value: 48
  misc_feature: MA Experiment 20000477 PARAMETER Experiment Name: Zm_5mM_SA_P Parameter: Tissue Value: Aerial
  misc_feature: MA Experiment 20000477 PARAMETER Experiment Name: Zm_5mM_SA_P Parameter: Treatment Value: 5mM SA vs. No Treatment
  misc_feature: MA Experiment ID: 20000478 Result: Down-regulated in Transcription
  misc_feature: MA Experiment 20000478 PARAMETER Experiment Name: Zm_5mM_SA_P Parameter: Age (day) Value: 11
  misc_feature: MA Experiment 20000478 PARAMETER Experiment Name: Zm_5mM_SA_P Parameter: Organism Value: Zea mays
  misc_feature: MA Experiment 20000478 PARAMETER Experiment Name: Zm_5mM_SA_P Parameter: Plant Line Value: 35A19
  misc_feature: MA Experiment 20000478 PARAMETER Experiment Name: Zm_5mM_SA_P Parameter: Timepoint (hr) Value: 72
  misc_feature: MA Experiment 20000478 PARAMETER Experiment Name: Zm_5mM_SA_P Parameter: Tissue Value: Aerial
  misc_feature: MA Experiment 20000478 PARAMETER Experiment Name: Zm_5mM_SA_P Parameter: Treatment Value: 5mM SA vs. No Treatment
  misc_feature: MA Experiment ID: 20000535 Result: Down-regulated in Transcription
  misc_feature: MA Experiment 20000535 PARAMETER Experiment Name: Zm_Hybrid_Seed_Dev_P Parameter: DAP Value: 30 vs. 12
  misc_feature: MA Experiment 20000535 PARAMETER Experiment Name: Zm_Hybrid_Seed_Dev_P Parameter: Organism Value: Zea mays
  misc_feature: MA Experiment 20000535 PARAMETER Experiment Name: Zm_Hybrid_Seed_Dev_P Parameter: Plant Line Value: 35A19
  misc_feature: MA Experiment 20000535 PARAMETER Experiment Name: Zm_Hybrid_Seed_Dev_P Parameter: Tissue Value: Embryo vs. Unfert Floret
  misc_feature: MA Experiment ID: 20001608 Result: Down-regulated in Transcription
  misc_feature: MA Experiment 20001608 PARAMETER Experiment Name: Zm_50ppm_KNO3_L-to-H_P Parameter: Age (day) Value: 21
  misc_feature: MA Experiment 20001608 PARAMETER Experiment Name: Zm_50ppm_KNO3_L-to-H_P Parameter: Organism Value: Zea mays
  misc_feature: MA Experiment 20001608 PARAMETER Experiment Name: Zm_50ppm_KNO3_L-to-H_P Parameter: Plant Line Value: 35A19
  misc_feature: MA Experiment 20001608 PARAMETER Experiment Name: Zm_50ppm_KNO3_L-to-H_P Parameter: Timepoint (hr) Value: 48
  misc_feature: MA Experiment 20001608 PARAMETER Experiment Name: Zm_50ppm_KNO3_L-to-H_P Parameter: Tissue Value: Shoots
  misc_feature: MA Experiment 20001608 PARAMETER Experiment Name: Zm_50ppm_KNO3_L-to-H_P Parameter: Treatment Value: 50ppm KNO3 vs. 50ppm KCl
gcacgagaccattacctagaacatcctaatcaaaaagtcccacccctcctgcatttcaataatatctccctgcgcttttcctagccctttgtcatccaaggaaacaataaacaaccggcgcttttacacccccgccaagaacaggagcaacaacaacaaggctcctcgcaacaatccattctcatccatggcgaagctcatgaacaagctggtcgattcgttcgagcacgacgagataccggacgtcggctgcgtgcgcgccgtgctggccgagctcgtcctcaccttcctcttcgtcttcaccggcgtctccgccgccatggccgccggatccgacgggaagcccggcgacgctatgccgatggcgacgctggcggcggtggctatcgcgcacgcgctggccgctggcgtcctggtgacggccgggttccacgtctccggcggccacctgaaccccgcggtgacggtggggctcatggtgcgcggccacatcaccaagctccgggcggtgctgtacgtcgccgcccagctgctggcctcctccgccgcctgcgtcctcctccgcttcctcagcggcggcatggtgaccccggtgcacgccctgggcaggggcatcagccccgatgcagggcctggtgatggaggtgatcctcaccttctccctgctcttcgtcacctacgccatgatcctggacccgcagccaggtccgcgccatcggcccgctgctgacgggcctcatcgtcggcgccaacagcctcgccggcggcaacttcaccggcgcgtccatgaacccggcacgctccttcggcccggccctggccaccggggactggacaaaccactgggtctactggatcggcccgctgctcggtgggcccctggcaggcttcgtgtacgagtcgctgttcctggtgcagaagatgcacgagccgctgctcaatggggaagtctgacgaccatcagcaccttcatgcttgtttctgtaaaacaggtcattatctgcaagcatggtacatacattggccaaggtaattagagaggcttgctgtaaagcagtaggattgctggctgtagaaattgttgatgggctttttttgggggtttcctgccaaggaattctttcttttatataatctcaaaaaagtttttttttttggtatgggctgggttctatcaagggtttgttaaggctattagtttaccatgtagcagaaaaactagtgggacgtgaagttttttcacgtacattgtaatactttggtatttttgtctaccagatgaaactggaagtacagagcaaaaacttctct

SEQ ID NO: 18435 - protein, 180 aa, Zea mays subsp. mays
  peptide (1)..(180): Ceres Seq. ID no. 12417378
  misc_feature (16)..(148): Pfam Name: Major intrinsic protein Pfam Description: Major intrinsic protein
  misc_feature (15)..(148): Homolog of NCBI NO: 17473872 NR Description: delta tonoplast intrinsic protein [Arabidopsis
  misc_feature (15)..(148): Homolog of NCBI NO: 7441262 NR Description: aquaporin-like protein - Norway spruce
  misc_feature (24)..(148): Homolog of NCBI NO: 13447833 NR Description: tonoplast membrane integral protein ZmTIP4-3 [Zea
  misc_feature (14)..(143): Homolog of NCBI NO: 34904332 NR Description: unnamed protein product [Oryza sativa (japonica
  misc_feature (5)..(148): Homolog of NCBI NO: 4584429 NR Description: aquaglyceroporin; tonoplast intrinsic protein
  misc_feature (5)..(148): Homolog of NCBI NO: 34904336 NR Description: unnamed protein product [Oryza sativa (japonica
  misc_feature (7)..(148): Homolog of NCBI NO: 15225195 NR Description: putative aquaporin (tonoplast intrinsic protein)
  misc_feature (14)..(143): Homolog of NCBI NO: 13447835 NR Description: tonoplast membrane integral protein ZmTIP4-4 [Zea
  misc_feature (1)..(148): Homolog of NCBI NO: 13447831 NR Description: tonoplast membrane integral protein ZmTIP4-2 [Zea
  misc_feature (1)..(148): Homolog of NCBI NO: 13447829 NR Description: tonoplast membrane integral protein ZmTIP4-1 [Zea
MAKLMNKLVDSFEHDEIPDVGCVRAVLAELVLTFLFVFTGVSAAMAAGSDGKPGDAMPMATLAAVAIAHALAAGVLVTAGFHVSGGHLNPAVTVGLMVRGHITKLRAVLYVAAQLLASSAACVLLRFLSGGMVTPVHALGRGISPDAGPGDGGDPHLLPALRHLRHDPGPAARSAPSARC

SEQ ID NO: 18436 - protein, 176 aa, Zea mays subsp. mays
  peptide (1)..(176): Ceres Seq. ID no. 12417379
  misc_feature (12)..(144): Pfam Name: Major intrinsic protein Pfam Description: Major intrinsic protein
  misc_feature (11)..(144): Homolog of NCBI NO: 17473872 NR Description: delta tonoplast intrinsic protein [Arabidopsis
  misc_feature (11)..(144): Homolog of NCBI NO: 7441262 NR Description: aquaporin-like protein - Norway spruce
  misc_feature (20)..(144): Homolog of NCBI NO: 13447833 NR Description: tonoplast membrane integral protein ZmTIP4-3 [Zea
  misc_feature (10)..(139): Homolog of NCBI NO: 34904332 NR Description: unnamed protein product [Oryza sativa (japonica
  misc_feature (1)..(144): Homolog of NCBI NO: 4584429 NR Description: aquaglyceroporin; tonoplast intrinsic protein
  misc_feature (1)..(144): Homolog of NCBI NO: 34904336 NR Description: unnamed protein product [Oryza sativa (japonica
  misc_feature (3)..(144): Homolog of NCBI NO: 15225195 NR Description: putative aquaporin (tonoplast intrinsic protein)
  misc_feature (10)..(139): Homolog of NCBI NO: 13447835 NR Description: tonoplast membrane integral protein ZmTIP4-4 [Zea
  misc_feature (1)..(144): Homolog of NCBI NO: 13447831 NR Description: tonoplast membrane integral protein ZmTIP4-2 [Zea
  misc_feature (1)..(144): Homolog of NCBI NO: 13447829 NR Description: tonoplast membrane integral protein ZmTIP4-1 [Zea
MNKLVDSFEHDEIPDVGCVRAVLAELVLTFLFVFTGVSAAMAAGSDGKPGDAMPMATLAAVAIAHALAAGVLVTAGFHVSGGHLNPAVTVGLMVRGHITKLRAVLYVAAQLLASSAACVLLRFLSGGMVTPVHALGRGISPDAGPGDGGDPHLLPALRHLRHDPGPAARSAPSARC

SEQ ID NO: 18437 - protein, 137 aa, Zea mays subsp. mays
  peptide (1)..(137): Ceres Seq. ID no. 12417380
  misc_feature (1)..(28): Homolog of NCBI NO: 38605857 NR Description: OSJNBb0034G17.15 [Oryza sativa (japonica
  misc_feature (1)..(28): Homolog of NCBI NO: 15219403 NR Description: tonoplast intrinsic protein, alpha (alpha-TIP)
  misc_feature (1)..(28): Homolog of NCBI NO: 17473872 NR Description: delta tonoplast intrinsic protein [Arabidopsis
  misc_feature (2)..(28): Homolog of NCBI NO: 7441262 NR Description: aquaporin-like protein - Norway spruce
  misc_feature (2)..(28): Homolog of NCBI NO: 4584429 NR Description: aquaglyceroporin; tonoplast intrinsic protein
  misc_feature (1)..(38): Homolog of NCBI NO: 34904336 NR Description: unnamed protein product [Oryza sativa (japonica
  misc_feature (2)..(28): Homolog of NCBI NO: 15225195 NR Description: putative aquaporin (tonoplast intrinsic protein)
  misc_feature (1)..(26): Homolog of NCBI NO: 13447835 NR Description: tonoplast membrane integral protein ZmTIP4-4 [Zea
  misc_feature (1)..(26): Homolog of NCBI NO: 13447831 NR Description: tonoplast membrane integral protein ZmTIP4-2 [Zea
  misc_feature (1)..(26): Homolog of NCBI NO: 13447829 NR Description: tonoplast membrane integral protein ZmTIP4-1 [Zea
MQGLVMEVILTFSLLFVTYAMILDPQPGPRHRPAADGPHRRRQQPRRRQLHRRVHEPGTLLRPGPGHRGLDKPLGLLDRPAARWAPGRLRVRVAVPGAEDARAAAQWGSLTTISTFMLVSVKQVIICKHGTYIGQGN

SEQ ID NO: 18438 - DNA, 2625 bp, Zea mays subsp. mays
  misc_feature (1)..(2625): Ceres Seq. ID no. 12366382
  misc_feature: MA Experiment ID: 108522 Result: Up-regulated in Transcription
  misc_feature: MA Experiment 108522 PARAMETER Experiment Name: Zm_42deg_Heat_P Parameter: Age (day) Value: 8
  misc_feature: MA Experiment 108522 PARAMETER Experiment Name: Zm_42deg_Heat_P Parameter: Organism Value: Zea mays
  misc_feature: MA Experiment 108522 PARAMETER Experiment Name: Zm_42deg_Heat_P Parameter: Plant Line Value: 35A19
  misc_feature: MA Experiment 108522 PARAMETER Experiment Name: Zm_42deg_Heat_P Parameter: Temperature (deg C) Value: 42 vs. 22
  misc_feature: MA Experiment 108522 PARAMETER Experiment Name: Zm_42deg_Heat_P Parameter: Timepoint (hr) Value: 1
  misc_feature: MA Experiment 108522 PARAMETER Experiment Name: Zm_42deg_Heat_P Parameter: Tissue Value: Aerial
  misc_feature: MA Experiment ID: 108523 Result: Up-regulated in Transcription
  misc_feature: MA Experiment 108523 PARAMETER Experiment Name: Zm_42deg_Heat_P Parameter: Age (day) Value: 8
  misc_feature: MA Experiment 108523 PARAMETER Experiment Name: Zm_42deg_Heat_P Parameter: Organism Value: Zea mays
  misc_feature: MA Experiment 108523 PARAMETER Experiment Name: Zm_42deg_Heat_P Parameter: Plant Line Value: 35A19
  misc_feature: MA Experiment 108523 PARAMETER Experiment Name: Zm_42deg_Heat_P Parameter: Temperature (deg C) Value: 42 vs. 22
  misc_feature: MA Experiment 108523 PARAMETER Experiment Name: Zm_42deg_Heat_P Parameter: Timepoint (hr) Value: 6
  misc_feature: MA Experiment 108523 PARAMETER Experiment Name: Zm_42deg_Heat_P Parameter: Tissue Value: Aerial
  misc_feature: MA Experiment ID: 108530 Result: Up-regulated in Transcription
  misc_feature: MA Experiment 108530 PARAMETER Experiment Name: Zm_Imbibed_Seeds_P Parameter: Age (day) Value: 6 vs. 2
  misc_feature: MA Experiment 108530 PARAMETER Experiment Name: Zm_Imbibed_Seeds_P Parameter: Organism Value: Zea mays
  misc_feature: MA Experiment 108530 PARAMETER Experiment Name: Zm_Imbibed_Seeds_P Parameter: Plant Line Value: 35A19
  misc_feature: MA Experiment 108530 PARAMETER Experiment Name: Zm_Imbibed_Seeds_P Parameter: Tissue Value: Aerial vs. Embryo
  misc_feature: MA Experiment ID: 108543 Result: Down-regulated in Transcription
  misc_feature: MA Experiment ID: 108556 Result: Up-regulated in Transcription
  misc_feature: MA Experiment 108556 PARAMETER Experiment Name: Zm_Drought_P Parameter: Age (day) Value: 9
  misc_feature: MA Experiment 108556 PARAMETER Experiment Name: Zm_Drought_P Parameter: Organism Value: Zea mays
  misc_feature: MA Experiment 108556 PARAMETER Experiment Name: Zm_Drought_P Parameter: Plant Line Value: 35A19
  misc_feature: MA Experiment 108556 PARAMETER Experiment Name: Zm_Drought_P Parameter: Timepoint (hr) Value: 24
  misc_feature: MA Experiment 108556 PARAMETER Experiment Name: Zm_Drought_P Parameter: Tissue Value: Aerial
  misc_feature: MA Experiment 108556 PARAMETER Experiment Name: Zm_Drought_P Parameter: Treatment Value: Drought vs. No Drought
  misc_feature: MA Experiment ID: 20000535 Result: Down-regulated in Transcription
  misc_feature: MA Experiment 20000535 PARAMETER Experiment Name: Zm_Hybrid_Seed_Dev_P Parameter: DAP Value: 30 vs. 12
  misc_feature: MA Experiment 20000535 PARAMETER Experiment Name: Zm_Hybrid_Seed_Dev_P Parameter: Organism Value: Zea mays
  misc_feature: MA Experiment 20000535 PARAMETER Experiment Name: Zm_Hybrid_Seed_Dev_P Parameter: Plant Line Value: 35A19
  misc_feature: MA Experiment 20000535 PARAMETER Experiment Name: Zm_Hybrid_Seed_Dev_P Parameter: Tissue Value: Embryo vs. Unfert Floret
gcacgagaccattacctagaacatcctaatctaaaagatagagaaatgagcttcgctgttcgagaaaacagcagagcccggccgaattcgttgggcagcctgcggagatgcagtagaggccgccaggcgcagatggaatgagcgaccgggctctgctccgccgctagcctgccgccgcaccgcgccgtcgatcgccgcgccatgaacggtccccgcggctaccccctttctccaccggcaccttacccccgtatggcgtgatccaatgatagcaccaagagcgcaccttcccctctccctgacggcgtcgtcctccccgcacggcggcgcgcgcacccgcaccaagaagaggaagaaaccatgtcccccaacctggacagcgccatcaagatccaggtgccggcgctgctcctgaggcgtctcttcggcgcgtcccggcgggacgaggccaagcagctccagcggaccccggcgccggtggggaggcggcgggtgtttgtgcagacgggagaccggctgcgtgctcggcatggacctggaccgcggggacaacgcgcacaccgtcaagcgccggctgcagctcgcgctcaacatgcccaccggcgggacctcgctcaccttcggcgatcgcctcctggagaacgacctgtccttcatacgcccggactcgccgctgctgctcacccggaacagcatcaaccggagctgctccaccccgtgcctctgccccgtctccaaggacttcgagcacaaggactgcagcggactggttgagatgctcggctgttccagcagctgtgcccgggtgaagcgcctcgtggacgacgtggtgactgccatcaggagcggcgtggatccggtccccattagcagcggccttggtggctcgtactacttcaggaacgtcttgggcgacagggttgctattgtgaagccgacggacgaggagccctttgcgccaaacaatcccaaggggttcgtcgggagggcgctcggtcagccgggcctcaagagatctgtgcgagtgggagagacggggtttagggaggttgcggcattcctgttggaccatgacaacttcgccaacgttcctgccacggctctggtgaagataacacactccattttcaacataaactgcccggtaaatggaggaaacctggcaccggctcatgaccagcaacagcaagttaacagcaagattgcttcgttccagcagttcatagcccatgacttcgacgccagcgaccatggcacgtcaagcttccctgtcgctgctgttcataggatcggcatactagatatccggattttcaacactgacaggcacgccggcaatgtgctggtgaggaagcttaacggtggcacaggccgctttggttgccagacagagctgttcccaattgatcatggcatgtgcttgccggagaacttggaggacccttacttcgagtggatccattgggctcaggcttctattccgttctctgaggaagagctcgagtacatcagaaatcttgatccaaggaaagatgtgcagatgctgcgccgggaacttccgatgatacgtgaggcctgcctacatgtactggccctgtgcacaatcttccttaaggaggctgcagctttcggactctgcttggccgagataggcgagatgatgaccagggagttcagagggatggaggaggaaccaagccagctggaggttatgtgtatggaggccaggaagagagtagcagagtgggagcccttctctgccacggctgaacatggagaagataccgatttccagttctcggtggatatgctaggagaatacagtgatgtagtgcgatcaccgaggttcaatggctcaggttccaaggtgtccagtttcagaagccctttgtctaagctcgtcgagagtgtcgacgagggcagtgatggccatgaagatcaaaacgagtctgatcgagtcttgtatgctggatggaatacatccagcgttcctagcaaagctatgggccatagtggcaatgcctcaaaaagtgcaatgaacaggagtgccgatgaacaacttccatcaagtatgtgttttgtcaggctgtcggatatgagtgcagatgagtgggatgtattcctcgaaaaattccaggagctgctgaaagaggcactgcacgagagcgcaagggcagcagtaggtcaaaggatgaagcagcggctgggcacttcatgcaagttttgagcagggcaatagcgcatcagagaagaaaaaaatgcagtgctacttgtactgcttgcttatggagtgagtacaggatgaagatatcatcgtatgtggcaccttcaaccttgtgcaacgatctaggttgcagcagccatgtccagcaggtagataggaccacaagcatatgtagtgacggtgtggagaactgctacgcgtgtttattagctatatgtttacgaaggggaatgcttaataataaatgtttgtcagcctgtgtatattggcttgatgttagatactccagctttagcatgcaatttcttagtcgctgaaaattctttgtagcttgtgatgtgacctgtgagcagtgtaaacgttgcacctttgatggaaaaataatgcttacctgttgttgt

SEQ ID NO: 18439 - protein, 565 aa, Zea mays subsp. mays
  peptide (1)..(565): Ceres Seq. ID no. 12366383
  misc_feature (116)..(381): Pfam Name: Phosphatidylinositol 3- and 4-kinase Pfam Description: Phosphatidylinositol 3- and 4-kinase
  misc_feature (1)..(565): Homolog of NCBI NO: 25363319 NR Description: F21F23.8 protein - Arabidopsis thaliana
  misc_feature (1)..(565): Homolog of NCBI NO: 18394020 NR Description: ubiquitin, putative
  misc_feature (493)..(565): Homolog of NCBI NO: 25363315 NR Description: hypothetical protein At2g03890 [imported] -
  misc_feature (518)..(546): Homolog of NCBI NO: 15228965 NR Description: putative protein; protein id: At3g56600.1
  misc_feature (497)..(565): Homolog of NCBI NO: 18395825 NR Description: expressed protein
  misc_feature (1)..(475): Homolog of NCBI NO: 18395825 NR Description: expressed protein
  misc_feature (38)..(458): Homolog of NCBI NO: 15228965 NR Description: putative protein; protein id: At3g56600.1
  misc_feature (493)..(565): Homolog of NCBI NO: 18395629 NR Description: expressed protein
  misc_feature (1)..(506): Homolog of NCBI NO: 25363315 NR Description: hypothetical protein At2g03890 [imported] -
  misc_feature (1)..(506): Homolog of NCBI NO: 18395629 NR Description: expressed protein
MDLDRGDNAHTVKRRLQLALNMPTGGTSLTFGDRLLENDLSFIRPDSPLLLTRNSINRSCSTPCLCPVSKDFEHKDCSGLVEMLGCSSSCARVKRLVDDVVTAIRSGVDPVPISSGLGGSYYFRNVLGDRVAIVKPTDEEPFAPNNPKGFVGRALGQPGLKRSVRVGETGFREVAAFLLDHDNFANVPATALVKITHSIFNINCPVNGGNLAPAHDQQQQVNSKIASFQQFIAHDFDASDHGTSSFPVAAVHRIGILDIRIFNTDRHAGNVLVRKLNGGTGRFGCQTELFPIDHGMCLPENLEDPYFEWIHWAQASIPFSEEELEYIRNLDPRKDVQMLRRELPMIREACLHVLALCTIFLKEAAAFGLCLAEIGEMMTREFRGMEEEPSQLEVMCMEARKRVAEWEPFSATAEHGEDTDFQFSVDMLGEYSDVVRSPRFNGSGSKVSSFRSPLSKLVESVDEGSDGHEDQNESDRVLYAGWNTSSVPSKAMGHSGNASKSAMNRSADEQLPSSMCFVRLSDMSADEWDVFLEKFQELLKEALHESARAAVGQRMKQRLGTSCKF

SEQ ID NO: 18440 - protein, 544 aa, Zea mays subsp. mays
  peptide (1)..(544): Ceres Seq. ID no. 12366384
  misc_feature (95)..(360): Pfam Name: Phosphatidylinositol 3- and 4-kinase Pfam Description: Phosphatidylinositol 3- and 4-kinase
  misc_feature (497)..(525): Homolog of NCBI NO: 15228965 NR Description: putative protein; protein id: At3g56600.1
  misc_feature (17)..(437): Homolog of NCBI NO: 15228965 NR Description: putative protein; protein id: At3g56600.1
  misc_feature (476)..(544): Homolog of NCBI NO: 18395825 NR Description: expressed protein
  misc_feature (1)..(454): Homolog of NCBI NO: 18395825 NR Description: expressed protein
  misc_feature (1)..(544): Homolog of NCBI NO: 25363319 NR Description: F21F23.8 protein - Arabidopsis thaliana
  misc_feature (1)..(544): Homolog of NCBI NO: 18394020 NR Description: ubiquitin, putative
  misc_feature (472)..(544): Homolog of NCBI NO: 25363315 NR Description: hypothetical protein At2g03890 [imported] -
  misc_feature (472)..(544): Homolog of NCBI NO: 18395629 NR Description: expressed protein
  misc_feature (1)..(485): Homolog of NCBI NO: 25363315 NR Description: hypothetical protein At2g03890 [imported] -
  misc_feature (1)..(485): Homolog of NCBI NO: 18395629 NR Description: expressed protein
MPTGGTSLTFGDRLLENDLSFIRPDSPLLLTRNSINRSCSTPCLCPVSKDFEHKDCSGLVEMLGCSSSCARVKRLVDDVVTAIRSGVDPVPISSGLGGSYYFRNVLGDRVAIVKPTDEEPFAPNNPKGFVGRALGQPGLKRSVRVGETGFREVAAFLLDHDNFANVPATALVKITHSIFNINCPVNGGNLAPAHDQQQQVNSKIASFQQFIAHDFDASDHGTSSFPVAAVHRIGILDIRIFNTDRHAGNVLVRKLNGGTGRFGCQTELFPIDHGMCLPENLEDPYFEWIHWAQASIPFSEEELEYIRNLDPRKDVQMLRRELPMIREACLHVLALCTIFLKEAAAFGLCLAEIGEMMTREFRGMEEEPSQLEVMCMEARKRVAEWEPFSATAEHGEDTDFQFSVDMLGEYSDVVRSPRFNGSGSKVSSFRSPLSKLVESVDEGSDGHEDQNESDRVLYAGWNTSSVPSKAMGHSGNASKSAMNRSADEQLPSSMCFVRLSDMSADEWDVFLEKFQELLKEALHESARAAVGQRMKQRLGTSCKF

SEQ ID NO: 18441 - protein, 483 aa, Zea mays subsp. mays
  peptide (1)..(483): Ceres Seq. ID no. 12366385
  misc_feature (34)..(299): Pfam Name: Phosphatidylinositol 3- and 4-kinase Pfam Description: Phosphatidylinositol 3- and 4-kinase
  misc_feature (436)..(464): Homolog of NCBI NO: 15228965 NR Description: putative protein; protein id: At3g56600.1
  misc_feature (1)..(376): Homolog of NCBI NO: 15228965 NR Description: putative protein; protein id: At3g56600.1
  misc_feature (415)..(483): Homolog of NCBI NO: 18395825 NR Description: expressed protein
  misc_feature (1)..(393): Homolog of NCBI NO: 18395825 NR Description: expressed protein
  misc_feature (1)..(483): Homolog of NCBI NO: 25363319 NR Description: F21F23.8 protein - Arabidopsis thaliana
  misc_feature (1)..(483): Homolog of NCBI NO: 18394020 NR Description: ubiquitin, putative
  misc_feature (411)..(483): Homolog of NCBI NO: 25363315 NR Description: hypothetical protein At2g03890 [imported] -
  misc_feature (411)..(483): Homolog of NCBI NO: 18395629 NR Description: expressed protein
  misc_feature (1)..(424): Homolog of NCBI NO: 25363315 NR Description: hypothetical protein At2g03890 [imported] -
  misc_feature (1)..(424): Homolog of NCBI NO: 18395629 NR Description: expressed protein
MLGCSSSCARVKRLVDDVVTAIRSGVDPVPISSGLGGSYYFRNVLGDRVAIVKPTDEEPFAPNNPKGFVGRALGQPGLKRSVRVGETGFREVAAFLLDHDNFANVPATALVKITHSIFNINCPVNGGNLAPAHDQQQQVNSKIASFQQFIAHDFDASDHGTSSFPVAAVHRIGILDIRIFNTDRHAGNVLVRKLNGGTGRFGCQTELFPIDHGMCLPENLEDPYFEWIHWAQASIPFSEEELEYIRNLDPRKDVQMLRRELPMIREACLHVLALCTIFLKEAAAFGLCLAEIGEMMTREFRGMEEEPSQLEVMCMEARKRVAEWEPFSATAEHGEDTDFQFSVDMLGEYSDVVRSPRFNGSGSKVSSFRSPLSKLVESVDEGSDGHEDQNESDRVLYAGWNTSSVPSKAMGHSGNASKSAMNRSADEQLPSSMCFVRLSDMSADEWDVFLEKFQELLKEALHESARAAVGQRMKQRLGTSCKF

SEQ ID NO: 18442 - DNA, 2424 bp, Zea mays subsp. mays
  misc_feature (1)..(2424): Ceres Seq. ID no. 12375124
  misc_feature: MA Experiment ID: 108523 Result: Down-regulated in Transcription
  misc_feature: MA Experiment 108523 PARAMETER Experiment Name: Zm_42deg_Heat_P Parameter: Age (day) Value: 8
  misc_feature: MA Experiment 108523 PARAMETER Experiment Name: Zm_42deg_Heat_P Parameter: Organism Value: Zea mays
  misc_feature: MA Experiment 108523 PARAMETER Experiment Name: Zm_42deg_Heat_P Parameter: Plant Line Value: 35A19
  misc_feature: MA Experiment 108523 PARAMETER Experiment Name: Zm_42deg_Heat_P Parameter: Temperature (deg C) Value: 42 vs. 22
  misc_feature: MA Experiment 108523 PARAMETER Experiment Name: Zm_42deg_Heat_P Parameter: Timepoint (hr) Value: 6
  misc_feature: MA Experiment 108523 PARAMETER Experiment Name: Zm_42deg_Heat_P Parameter: Tissue Value: Aerial
  misc_feature: MA Experiment ID: 108527 Result: Down-regulated in Transcription
  misc_feature: MA Experiment 108527 PARAMETER Experiment Name: Zm_5mM_NO_P Parameter: Age (day) Value: 8
  misc_feature: MA Experiment 108527 PARAMETER Experiment Name: Zm_5mM_NO_P Parameter: Organism Value: Zea mays
  misc_feature: MA Experiment 108527 PARAMETER Experiment Name: Zm_5mM_NO_P Parameter: Plant Line Value: 35A19
  misc_feature: MA Experiment 108527 PARAMETER Experiment Name: Zm_5mM_NO_P Parameter: Timepoint (hr) Value: 6
  misc_feature: MA Experiment 108527 PARAMETER Experiment Name: Zm_5mM_NO_P Parameter: Tissue Value: Aerial
  misc_feature: MA Experiment 108527 PARAMETER Experiment Name: Zm_5mM_NO_P Parameter: Treatment Value: 5mM NO vs. No Treatment
  misc_feature: MA Experiment ID: 108528 Result: Up-regulated in Transcription
  misc_feature: MA Experiment 108528 PARAMETER Experiment Name: Zm_Imbibed_Seeds_P Parameter: Age (day) Value: 5 vs. 2
  misc_feature: MA Experiment 108528 PARAMETER Experiment Name: Zm_Imbibed_Seeds_P Parameter: Organism Value: Zea mays
  misc_feature: MA Experiment 108528 PARAMETER Experiment Name: Zm_Imbibed_Seeds_P Parameter: Plant Line Value: 35A19
  misc_feature: MA Experiment 108528 PARAMETER Experiment Name: Zm_Imbibed_Seeds_P Parameter: Tissue Value: Aerial vs. Embryo
  misc_feature: MA Experiment ID: 108529 Result: Up-regulated in Transcription
  misc_feature: MA Experiment 108529 PARAMETER Experiment Name: Zm_Imbibed_Seeds_P Parameter: Age (day) Value: 5 vs. 2
  misc_feature: MA Experiment 108529 PARAMETER Experiment Name: Zm_Imbibed_Seeds_P Parameter: Organism Value: Zea mays
  misc_feature: MA Experiment 108529 PARAMETER Experiment Name: Zm_Imbibed_Seeds_P Parameter: Plant Line Value: 35A19
  misc_feature: MA Experiment 108529 PARAMETER Experiment Name: Zm_Imbibed_Seeds_P Parameter: Tissue Value: Roots vs. Embryo
  misc_feature: MA Experiment ID: 108530 Result: Up-regulated in Transcription
  misc_feature: MA Experiment 108530 PARAMETER Experiment Name: Zm_Imbibed_Seeds_P Parameter: Age (day) Value: 6 vs. 2
  misc_feature: MA Experiment 108530 PARAMETER Experiment Name: Zm_Imbibed_Seeds_P Parameter: Organism Value: Zea mays
  misc_feature: MA Experiment 108530 PARAMETER Experiment Name: Zm_Imbibed_Seeds_P Parameter: Plant Line Value: 35A19
  misc_feature: MA Experiment 108530 PARAMETER Experiment Name: Zm_Imbibed_Seeds_P Parameter: Tissue Value: Aerial vs. Embryo
  misc_feature: MA Experiment ID: 108534 Result: Down-regulated in Transcription
  misc_feature: MA Experiment 108534 PARAMETER Experiment Name: Zm_4deg_Cold_P Parameter: Age (hr) Value: 8
  misc_feature: MA Experiment 108534 PARAMETER Experiment Name: Zm_4deg_Cold_P Parameter: Organism Value: Zea mays
  misc_feature: MA Experiment 108534 PARAMETER Experiment Name: Zm_4deg_Cold_P Parameter: Plant Line Value: 35A19
  misc_feature: MA Experiment 108534 PARAMETER Experiment Name: Zm_4deg_Cold_P Parameter: Temperature (deg C) Value: 4 vs. 22
  misc_feature: MA Experiment 108534 PARAMETER Experiment Name: Zm_4deg_Cold_P Parameter: Timepoint (hr) Value: 6
  misc_feature: MA Experiment 108534 PARAMETER Experiment Name: Zm_4deg_Cold_P Parameter: Tissue Value: Aerial
  misc_feature: MA Experiment ID: 108544 Result: Up-regulated in Transcription
  misc_feature: MA Experiment ID: 108545 Result: Up-regulated in Transcription
  misc_feature: MA Experiment 108545 PARAMETER Experiment Name: Zm_Imbibed_Seeds_P Parameter: Age (day) Value: 3 vs. 2
  misc_feature: MA Experiment 108545 PARAMETER Experiment Name: Zm_Imbibed_Seeds_P Parameter: Organism Value: Zea mays
  misc_feature: MA Experiment 108545 PARAMETER Experiment Name: Zm_Imbibed_Seeds_P Parameter: Plant Line Value: 35A19
  misc_feature: MA Experiment 108545 PARAMETER Experiment Name: Zm_Imbibed_Seeds_P Parameter: Tissue Value: Aerial vs. Embryo
  misc_feature: MA Experiment ID: 108547 Result: Up-regulated in Transcription
  misc_feature: MA Experiment 108547 PARAMETER Experiment Name: Zm_Imbibed_Seeds_P Parameter: Age (day) Value: 4 vs. 2
  misc_feature: MA Experiment 108547 PARAMETER Experiment Name: Zm_Imbibed_Seeds_P Parameter: Organism Value: Zea mays
  misc_feature: MA Experiment 108547 PARAMETER Experiment Name: Zm_Imbibed_Seeds_P Parameter: Plant Line Value: 35A19
  misc_feature: MA Experiment 108547 PARAMETER Experiment Name: Zm_Imbibed_Seeds_P Parameter: Tissue Value: Aerial vs. Embryo
  misc_feature: MA Experiment ID: 108559 Result: Down-regulated in Transcription
  misc_feature: MA Experiment 108559 PARAMETER Experiment Name: Zm_5mM_NO_P Parameter: Age (day) Value: 8
  misc_feature: MA Experiment 108559 PARAMETER Experiment Name: Zm_5mM_NO_P Parameter: Organism Value: Zea mays
  misc_feature: MA Experiment 108559 PARAMETER Experiment Name: Zm_5mM_NO_P Parameter: Plant Line Value: 35A19
  misc_feature: MA Experiment 108559 PARAMETER Experiment Name: Zm_5mM_NO_P Parameter: Timepoint (hr) Value: 12
  misc_feature: MA Experiment 108559 PARAMETER Experiment Name: Zm_5mM_NO_P Parameter: Tissue Value: Aerial
  misc_feature: MA Experiment 108559 PARAMETER Experiment Name: Zm_5mM_NO_P Parameter: Treatment Value: 5mM NO vs. No Treatment
  misc_feature: MA Experiment ID: 108687 Result: Down-regulated in Transcription
  misc_feature: MA Experiment 108687 PARAMETER Experiment Name: Zm_Embryos-Flowers__P Parameter: Tissue Value: Embryo vs. Aerial+
  misc_feature: MA Experiment ID: 20000535 Result: Down-regulated in Transcription
  misc_feature: MA Experiment 20000535 PARAMETER Experiment Name: Zm_Hybrid_Seed_Dev_P Parameter: DAP Value: 30 vs. 12
  misc_feature: MA Experiment 20000535 PARAMETER Experiment Name: Zm_Hybrid_Seed_Dev_P Parameter: Organism Value: Zea mays
  misc_feature: MA Experiment 20000535 PARAMETER Experiment Name: Zm_Hybrid_Seed_Dev_P Parameter: Plant Line Value: 35A19
  misc_feature: MA Experiment 20000535 PARAMETER Experiment Name: Zm_Hybrid_Seed_Dev_P Parameter: Tissue Value: Embryo vs. Unfert Floret
gcacgagaccattacctagaacatcctaatcgaaaaagtttctcgttcccggcgtggtgtggcctggccactggccacccgtgccctatcctcttccgcacggcgtcctatatataaggaaaggaaaaatctgccactccacacgcgctcctctctcgccgtcgccaaccatcgccgcctcgcgtccggacccgccgttcctccgaggaaatggctgcactgcaaccctcattttcaccagcaatgactttgaagagtagctgcagcgccctgaagttcccaaaaactgcactgttatctggttttggtggcattccacgccttcaagatgcgcaagacaggaacactagcgtcgcttatttgatccccaaggctgcttcagtgactgaccagtcaatagcagagccaccaaaaaccaagcaaaataggcacacagtcgacccaacagctccagaatttctgccactcccatcttttgaagaatgctttccaaggagtaccaaagaatcaagtgaaatcatccacgaggaatcaggtcatgtcctcaaggttccattccggagagtccatttgactggagatcagaagcactttgatacatatgacaccagcggtcctcaaaatataagcccaaggattggactcccaaagataaggaaggaatggattgataggagggaaaagctgggtagtcctcggtacacacaaatgtattatgctaaacagggaattgtaacagaggagatgttatactgtgccagccgtgagaaccttagtcctgaatttgttcggacagaagttgcccgtggacgagccataattccttccaacaagaggcacctggaattggaacccatgattgttggaagaaacttccttgtaaaggtgaatgcaaatattgggaattcagctgttgtgagctccattgaggaggaagttcacaagctccagtgggccacgatgtggggagctgatactgtcatggacctttcaacagggcgacatatccatgagacgcgggaatggattattcgcaactctccggttcctattgggactgttcctatttaccaagcacttgagaaagtaaatggtattgctgaaaatctgagctgggaaatttttagggataccttgattgaacaagctgagcagggcgttgattacttcacaatccatgctggtgtcctgcttcgttacattcctcttacagcaaagagaatgacgggcatagtttcacgtggtggctcaatccatgcaaaatggtgcttaacttatcacaaggagaactttgcatatgaacattgggatgacattcttgacatatgcaatcagtatgatgtggcattatcaattggtgatggtttgaggcctggttccatttatgatgcaaatgatagtgcacagtttgcagaactgctgactcaaggtgaactaacacgtcgagcatgggcgaaagatgtgcaggtaatgaatgaaggcccgggtcacatcccaatgcataaaattcctgaaaacatggagaaacagttggagtggtgtaatgaagcgcctttctatacattgggtcctttgacaactgatattgcacctggttatgatcacatcacttcagccattggtgctgccaacattggagctcttggcactgcacttctttgctatgtaacaccaaaggagcaccttgggttgcccaatcgtgatgatgtcaagactggtgtaatatcctacaaaatttctgctcatgctgctgatttggcgaagggtcatccctatgcacaagcttgggatgatgcacttagcaaggcaaggtttgagtttagatggcttgaccaatttgctttatctctggatccagtaactgctatggctttccatgatgaaacattgccctctgagggtgccaaagtggcacatttctgctcaatgtgtgggcccaagttttgttcaatgaaaatcacggaggatatcaggaagtatgctgatgaaaatggttatggaacagtagaggaagctgtgatacaaggaatgaatgctatgagtgctgaatttttggctgcaaggaaaacaattagtggggaacaacatggtgaagcaggaggggagatctatgtaccagaaagctatgcagctcagaaataaggtttcctcggagccatccattctaaatgaggctaaggcatcagcagctgttctggctagtggctaaggcatcagcagctgttctaccatcttatctaatgagatggtaagcagtatgtgaataaagctggtgttgcttaccttcagtttgtgaatgccattatgtactgtaataaaaaactctgtattgtactccctagcattatcattatgcttttgtcttctttgtatcacaatgggattgttagtgatgaaaattgcaccaggggtgcctgtgttctc

SEQ ID NO: 18443 - protein, 643 aa, Zea mays subsp. mays
  peptide (1)..(643): Ceres Seq. ID no. 12375125
  misc_feature (165)..(588): Pfam Name: ThiC family Pfam Description: ThiC family
  misc_feature (186)..(614): Homolog of NCBI NO: 26991600 NR Description: thiamin biosynthesis protein ThiC [Pseudomonas
  misc_feature (155)..(188): Homolog of NCBI NO: 23103985 NR Description: hypothetical protein [Azotobacter vinelandii]
  misc_feature (186)..(614): Homolog of NCBI NO: 23103985 NR Description: hypothetical protein [Azotobacter vinelandii]
  misc_feature (77)..(199): Homolog of NCBI NO: 16762293 NR Description: thiamine biosynthesis protein
  misc_feature (142)..(616): Homolog of NCBI NO: 16762293 NR Description: thiamine biosynthesis protein
  misc_feature (82)..(615): Homolog of NCBI NO: 16077944 NR Description: thiA [Bacillus subtilis]
  misc_feature (155)..(194): Homolog of NCBI NO: 15600166 NR Description: thiamin biosynthesis protein ThiC [Pseudomonas
  misc_feature (186)..(614): Homolog of NCBI NO: 15600166 NR Description: thiamin biosynthesis protein ThiC [Pseudomonas
  misc_feature (71)..(617): Homolog of NCBI NO: 15614496 NR Description: thiamin biosynthesis protein [Bacillus
  misc_feature (15)..(643): Homolog of NCBI NO: 15227584 NR Description: putative thiamin biosynthesis protein
MAALQPSFSPAMTLKSSCSALKFPKTALLSGFGGIPRLQDAQDRNTSVAYLIPKAASVTDQSIAEPPKTKQNRHTVDPTAPEFLPLPSFEECFPRSTKESSEIIHEESGHVLKVPFRRVHLTGDQKHFDTYDTSGPQNISPRIGLPKIRKEWIDRREKLGSPRYTQMYYAKQGIVTEEMLYCASRENLSPEFVRTEVARGRAIIPSNKRHLELEPMIVGRNFLVKVNANIGNSAVVSSIEEEVHKLQWATMWGADTVMDLSTGRHIHETREWIIRNSPVPIGTVPIYQALEKVNGIAENLSWEIFRDTLIEQAEQGVDYFTIHAGVLLRYIPLTAKRMTGIVSRGGSIHAKWCLTYHKENFAYEHWDDILDICNQYDVALSIGDGLRPGSIYDANDSAQFAELLTQGELTRRAWAKDVQVMNEGPGHIPMHKIPENMEKQLEWCNEAPFYTLGPLTTDIAPGYDHITSAIGAANIGALGTALLCYVTPKEHLGLPNRDDVKTGVISYKISAHAADLAKGHPYAQAWDDALSKARFEFRWLDQFALSLDPVTAMAFHDETLPSEGAKVAHFCSMCGPKFCSMKITEDIRKYADENGYGTVEEAVIQGMNAMSAEFLAARKTISGEQHGEAGGEIYVPESYAAQK

SEQ ID NO: 18444 - protein, 632 aa, Zea mays subsp. mays
  peptide (1)..(632): Ceres Seq. ID no. 12375126
  misc_feature (154)..(577): Pfam Name: ThiC family Pfam Description: ThiC family
  misc_feature (175)..(603): Homolog of NCBI NO: 26991600 NR Description: thiamin biosynthesis protein ThiC [Pseudomonas
  misc_feature (144)..(177): Homolog of NCBI NO: 23103985 NR Description: hypothetical protein [Azotobacter vinelandii]
  misc_feature (175)..(603): Homolog of NCBI NO: 23103985 NR Description: hypothetical protein [Azotobacter vinelandii]
  misc_feature (66)..(188): Homolog of NCBI NO: 16762293 NR Description: thiamine biosynthesis protein
  misc_feature (131)..(605): Homolog of NCBI NO: 16762293 NR Description: thiamine biosynthesis protein
  misc_feature (71)..(604): Homolog of NCBI NO: 16077944 NR Description: thiA [Bacillus subtilis]
  misc_feature (144)..(183): Homolog of NCBI NO: 15600166 NR Description: thiamin biosynthesis protein ThiC [Pseudomonas
  misc_feature (175)..(603): Homolog of NCBI NO: 15600166 NR Description: thiamin biosynthesis protein ThiC [Pseudomonas
  misc_feature (60)..(606): Homolog of NCBI NO: 15614496 NR Description: thiamin biosynthesis protein [Bacillus
  misc_feature (4)..(632): Homolog of NCBI NO: 15227584 NR Description: putative thiamin biosynthesis protein
MTLKSSCSALKFPKTALLSGFGGIPRLQDAQDRNTSVAYLIPKAASVTDQSIAEPPKTKQNRHTVDPTAPEFLPLPSFEECFPRSTKESSEIIHEESGHVLKVPFRRVHLTGDQKHFDTYDTSGPQNISPRIGLPKIRKEWIDRREKLGSPRYTQMYYAKQGIVTEEMLYCASRENLSPEFVRTEVARGRAIIPSNKRHLELEPMIVGRNFLVKVNANIGNSAVVSSIEEEVHKLQWATMWGADTVMDLSTGRHIHETREWIIRNSPVPIGTVPIYQALEKVNGIAENLSWEIFRDTLIEQAEQGVDYFTIHAGVLLRYIPLTAKRMTGIVSRGGSIHAKWCLTYHKENFAYEHWDDILDICNQYDVALSIGDGLRPGSIYDANDSAQFAELLTQGELTRRAWAKDVQVMNEGPGHIPMHKIPENMEKQLEWCNEAPFYTLGPLTTDIAPGYDHITSAIGAANIGALGTALLCYVTPKEHLGLPNRDDVKTGVISYKISAHAADLAKGHPYAQAWDDALSKARFEFRWLDQFALSLDPVTAMAFHDETLPSEGAKVAHFCSMCGPKFCSMKITEDIRKYADENGYGTVEEAVIQGMNAMSAEFLAARKTISGEQHGEAGGEIYVPESYAAQK

SEQ ID NO: 18445 - protein, 477 aa, Zea mays subsp. mays
  peptide (1)..(477): Ceres Seq. ID no. 12375127
  misc_feature (1)..(422): Pfam Name: ThiC family Pfam Description: ThiC family
  misc_feature (20)..(448): Homolog of NCBI NO: 26991600 NR Description: thiamin biosynthesis protein ThiC [Pseudomonas
  misc_feature (1)..(22): Homolog of NCBI NO: 23103985 NR Description: hypothetical protein [Azotobacter vinelandii]
  misc_feature (20)..(448): Homolog of NCBI NO: 23103985 NR Description: hypothetical protein [Azotobacter vinelandii]
  misc_feature (1)..(33): Homolog of NCBI NO: 16762293 NR Description: thiamine biosynthesis protein
  misc_feature (1)..(450): Homolog of NCBI NO: 16762293 NR Description: thiamine biosynthesis protein
  misc_feature (1)..(449): Homolog of NCBI NO: 16077944 NR Description: thiA [Bacillus subtilis]
  misc_feature (1)..(28): Homolog of NCBI NO: 15600166 NR Description: thiamin biosynthesis protein ThiC [Pseudomonas
  misc_feature (20)..(448): Homolog of NCBI NO: 15600166 NR Description: thiamin biosynthesis protein ThiC [Pseudomonas
  misc_feature (1)..(451): Homolog of NCBI NO: 15614496 NR Description: thiamin biosynthesis protein [Bacillus
  misc_feature (1)..(477): Homolog of NCBI NO: 15227584 NR Description: putative thiamin biosynthesis protein
MYYAKQGIVTEEMLYCASRENLSPEFVRTEVARGRAIIPSNKRHLELEPMIVGRNFLVKVNANIGNSAVVSSIEEEVHKLQWATMWGADTVMDLSTGRHIHETREWIIRNSPVPIGTVPIYQALEKVNGIAENLSWEIFRDTLIEQAEQGVDYFTIHAGVLLRYIPLTAKRMTGIVSRGGSIHAKWCLTYHKENFAYEHWDDILDICNQYDVALSIGDGLRPGSIYDANDSAQFAELLTQGELTRRAWAKDVQVMNEGPGHIPMHKIPENMEKQLEWCNEAPFYTLGPLTTDIAPGYDHITSAIGAANIGALGTALLCYVTPKEHLGLPNRDDVKTGVISYKISAHAADLAKGHPYAQAWDDALSKARFEFRWLDQFALSLDPVTAMAFHDETLPSEGAKVAHFCSMCGPKFCSMKITEDIRKYADENGYGTVEEAVIQGMNAMSAEFLAARKTISGEQHGEAGGEIYVPESYAAQK

SEQ ID NO: 18446 - DNA, 2341 bp, Zea mays subsp. mays
  misc_feature (1)..(2341): Ceres Seq. ID no. 12375114
  misc_feature: MA Experiment ID: 108528 Result: Down-regulated in Transcription
  misc_feature: MA Experiment 108528 PARAMETER Experiment Name: Zm_Imbibed_Seeds_P Parameter: Age (day) Value: 5 vs. 2
  misc_feature: MA Experiment 108528 PARAMETER Experiment Name: Zm_Imbibed_Seeds_P Parameter: Organism Value: Zea mays
  misc_feature: MA Experiment 108528 PARAMETER Experiment Name: Zm_Imbibed_Seeds_P Parameter: Plant Line Value: 35A19
  misc_feature: MA Experiment 108528 PARAMETER Experiment Name: Zm_Imbibed_Seeds_P Parameter: Tissue Value: Aerial vs. Embryo
  misc_feature: MA Experiment ID: 108529 Result: Down-regulated in Transcription
  misc_feature: MA Experiment 108529 PARAMETER Experiment Name: Zm_Imbibed_Seeds_P Parameter: Age (day) Value: 5 vs. 2
  misc_feature: MA Experiment 108529 PARAMETER Experiment Name: Zm_Imbibed_Seeds_P Parameter: Organism Value: Zea mays
  misc_feature: MA Experiment 108529 PARAMETER Experiment Name: Zm_Imbibed_Seeds_P Parameter: Plant Line Value: 35A19
  misc_feature: MA Experiment 108529 PARAMETER Experiment Name: Zm_Imbibed_Seeds_P Parameter: Tissue Value: Roots vs. Embryo
  misc_feature: MA Experiment ID: 108530 Result: Down-regulated in Transcription
  misc_feature: MA Experiment 108530 PARAMETER Experiment Name: Zm_Imbibed_Seeds_P Parameter: Age (day) Value: 6 vs. 2
  misc_feature: MA Experiment 108530 PARAMETER Experiment Name: Zm_Imbibed_Seeds_P Parameter: Organism Value: Zea mays
  misc_feature: MA Experiment 108530 PARAMETER Experiment Name: Zm_Imbibed_Seeds_P Parameter: Plant Line Value: 35A19
  misc_feature: MA Experiment 108530 PARAMETER Experiment Name: Zm_Imbibed_Seeds_P Parameter: Tissue Value: Aerial vs. Embryo
  misc_feature: MA Experiment ID: 108535 Result: Up-regulated in Transcription
  misc_feature: MA Experiment 108535 PARAMETER Experiment Name: Zm_Meristem_P Parameter: Age (day) Value: 8
  misc_feature: MA Experiment 108535 PARAMETER Experiment Name: Zm_Meristem_P Parameter: Organism Value: Zea mays
  misc_feature: MA Experiment 108535 PARAMETER Experiment Name: Zm_Meristem_P Parameter: Plant Line Value: 35A19
  misc_feature: MA Experiment 108535 PARAMETER Experiment Name: Zm_Meristem_P Parameter: Tissue Value: Root Meristem vs. Above Root Meristem
  misc_feature: MA Experiment ID: 108543 Result: Up-regulated in Transcription
  misc_feature: MA Experiment ID: 108544 Result: Down-regulated in Transcription
  misc_feature: MA Experiment ID: 108546 Result: Down-regulated in Transcription
  misc_feature: MA Experiment 108546 PARAMETER Experiment Name: Zm_Imbibed_Seeds_P Parameter: Age (day) Value: 3 vs. 2
  misc_feature: MA Experiment 108546 PARAMETER Experiment Name: Zm_Imbibed_Seeds_P Parameter: Organism Value: Zea mays
  misc_feature: MA Experiment 108546 PARAMETER Experiment Name: Zm_Imbibed_Seeds_P Parameter: Plant Line Value: 35A19
  misc_feature: MA Experiment 108546 PARAMETER Experiment Name: Zm_Imbibed_Seeds_P Parameter: Tissue Value: Roots vs. Embryo
gcacgagaccattacctagaacatcctaatcaaaaagaacgacggtccaaaattttccctacccaaccccctctacccatcctgtcccgttccgctccgccgccgccgtcgaccgcacgagatgccgccggccgaggacgccccaccgcagaccccccctcccgcgcgctggacggcggccgggtcgcgggtgctgctgcagtctccgcctccagcgttcccgctcggatccaatgatgaccagcaagaacgcgcccgcgcccgcgcggcggcgcgtgccgcctccgtccgccgccgatccctcgccgcctccattgcgccctccaaggacccgcgccacgacctcctcaaccgcgagcaggtcatggacctcttccataactgtatcaagctcgcatcggagaacaaaattaaccagaagaacacgtgggagctaggcctaatcgatcatctcagcgagatcatccaagcgggggtggacgaggacgaggagaccaactttcagaaggcaagctgcacactggaggcgggggtcaagatatattcacttcgtgtggattcagtgcactccgaggcttacaaggtgcttggtgggataaaccgtgccggaaggggtgaagaggctgatttggaggaaggcagcaatgttgaacctgcacaggatgaagcaatcaataaaaaggatgctgataggaggatttcacctgcttcaacgttggagtcgtcatttgaggctctcaatgtaaagaaatttgatgttgctttcacggtggatcctctataccatcaaactaccgctcagtttgatgaaggtggggcaaagggccttttgttgtataaccttggagtttatggtagctgccgtgtgctgttcgattcatttgaagctccagacaaatgcatcttaagtgatatgcaaactgagcaggctgagacaattgacctttcatttgctaaagagcaaattgaggaaatggtcactcaaatgcgtctatgtaatgatatttctccaaccctgagggatattgttgctcaatttgatgaagaaaaccaaaggccatcacataggttatctcctggtcaaatgccagtaatggaagatcagatggatgatggtaatgaagcagacgataacgatagcatgctacctgattctggaacttgggattttggtgattgtcatgaccatgaggatacatatgatcaaaactgtaatccaatggattccatctcaacaaactttcaagaggaattcaatgaatacactgttgagattcctcagggtactattgtaaacgatagagttgacaaaattgcatctcttgtgttacttggcatggcctcatcaaaagcaaatgcttgggcaggacctgagcactggaaatatcggaaagctaaagatttggaggctgctccaacttcatcaggtgattcagaaataacaaataagataaagaaaagaaccaaggataaacctgacattggtttcacaaaagcattggacaatgagcttccaaatatcttcgcggctcccaaaaatccaaagacattactgtttcctgcaaacagggctatttgcagcaataaacttccagaagattgccattaccggcctgaaagccttgttaaattatttcttctcccagatgttttgtgtcttgctaagagaagaaaatcacttgatgctccagtggataataatgatgactttatcccatctgaaccttgggaagatgacaacttttgcaatgaccacattgatgaaggacatgtgtgtagtgatgtagaagagccagtaaatcttatcaataaaccgagacaggtcaacaagattgatatacagtatgacaaggtatcaaaacaagtggatgttcatgctttaaaagaagtgctttggaatcacatccatgcatctgctgagactggtcaggaaagagaggaacctggaccaccgctgcgcctatctcaggtgttacatgaccttccaagcagcagcccagatgctgtagcaactgatatttcgccacacctgtatttcatctgccttctgcatctggcaaatgagcacaacttgaagctctgtgatcgccccatgttggatgaaatagacatatacatgccgccgacttcaccgcttgtgaagtgaaccatgctgtaccggagatgctagtcttttttattttgtttattgttgaccggcctaaaccaacgccatgattattgggtagtgatctctgattgttgctaaggtgcccgtcgtgacatgctcagctcactgatgtaacttgaaaaatgaaacttcatatattttttaaagtagtgatgctcggaacgatactgc

SEQ ID NO: 18447 - protein, 674 aa, Zea mays subsp. mays
  peptide (1)..(674): Ceres Seq. ID no. 12375115
  misc_feature (7)..(667): Pfam Name: Barren protein Pfam Description: Barren protein
  misc_feature (3)..(589): Homolog of NCBI NO: 21450193 NR Description: RIKEN cDNA A730011O11; hypothetical protein
  misc_feature (7)..(664): Homolog of NCBI NO: 33417152 NR Description: Unknown (protein for MGC:69107) [Xenopus laevis]
  misc_feature (560)..(664): Homolog of NCBI NO: 30172764 NR Description: Condensin subunit 2 (Chromosome-associated
  misc_feature (1)..(604): Homolog of NCBI NO: 30172764 NR Description: Condensin subunit 2 (Chromosome-associated
  misc_feature (3)..(589): Homolog of NCBI NO: 30172806 NR Description: Condensin subunit 2 (Barren homolog protein 1)
  misc_feature (543)..(653): Homolog of NCBI NO: 21450193 NR Description: RIKEN cDNA A730011O11; hypothetical protein
  misc_feature (543)..(653): Homolog of NCBI NO: 30172806 NR Description: Condensin subunit 2 (Barren homolog protein 1)
  misc_feature (149)..(666): Homolog of NCBI NO: 15225709 NR Description: hypothetical protein; protein id: At2g32590.1
  misc_feature (11)..(377): Homolog of NCBI NO: 15225709 NR Description: hypothetical protein; protein id: At2g32590.1
  misc_feature (1)..(674): Homolog of NCBI NO: 34913488 NR Description: putative condensin complex subunit
MPPAEDAPPQTPPPARWTAAGSRVLLQSPPPAFPLGSNDDQQERARARAAARAASVRRRSLAASIAPSKDPRHDLLNREQVMDLFHNCIKLASENKINQKNTWELGLIDHLSEIIQAGVDEDEETNFQKASCTLEAGVKIYSLRVDSVHSEAYKVLGGINRAGRGEEADLEEGSNVEPAQDEAINKKDADRRISPASTLESSFEALNVKKFDVAFTVDPLYHQTTAQFDEGGAKGLLLYNLGVYGSCRVLFDSFEAPDKCILSDMQTEQAETIDLSFAKEQIEEMVTQMRLCNDISPTLRDIVAQFDEENQRPSHRLSPGQMPVMEDQMDDGNEADDNDSMLPDSGTWDFGDCHDHEDTYDQNCNPMDSISTNFQEEFNEYTVEIPQGTIVNDRVDKIASLVLLGMASSKANAWAGPEHWKYRKAKDLEAAPTSSGDSEITNKIKKRTKDKPDIGFTKALDNELPNIFAAPKNPKTLLFPANRAICSNKLPEDCHYRPESLVKLFLLPDVLCLAKRRKSLDAPVDNNDDFIPSEPWEDDNFCNDHIDEGHVCSDVEEPVNLINKPRQVNKIDIQYDKVSKQVDVHALKEVLWNHIHASAETGQEREEPGPPLRLSQVLHDLPSSSPDAVATDISPHLYFICLLHLANEHNLKLCDRPMLDEIDIYMPPTSPLVK

SEQ ID NO: 18448 - protein, 593 aa, Zea mays subsp. mays
  peptide (1)..(593): Ceres Seq. ID no. 12375116
  misc_feature (1)..(586): Pfam Name: Barren protein Pfam Description: Barren protein
  misc_feature (462)..(572): Homolog of NCBI NO: 30172806 NR Description: Condensin subunit 2 (Barren homolog protein 1)
  misc_feature (1)..(508): Homolog of NCBI NO: 30172806 NR Description: Condensin subunit 2 (Barren homolog protein 1)
  misc_feature (462)..(572): Homolog of NCBI NO: 21450193 NR Description: RIKEN cDNA A730011O11; hypothetical protein
  misc_feature (1)..(508): Homolog of NCBI NO: 21450193 NR Description: RIKEN cDNA A730011O11; hypothetical protein
  misc_feature (1)..(583): Homolog of NCBI NO: 33417152 NR Description: Unknown (protein for MGC:69107) [Xenopus laevis]
  misc_feature (479)..(583): Homolog of NCBI NO: 30172764 NR Description: Condensin subunit 2 (Chromosome-associated
  misc_feature (1)..(523): Homolog of NCBI NO: 30172764 NR Description: Condensin subunit 2 (Chromosome-associated
  misc_feature (68)..(585): Homolog of NCBI NO: 15225709 NR Description: hypothetical protein; protein id: At2g32590.1
  misc_feature (1)..(296): Homolog of NCBI NO: 15225709 NR Description: hypothetical protein; protein id: At2g32590.1
  misc_feature (1)..(593): Homolog of NCBI NO: 34913488 NR Description: putative condensin complex subunit
MDLFHNCIKLASENKINQKNTWELGLIDHLSEIIQAGVDEDEETNFQKASCTLEAGVKIYSLRVDSVHSEAYKVLGGINRAGRGEEADLEEGSNVEPAQDEAINKKDADRRISPASTLESSFEALNVKKFDVAFTVDPLYHQTTAQFDEGGAKGLLLYNLGVYGSCRVLFDSFEAPDKCILSDMQTEQAETIDLSFAKEQIEEMVTQMRLCNDISPTLRDIVAQFDEENQRPSHRLSPGQMPVMEDQMDDGNEADDNDSMLPDSGTWDFGDCHDHEDTYDQNCNPMDSISTNFQEEFNEYTVEIPQGTIVNDRVDKIASLVLLGMASSKANAWAGPEHWKYRKAKDLEAAPTSSGDSEITNKIKKRTKDKPDIGFTKALDNELPNIFAAPKNPKTLLFPANRAICSNKLPEDCHYRPESLVKLFLLPDVLCLAKRRKSLDAPVDNNDDFIPSEPWEDDNFCNDHIDEGHVCSDVEEPVNLINKPRQVNKIDIQYDKVSKQVDVHALKEVLWNHIHASAETGQEREEPGPPLRLSQVLHDLPSSSPDAVATDISPHLYFICLLHLANEHNLKLCDRPMLDEIDIYMPPTSPLVK

SEQ ID NO: 18449 - protein, 410 aa, Zea mays subsp. mays
  peptide (1)..(410): Ceres Seq. ID no. 12375117
  misc_feature (1)..(403): Pfam Name: Barren protein Pfam Description: Barren protein
  misc_feature (279)..(389): Homolog of NCBI NO: 30172806 NR Description: Condensin subunit 2 (Barren homolog protein 1)
  misc_feature (1)..(325): Homolog of NCBI NO: 30172806 NR Description: Condensin subunit 2 (Barren homolog protein 1)
  misc_feature (279)..(389): Homolog of NCBI NO: 21450193 NR Description: RIKEN cDNA A730011O11; hypothetical protein
  misc_feature (1)..(325): Homolog of NCBI NO: 21450193 NR Description: RIKEN cDNA A730011O11; hypothetical protein
  misc_feature (1)..(400): Homolog of NCBI NO: 33417152 NR Description: Unknown (protein for MGC:69107) [Xenopus laevis]
  misc_feature (296)..(400): Homolog of NCBI NO: 30172764 NR Description: Condensin subunit 2 (Chromosome-associated
  misc_feature (1)..(340): Homolog of NCBI NO: 30172764 NR Description: Condensin subunit 2 (Chromosome-associated
  misc_feature (1)..(402): Homolog of NCBI NO: 15225709 NR Description: hypothetical protein; protein id: At2g32590.1
  misc_feature (1)..(113): Homolog of NCBI NO: 15225709 NR Description: hypothetical protein; protein id: At2g32590.1
  misc_feature (1)..(410): Homolog of NCBI NO: 34913488 NR Description: putative condensin complex subunit
MQTEQAETIDLSFAKEQIEEMVTQMRLCNDISPTLRDIVAQFDEENQRPSHRLSPGQMPVMEDQMDDGNEADDNDSMLPDSGTWDFGDCHDHEDTYDQNCNPMDSISTNFQEEFNEYTVEIPQGTIVNDRVDKIASLVLLGMASSKANAWAGPEHWKYRKAKDLEAAPTSSGDSEITNKIKKRTKDKPDIGFTKALDNELPNIFAAPKNPKTLLFPANRAICSNKLPEDCHYRPESLVKLFLLPDVLCLAKRRKSLDAPVDNNDDFIPSEPWEDDNFCNDHIDEGHVCSDVEEPVNLINKPRQVNKIDIQYDKVSKQVDVHALKEVLWNHIHASAETGQEREEPGPPLRLSQVLHDLPSSSPDAVATDISPHLYFICLLHLANEHNLKLCDRPMLDEIDIYMPPTSPLVK

SEQ ID NO: 18450 - DNA, 748 bp, Zea mays subsp. mays
  misc_feature (1)..(748): Ceres Seq. ID no. 12363969
  misc_feature: MA Experiment ID: 20000492 Result: Down-regulated in Transcription
  misc_feature: MA Experiment 20000492 PARAMETER Experiment Name: Zm_Hybrid_Seed_Dev_P Parameter: DAP Value: 12
  misc_feature: MA Experiment 20000492 PARAMETER Experiment Name: Zm_Hybrid_Seed_Dev_P Parameter: Organism Value: Zea mays
  misc_feature: MA Experiment 20000492 PARAMETER Experiment Name: Zm_Hybrid_Seed_Dev_P Parameter: Plant Line Value: 35A19
  misc_feature: MA Experiment 20000492 PARAMETER Experiment Name: Zm_Hybrid_Seed_Dev_P Parameter: Tissue Value: Fert Kernel vs. Unfert Floret
gcacgagaccattacctagaacatcctaatcgaaaactccccaacagtttcattcctcgagggggatcgcttgtcggcggggaagcaaagcttagttcttgacgcccaacctccccgttgcctattcgcctcaggaatttgggaattatgtctctttgaggggaatcaagggacttgcttttacttgtctgggctccatgtctaagtgggagccagtcacgtttcaggaatctcttagctttgttaagaaagtaaaggcacgtgactacatgctatacatatcattgctcgatgtgctcaaccggaatgatcaaatccctctgcaagcttacagcgagctctcgcttctgtttcagcatcacgaagatctgttagcggagctgtcgaagttcaggcccctcccatgcccaaacaacgtttatacacacggctcgatttggatgatcatattcctcatgccttttctgctcctgagccttgtcctcgccttgagaagccattgaagtgtttcctgctccatagactgttgcgagcctaaatgatttgtcgtagcactaacacctagttgttgtatatagatatatggatggggttctatatcctgtaatttctttatgatctccttgtacgctcgtgcgcacggaaataatcgtacaatattatttcagtcgcggcagtctggcagtatgtaaagcctaaacagagatcgtttgacctcgtccaatcggaaattcagctttgtacaggg

SEQ ID NO: 18451 - protein, 101 aa, Zea mays subsp. mays
  peptide (1)..(101): Ceres Seq. ID no. 12363970
  misc_feature (1)..(98): Homolog of NCBI NO: 34894158 NR Description: putative co-repressor protein
MSKWEPVTFQESLSFVKKVKARDYMLYISLLDVLNRNDQIPLQAYSELSLLFQHHEDLLAELSKFRPLPCPNNVYTHGSIWMIIFLMPFLLLSLVLALRSH

SEQ ID NO: 18452 - protein, 77 aa, Zea mays subsp. mays
  peptide (1)..(77): Ceres Seq. ID no. 12363971
  misc_feature (1)..(74): Homolog of NCBI NO: 34894158 NR Description: putative co-repressor protein
MLYISLLDVLNRNDQIPLQAYSELSLLFQHHEDLLAELSKFRPLPCPNNVYTHGSIWMIIFLMPFLLLSLVLALRSH

SEQ ID NO: 18453 - DNA, 779 bp, Zea mays subsp. mays
  misc_feature (1)..(779): Ceres Seq. ID no. 12363972
  misc_feature: MA Experiment ID: 108535 Result: Up-regulated in Transcription
  misc_feature: MA Experiment 108535 PARAMETER Experiment Name: Zm_Meristem_P Parameter: Age (day) Value: 8
  misc_feature: MA Experiment 108535 PARAMETER Experiment Name: Zm_Meristem_P Parameter: Organism Value: Zea mays
  misc_feature: MA Experiment 108535 PARAMETER Experiment Name: Zm_Meristem_P Parameter: Plant Line Value: 35A19
  misc_feature: MA Experiment 108535 PARAMETER Experiment Name: Zm_Meristem_P Parameter: Tissue Value: Root Meristem vs. Above Root Meristem
  misc_feature: MA Experiment ID: 108544 Result: Down-regulated in Transcription
  misc_feature: MA Experiment ID: 20000108 Result: Up-regulated in Transcription
  misc_feature: MA Experiment 20000108 PARAMETER Experiment Name: Zm_Root-Tips_P Parameter: Age (day) Value: 12
  misc_feature: MA Experiment 20000108 PARAMETER Experiment Name: Zm_Root-Tips_P Parameter: Organism Value: Zea mays
  misc_feature: MA Experiment 20000108 PARAMETER Experiment Name: Zm_Root-Tips_P Parameter: Tissue Value: Root tips vs. Root mid region    35
  misc_feature: MA Experiment 20000108 PARAMETER Experiment Name: Zm_Root-Tips_P Parameter: Tissue Value: Root tips vs. Root mid region   Sequence Listing-Misc Features (4)
  misc_feature: MA Experiment ID: 20000477 Result: Down-regulated in Transcription
  misc_feature: MA Experiment 20000477 PARAMETER Experiment Name: Zm_5mM_SA_P Parameter: Age (day) Value: 10
  misc_feature: MA Experiment 20000477 PARAMETER Experiment Name: Zm_5mM_SA_P Parameter: Organism Value: Zea mays
  misc_feature: MA Experiment 20000477 PARAMETER Experiment Name: Zm_5mM_SA_P Parameter: Plant Line Value: 35A19
  misc_feature: MA Experiment 20000477 PARAMETER Experiment Name: Zm_5mM_SA_P Parameter: Timepoint (hr) Value: 48
  misc_feature: MA Experiment 20000477 PARAMETER Experiment Name: Zm_5mM_SA_P Parameter: Tissue Value: Aerial
  misc_feature: MA Experiment 20000477 PARAMETER Experiment Name: Zm_5mM_SA_P Parameter: Treatment Value: 5mM SA vs. No Treatment
  misc_feature: MA Experiment ID: 20000478 Result: Down-regulated in Transcription
  misc_feature: MA Experiment 20000478 PARAMETER Experiment Name: Zm_5mM_SA_P Parameter: Age (day) Value: 11
  misc_feature: MA Experiment 20000478 PARAMETER Experiment Name: Zm_5mM_SA_P Parameter: Organism Value: Zea mays
  misc_feature: MA Experiment 20000478 PARAMETER Experiment Name: Zm_5mM_SA_P Parameter: Plant Line Value: 35A19
  misc_feature: MA Experiment 20000478 PARAMETER Experiment Name: Zm_5mM_SA_P Parameter: Timepoint (hr) Value: 72
  misc_feature: MA Experiment 20000478 PARAMETER Experiment Name: Zm_5mM_SA_P Parameter: Tissue Value: Aerial
  misc_feature: MA Experiment 20000478 PARAMETER Experiment Name: Zm_5mM_SA_P Parameter: Treatment Value: 5mM SA vs. No Treatment
  misc_feature: MA Experiment ID: 20000479 Result: Down-regulated in Transcription
  misc_feature: MA Experiment 20000479 PARAMETER Experiment Name: Zm_Drought_P Parameter: Age (day) Value: 10
  misc_feature: MA Experiment 20000479 PARAMETER Experiment Name: Zm_Drought_P Parameter: Organism Value: Zea mays
  misc_feature: MA Experiment 20000479 PARAMETER Experiment Name: Zm_Drought_P Parameter: Plant Line Value: 35A19
  misc_feature: MA Experiment 20000479 PARAMETER Experiment Name: Zm_Drought_P Parameter: Timepoint (hr) Value: 48
  misc_feature: MA Experiment 20000479 PARAMETER Experiment Name: Zm_Drought_P Parameter: Tissue Value: Aerial
  misc_feature: MA Experiment 20000479 PARAMETER Experiment Name: Zm_Drought_P Parameter: Treatment Value: Drought vs. No Drought
  misc_feature: MA Experiment ID: 20000535 Result: Up-regulated in Transcription
  misc_feature: MA Experiment 20000535 PARAMETER Experiment Name: Zm_Hybrid_Seed_Dev_P Parameter: DAP Value: 30 vs. 12
  misc_feature: MA Experiment 20000535 PARAMETER Experiment Name: Zm_Hybrid_Seed_Dev_P Parameter: Organism Value: Zea mays
  misc_feature: MA Experiment 20000535 PARAMETER Experiment Name: Zm_Hybrid_Seed_Dev_P Parameter: Plant Line Value: 35A19
  misc_feature: MA Experiment 20000535 PARAMETER Experiment Name: Zm_Hybrid_Seed_Dev_P Parameter: Tissue Value: Embryo vs. Unfert Floret
gcacgagaccattacctagaacatcctaatcaaaagcctttttaccctcgtcctcgtgtgatctaccacttttcttctcgcgtgactctctcacagtctcactcacgcagtcacgcggctcacgccccaccccccaccaggccaccacaccgctctcttcttcaccaccgcgaaagcgagagagggagagagagcaggcagcggcaatggctggcgctggggacgagtactactacggcgggccggggcaggggcaggggccgcgcggcgccccacacggcctgctgctggcggtggtggtgggcctcgtggtggcgggcccgctgtttctgggcgacggcggcgaggcgctgacggaggccgtggcggagctgctgagcccggtcgggctgcttctcctccccgtgtgcctgctgttcctcatccgcctcctctcctccgaccgcggcgccgcggcgctcgccgacgtcttcgccttcggcgggtcccccgacgccgtccaccgcgtcggagggtcccccgtcggcgtcgcgctcatgctcctcctcatcctcgcgctgctctactaccgctcctcgctcttcggcggcggcggcgacgacgacgagtaggagaccggcggcgcgatctccggccgtggcgtggcgttgtttttgtgtaatgcgaggggcgtgggtgcaaaagtgcgtgtgtaaatcgagtggatcggagtaaattaatctaatttactcctttgctaatgcttcgtctgtttgtaaatcgatggctcctgaagctcc

SEQ ID NO: 18454 - protein, 134 aa, Zea mays subsp. mays
  peptide (1)..(134): Ceres Seq. ID no. 12363973
  misc_feature (11)..(133): Homolog of NCBI NO: 18397751 NR Description: expressed protein
  misc_feature (1)..(134): Homolog of NCBI NO: 22831149 NR Description: hypothetical protein~similar to Arabidopsis
MAGAGDEYYYGGPGQGQGPRGAPHGLLLAVVVGLVVAGPLFLGDGGEALTEAVAELLSPVGLLLLPVCLLFLIRLLSSDRGAAALADVFAFGGSPDAVHRVGGSPVGVALMLLLILALLYYRSSLFGGGGDDDE

SEQ ID NO: 18455 - protein, 117 aa, Zea mays subsp. mays
  peptide (1)..(117): Ceres Seq. ID no. 12363974
ARDHYLEHPNQKPFYPRPRVIYHFSSRVTLSQSHSRSHAAHAPPPTRPPHRSLLHHRESERGRESRQRQWLALGTSTTTAGRGRGRGRAAPHTACCWRWWWASWWRARCFWATAARR

SEQ ID NO: 18456 - DNA, 584 bp, Zea mays subsp. mays
  misc_feature (1)..(584): Ceres Seq. ID no. 12418092
  misc_feature: MA Experiment ID: 108523 Result: Down-regulated in Transcription
  misc_feature: MA Experiment 108523 PARAMETER Experiment Name: Zm_42deg_Heat_P Parameter: Age (day) Value: 8
  misc_feature: MA Experiment 108523 PARAMETER Experiment Name: Zm_42deg_Heat_P Parameter: Organism Value: Zea mays
  misc_feature: MA Experiment 108523 PARAMETER Experiment Name: Zm_42deg_Heat_P Parameter: Plant Line Value: 35A19
  misc_feature: MA Experiment 108523 PARAMETER Experiment Name: Zm_42deg_Heat_P Parameter: Temperature (deg C) Value: 42 vs. 22
  misc_feature: MA Experiment 108523 PARAMETER Experiment Name: Zm_42deg_Heat_P Parameter: Timepoint (hr) Value: 6
  misc_feature: MA Experiment 108523 PARAMETER Experiment Name: Zm_42deg_Heat_P Parameter: Tissue Value: Aerial
  misc_feature: MA Experiment ID: 108528 Result: Up-regulated in Transcription
  misc_feature: MA Experiment 108528 PARAMETER Experiment Name: Zm_Imbibed_Seeds_P Parameter: Age (day) Value: 5 vs. 2
  misc_feature: MA Experiment 108528 PARAMETER Experiment Name: Zm_Imbibed_Seeds_P Parameter: Organism Value: Zea mays
  misc_feature: MA Experiment 108528 PARAMETER Experiment Name: Zm_Imbibed_Seeds_P Parameter: Plant Line Value: 35A19
  misc_feature: MA Experiment 108528 PARAMETER Experiment Name: Zm_Imbibed_Seeds_P Parameter: Tissue Value: Aerial vs. Embryo
  misc_feature: MA Experiment ID: 108530 Result: Up-regulated in Transcription
  misc_feature: MA Experiment 108530 PARAMETER Experiment Name: Zm_Imbibed_Seeds_P Parameter: Age (day) Value: 6 vs. 2
  misc_feature: MA Experiment 108530 PARAMETER Experiment Name: Zm_Imbibed_Seeds_P Parameter: Organism Value: Zea mays
  misc_feature: MA Experiment 108530 PARAMETER Experiment Name: Zm_Imbibed_Seeds_P Parameter: Plant Line Value: 35A19
  misc_feature: MA Experiment 108530 PARAMETER Experiment Name: Zm_Imbibed_Seeds_P Parameter: Tissue Value: Aerial vs. Embryo
  misc_feature: MA Experiment ID: 108545 Result: Up-regulated in Transcription
  misc_feature: MA Experiment 108545 PARAMETER Experiment Name: Zm_Imbibed_Seeds_P Parameter: Age (day) Value: 3 vs. 2
  misc_feature: MA Experiment 108545 PARAMETER Experiment Name: Zm_Imbibed_Seeds_P Parameter: Organism Value: Zea mays
  misc_feature: MA Experiment 108545 PARAMETER Experiment Name: Zm_Imbibed_Seeds_P Parameter: Plant Line Value: 35A19
  misc_feature: MA Experiment 108545 PARAMETER Experiment Name: Zm_Imbibed_Seeds_P Parameter: Tissue Value: Aerial vs. Embryo
  misc_feature: MA Experiment ID: 108547 Result: Up-regulated in Transcription
  misc_feature: MA Experiment 108547 PARAMETER Experiment Name: Zm_Imbibed_Seeds_P Parameter: Age (day) Value: 4 vs. 2
  misc_feature: MA Experiment 108547 PARAMETER Experiment Name: Zm_Imbibed_Seeds_P Parameter: Organism Value: Zea mays
  misc_feature: MA Experiment 108547 PARAMETER Experiment Name: Zm_Imbibed_Seeds_P Parameter: Plant Line Value: 35A19
  misc_feature: MA Experiment 108547 PARAMETER Experiment Name: Zm_Imbibed_Seeds_P Parameter: Tissue Value: Aerial vs. Embryo
caaaatttcgtgccgttgtctttgtcttttctgccatttctcccgaatgattcttccgtggattggagcagagcactaagctcattgagccaaaatacaaaggaacagctgaggaatgcgtccacctgggtgtacccttcagtcagttttgattctgttcagaaatctgtaaccctcttcatgccaggctttgataagtctgaaatcaagctatatcaatatagaggtggatcagaactgttgatcgaagctggagatcagaggcgcgtcataaaattgccacttacgatgcagggaaaggtccaaggtgccaaattcgttgacaggaacctcgttgttagcatccggtagcagaatcgctggcgccggctgccggctgggattggagcaccccacttcagattggcagtttactgccgactaatgagcaggatcatcgggattgcatgtctgtttctgttcgtagcctgaattttgtggtgctgtttgtttcaactttcagccagagtgaagctgcatagtcctattattttttgaagaggttcgcgatactcgagtaaatagtaaactggcagttttttgcc

SEQ ID NO: 18457 - protein, 116 aa, Zea mays subsp. mays
  peptide (1)..(116): Ceres Seq. ID no. 12418093
  misc_feature (48)..(114): Homolog of NCBI NO: 16329406 NR Description: hypothetical protein [Synechocystis sp. PCC 6803]
  misc_feature (1)..(114): Homolog of NCBI NO: 22299794 NR Description: ORF_ID:tlr2251~probable anion-transporting ATPase
  misc_feature (3)..(114): Homolog of NCBI NO: 17231973 NR Description: hypothetical protein [Nostoc sp. PCC 7120]
  misc_feature (1)..(114): Homolog of NCBI NO: 23125737 NR Description: hypothetical protein [Nostoc punctiforme]
  misc_feature (2)..(116): Homolog of NCBI NO: 25518771 NR Description: hypothetical protein F14G11.6 - Arabidopsis
  misc_feature (2)..(116): Homolog of NCBI NO: 15222640 NR Description: unknown protein; protein id: At1g26090.1
QNFVPLSLSFLPFLPNDSSVDWSRALSSLSQNTKEQLRNASTWVYPSVSFDSVQKSVTLFMPGFDKSEIKLYQYRGGSELLIEAGDQRRVIKLPLTMQGKVQGAKFVDRNLVVSIR

SEQ ID NO: 18458 - protein, 56 aa, Zea mays subsp. mays
  peptide (1)..(56): Ceres Seq. ID no. 12418094
  misc_feature (1)..(54): Homolog of NCBI NO: 16329406 NR Description: hypothetical protein [Synechocystis sp. PCC 6803]
  misc_feature (1)..(54): Homolog of NCBI NO: 22299794 NR Description: ORF_ID:tlr2251~probable anion-transporting ATPase
  misc_feature (1)..(54): Homolog of NCBI NO: 17231973 NR Description: hypothetical protein [Nostoc sp. PCC 7120]
  misc_feature (1)..(54): Homolog of NCBI NO: 23125737 NR Description: hypothetical protein [Nostoc punctiforme]
  misc_feature (1)..(56): Homolog of NCBI NO: 25518771 NR Description: hypothetical protein F14G11.6 - Arabidopsis
  misc_feature (1)..(56): Homolog of NCBI NO: 15222640 NR Description: unknown protein; protein id: At1g26090.1
MPGFDKSEIKLYQYRGGSELLIEAGDQRRVIKLPLTMQGKVQGAKFVDRNLVVSIR

SEQ ID NO: 18459 - DNA, 526 bp, Zea mays subsp. mays
  misc_feature (1)..(526): Ceres Seq. ID no. 1983587
  misc_feature: MA Experiment ID: 108528 Result: Down-regulated in Transcription
  misc_feature: MA Experiment 108528 PARAMETER Experiment Name: Zm_Imbibed_Seeds_P Parameter: Age (day) Value: 5 vs. 2
  misc_feature: MA Experiment 108528 PARAMETER Experiment Name: Zm_Imbibed_Seeds_P Parameter: Organism Value: Zea mays
  misc_feature: MA Experiment 108528 PARAMETER Experiment Name: Zm_Imbibed_Seeds_P Parameter: Plant Line Value: 35A19
  misc_feature: MA Experiment 108528 PARAMETER Experiment Name: Zm_Imbibed_Seeds_P Parameter: Tissue Value: Aerial vs. Embryo
  misc_feature: MA Experiment ID: 108530 Result: Down-regulated in Transcription
  misc_feature: MA Experiment 108530 PARAMETER Experiment Name: Zm_Imbibed_Seeds_P Parameter: Age (day) Value: 6 vs. 2
  misc_feature: MA Experiment 108530 PARAMETER Experiment Name: Zm_Imbibed_Seeds_P Parameter: Organism Value: Zea mays
  misc_feature: MA Experiment 108530 PARAMETER Experiment Name: Zm_Imbibed_Seeds_P Parameter: Plant Line Value: 35A19
  misc_feature: MA Experiment 108530 PARAMETER Experiment Name: Zm_Imbibed_Seeds_P Parameter: Tissue Value: Aerial vs. Embryo
  misc_feature: MA Experiment ID: 108535 Result: Down-regulated in Transcription
  misc_feature: MA Experiment 108535 PARAMETER Experiment Name: Zm_Meristem_P Parameter: Age (day) Value: 8
  misc_feature: MA Experiment 108535 PARAMETER Experiment Name: Zm_Meristem_P Parameter: Organism Value: Zea mays
  misc_feature: MA Experiment 108535 PARAMETER Experiment Name: Zm_Meristem_P Parameter: Plant Line Value: 35A19
  misc_feature: MA Experiment 108535 PARAMETER Experiment Name: Zm_Meristem_P Parameter: Tissue Value: Root Meristem vs. Above Root Meristem
  misc_feature: MA Experiment ID: 108689 Result: Up-regulated in Transcription
  misc_feature: MA Experiment 108689 PARAMETER Experiment Name: Zm_Drought_Roots_P Parameter: Age (day) Value: 9
  misc_feature: MA Experiment 108689 PARAMETER Experiment Name: Zm_Drought_Roots_P Parameter: Organism Value: Zea mays
  misc_feature: MA Experiment 108689 PARAMETER Experiment Name: Zm_Drought_Roots_P Parameter: Plant Line Value: 35A19
  misc_feature: MA Experiment 108689 PARAMETER Experiment Name: Zm_Drought_Roots_P Parameter: Timepoint (hr) Value: 24
  misc_feature: MA Experiment 108689 PARAMETER Experiment Name: Zm_Drought_Roots_P Parameter: Tissue Value: Roots
  misc_feature: MA Experiment 108689 PARAMETER Experiment Name: Zm_Drought_Roots_P Parameter: Treatment Value: Drought vs. No Drought
  misc_feature: MA Experiment ID: 20000480 Result: Up-regulated in Transcription
  misc_feature: MA Experiment 20000480 PARAMETER Experiment Name: Zm_Drought_P Parameter: Age (day) Value: 11
  misc_feature: MA Experiment 20000480 PARAMETER Experiment Name: Zm_Drought_P Parameter: Organism Value: Zea mays
  misc_feature: MA Experiment 20000480 PARAMETER Experiment Name: Zm_Drought_P Parameter: Plant Line Value: 35A19
  misc_feature: MA Experiment 20000480 PARAMETER Experiment Name: Zm_Drought_P Parameter: Timepoint (hr) Value: 72
  misc_feature: MA Experiment 20000480 PARAMETER Experiment Name: Zm_Drought_P Parameter: Tissue Value: Aerial
  misc_feature: MA Experiment 20000480 PARAMETER Experiment Name: Zm_Drought_P Parameter: Treatment Value: Drought vs. No Drought
gttggacgggtgacccaccggctcgggaacggcaacccaggacggcaggcgcggcgacacatggtcggggtacagggcctggccgtggccgcctcctgctcttcgatctcacgctgcgatggagcggtacgaggtgatcagggacatcggctcgggcaacttcggggtgacaaagctcgtccgggacgtcaggaccaaggagctcttcgccgtcaagttcatcgagagagggcaaaagattgatgagcatgttcagagggagattatgaaccaccggtccctgaagcacccaaacataattagattcaaggaggtcgtgctaactcccacgcatttggcaatagttatggaatatgctgctgggggtgagctatttgaaaggatctgcagtgcggggagatttagtgaggatgaggcaaggttcttcttccagcaactgatttcgggagtgagctattgccattccatgcaagtatgccatagagatctgaaactagaaaacactctcctagattggtagtgtcgc

SEQ ID NO: 18460 - protein, 80 aa, Zea mays subsp. mays
  peptide (1)..(80): Ceres Seq. ID no. 1983588
VGRVTHRLGNGNPGRQARRHMVGVQGLAVAASCSSISRCDGAVRGDQGHRLGQLRGDKARPGRQDQGALRRQVHRERAKD

SEQ ID NO: 18461 - protein, 133 aa, Zea mays subsp. mays
  peptide (1)..(133): Ceres Seq. ID no. 1983589
  misc_feature (4)..(132): Pfam Name: Protein kinase domain Pfam Description: Protein kinase domain
  misc_feature (2)..(132): Homolog of NCBI NO: 15240124 NR Description: protein kinase, 41K (EC 2.7.1.-) (pir||S71172)
  misc_feature (2)..(132): Homolog of NCBI NO: 18418337 NR Description: protein kinase - like protein
  misc_feature (2)..(132): Homolog of NCBI NO: 7446439 NR Description: probable serine/threonine-specific protein kinase
  misc_feature (11)..(132): Homolog of NCBI NO: 416564 NR Description: Abcisic acid-inducible protein kinase
  misc_feature (1)..(132): Homolog of NCBI NO: 21618139 NR Description: serine-threonine protein kinase, putative
  misc_feature (1)..(132): Homolog of NCBI NO: 15218270 NR Description: serine-threonine protein kinase, putative
  misc_feature (1)..(132): Homolog of NCBI NO: 14588571 NR Description: protein kinase HvPKABA1 [Hordeum vulgare subsp.
  misc_feature (1)..(132): Homolog of NCBI NO: 2055374 NR Description: serine-threonine protein kinase [Triticum
  misc_feature (1)..(132): Homolog of NCBI NO: 34906840 NR Description: putative protein kinase HvPKABA1(Abcisic
  misc_feature (1)..(132): Homolog of NCBI NO: 29164823 NR Description: abcisic acid-inducible protein kinanase
MERYEVIRDIGSGNFGVTKLVRDVRTKELFAVKFIERGQKIDEHVQREIMNHRSLKHPNIIRFKEVVLTPTHLAIVMEYAAGGELFERICSAGRFSEDEARFFFQQLISGVSYCHSMQVCHRDLKLENTLLDW

SEQ ID NO: 18462 - protein, 84 aa, Zea mays subsp. mays
  peptide (1)..(84): Ceres Seq. ID no. 1983590
  misc_feature (1)..(83): Pfam Name: Protein kinase domain Pfam Description: Protein kinase domain
  misc_feature (1)..(83): Homolog of NCBI NO: 15240124 NR Description: protein kinase, 41K (EC 2.7.1.-) (pir||S71172)
  misc_feature (1)..(83): Homolog of NCBI NO: 18418337 NR Description: protein kinase - like protein
  misc_feature (1)..(83): Homolog of NCBI NO: 7446439 NR Description: probable serine/threonine-specific protein kinase
  misc_feature (1)..(83): Homolog of NCBI NO: 416564 NR Description: Abcisic acid-inducible protein kinase
  misc_feature (1)..(83): Homolog of NCBI NO: 21618139 NR Description: serine-threonine protein kinase, putative
  misc_feature (1)..(83): Homolog of NCBI NO: 15218270 NR Description: serine-threonine protein kinase, putative
  misc_feature (1)..(83): Homolog of NCBI NO: 14588571 NR Description: protein kinase HvPKABA1 [Hordeum vulgare subsp.
  misc_feature (1)..(83): Homolog of NCBI NO: 2055374 NR Description: serine-threonine protein kinase [Triticum
  misc_feature (1)..(83): Homolog of NCBI NO: 34906840 NR Description: putative protein kinase HvPKABA1(Abcisic
  misc_feature (1)..(83): Homolog of NCBI NO: 29164823 NR Description: abcisic acid-inducible protein kinanase
MNHRSLKHPNIIRFKEVVLTPTHLAIVMEYAAGGELFERICSAGRFSEDEARFFFQQLISGVSYCHSMQVCHRDLKLENTLLDW

SEQ ID NO: 18463 - DNA, 1795 bp, Zea mays subsp. mays
  misc_feature (1)..(1795): Ceres Seq. ID no. 12362950
  misc_feature: MA Experiment ID: 108523 Result: Down-regulated in Transcription
  misc_feature: MA Experiment 108523 PARAMETER Experiment Name: Zm_42deg_Heat_P Parameter: Age (day) Value: 8
  misc_feature: MA Experiment 108523 PARAMETER Experiment Name: Zm_42deg_Heat_P Parameter: Organism Value: Zea mays
  misc_feature: MA Experiment 108523 PARAMETER Experiment Name: Zm_42deg_Heat_P Parameter: Plant Line Value: 35A19
  misc_feature: MA Experiment 108523 PARAMETER Experiment Name: Zm_42deg_Heat_P Parameter: Temperature (deg C) Value: 42 vs. 22
  misc_feature: MA Experiment 108523 PARAMETER Experiment Name: Zm_42deg_Heat_P Parameter: Timepoint (hr) Value: 6
  misc_feature: MA Experiment 108523 PARAMETER Experiment Name: Zm_42deg_Heat_P Parameter: Tissue Value: Aerial
  misc_feature: MA Experiment ID: 108527 Result: Up-regulated in Transcription
  misc_feature: MA Experiment 108527 PARAMETER Experiment Name: Zm_5mM_NO_P Parameter: Age (day) Value: 8
  misc_feature: MA Experiment 108527 PARAMETER Experiment Name: Zm_5mM_NO_P Parameter: Organism Value: Zea mays
  misc_feature: MA Experiment 108527 PARAMETER Experiment Name: Zm_5mM_NO_P Parameter: Plant Line Value: 35A19
  misc_feature: MA Experiment 108527 PARAMETER Experiment Name: Zm_5mM_NO_P Parameter: Timepoint (hr) Value: 6
  misc_feature: MA Experiment 108527 PARAMETER Experiment Name: Zm_5mM_NO_P Parameter: Tissue Value: Aerial
  misc_feature: MA Experiment 108527 PARAMETER Experiment Name: Zm_5mM_NO_P Parameter: Treatment Value: 5mM NO vs. No Treatment
  misc_feature: MA Experiment ID: 108529 Result: Up-regulated in Transcription
  misc_feature: MA Experiment 108529 PARAMETER Experiment Name: Zm_Imbibed_Seeds_P Parameter: Age (day) Value: 5 vs. 2
  misc_feature: MA Experiment 108529 PARAMETER Experiment Name: Zm_Imbibed_Seeds_P Parameter: Organism Value: Zea mays
  misc_feature: MA Experiment 108529 PARAMETER Experiment Name: Zm_Imbibed_Seeds_P Parameter: Plant Line Value: 35A19
  misc_feature: MA Experiment 108529 PARAMETER Experiment Name: Zm_Imbibed_Seeds_P Parameter: Tissue Value: Roots vs. Embryo
  misc_feature: MA Experiment ID: 108535 Result: Down-regulated in Transcription
  misc_feature: MA Experiment 108535 PARAMETER Experiment Name: Zm_Meristem_P Parameter: Age (day) Value: 8
  misc_feature: MA Experiment 108535 PARAMETER Experiment Name: Zm_Meristem_P Parameter: Organism Value: Zea mays
  misc_feature: MA Experiment 108535 PARAMETER Experiment Name: Zm_Meristem_P Parameter: Plant Line Value: 35A19
  misc_feature: MA Experiment 108535 PARAMETER Experiment Name: Zm_Meristem_P Parameter: Tissue Value: Root Meristem vs. Above Root Meristem
  misc_feature: MA Experiment ID: 108543 Result: Down-regulated in Transcription
  misc_feature: MA Experiment ID: 108559 Result: Up-regulated in Transcription
  misc_feature: MA Experiment 108559 PARAMETER Experiment Name: Zm_5mM_NO_P Parameter: Age (day) Value: 8
  misc_feature: MA Experiment 108559 PARAMETER Experiment Name: Zm_5mM_NO_P Parameter: Organism Value: Zea mays
  misc_feature: MA Experiment 108559 PARAMETER Experiment Name: Zm_5mM_NO_P Parameter: Plant Line Value: 35A19
  misc_feature: MA Experiment 108559 PARAMETER Experiment Name: Zm_5mM_NO_P Parameter: Timepoint (hr) Value: 12
  misc_feature: MA Experiment 108559 PARAMETER Experiment Name: Zm_5mM_NO_P Parameter: Tissue Value: Aerial
  misc_feature: MA Experiment 108559 PARAMETER Experiment Name: Zm_5mM_NO_P Parameter: Treatment Value: 5mM NO vs. No Treatment
  misc_feature: MA Experiment ID: 20000478 Result: Up-regulated in Transcription
  misc_feature: MA Experiment 20000478 PARAMETER Experiment Name: Zm_5mM_SA_P Parameter: Age (day) Value: 11
  misc_feature: MA Experiment 20000478 PARAMETER Experiment Name: Zm_5mM_SA_P Parameter: Organism Value: Zea mays
  misc_feature: MA Experiment 20000478 PARAMETER Experiment Name: Zm_5mM_SA_P Parameter: Plant Line Value: 35A19
  misc_feature: MA Experiment 20000478 PARAMETER Experiment Name: Zm_5mM_SA_P Parameter: Timepoint (hr) Value: 72
  misc_feature: MA Experiment 20000478 PARAMETER Experiment Name: Zm_5mM_SA_P Parameter: Tissue Value: Aerial
  misc_feature: MA Experiment 20000478 PARAMETER Experiment Name: Zm_5mM_SA_P Parameter: Treatment Value: 5mM SA vs. No Treatment
  misc_feature: MA Experiment ID: 20000488 Result: Down-regulated in Transcription
  misc_feature: MA Experiment 20000488 PARAMETER Experiment Name: Zm_50mM_NH4NO3_L_to_H_P Parameter: Organism Value: Zea mays
  misc_feature: MA Experiment 20000488 PARAMETER Experiment Name: Zm_50mM_NH4NO3_L_to_H_P Parameter: Timepoint (hr) Value: 8
  misc_feature: MA Experiment 20000488 PARAMETER Experiment Name: Zm_50mM_NH4NO3_L_to_H_P Parameter: Tissue Value: Leaves
  misc_feature: MA Experiment 20000488 PARAMETER Experiment Name: Zm_50mM_NH4NO3_L_to_H_P Parameter: Treatment Value: 50mM NH4NO3 vs. 100mM Mannitol
  misc_feature: MA Experiment ID: 20000492 Result: Down-regulated in Transcription
  misc_feature: MA Experiment 20000492 PARAMETER Experiment Name: Zm_Hybrid_Seed_Dev_P Parameter: DAP Value: 12
  misc_feature: MA Experiment 20000492 PARAMETER Experiment Name: Zm_Hybrid_Seed_Dev_P Parameter: Organism Value: Zea mays
  misc_feature: MA Experiment 20000492 PARAMETER Experiment Name: Zm_Hybrid_Seed_Dev_P Parameter: Plant Line Value: 35A19
  misc_feature: MA Experiment 20000492 PARAMETER Experiment Name: Zm_Hybrid_Seed_Dev_P Parameter: Tissue Value: Fert Kernel vs. Unfert Floret
  misc_feature: MA Experiment ID: 20001608 Result: Down-regulated in Transcription
  misc_feature: MA Experiment 20001608 PARAMETER Experiment Name: Zm_50ppm_KNO3_L-to-H_P Parameter: Age (day) Value: 21
  misc_feature: MA Experiment 20001608 PARAMETER Experiment Name: Zm_50ppm_KNO3_L-to-H_P Parameter: Organism Value: Zea mays
  misc_feature: MA Experiment 20001608 PARAMETER Experiment Name: Zm_50ppm_KNO3_L-to-H_P Parameter: Plant Line Value: 35A19
  misc_feature: MA Experiment 20001608 PARAMETER Experiment Name: Zm_50ppm_KNO3_L-to-H_P Parameter: Timepoint (hr) Value: 48
  misc_feature: MA Experiment 20001608 PARAMETER Experiment Name: Zm_50ppm_KNO3_L-to-H_P Parameter: Tissue Value: Shoots
  misc_feature: MA Experiment 20001608 PARAMETER Experiment Name: Zm_50ppm_KNO3_L-to-H_P Parameter: Treatment Value: 50ppm KNO3 vs. 50ppm KCl
gcacgagaccattacctagaacatcctaatcgaaaaaggccatcaagacgtagcagctccccttgcgtctgcgcacgccaccgaaggatcctcgccgcgcgtgcagtgcgatccgaggggaggggtccaaggccatgatgaagagcgtcagcggcaccggctcggccgggagccgtagcgatccgggcggcagcggcgagctgtcccgcttctccgtcgccaccacggcgtcgtccgcctcgcagccttccgcgaacggtggcgcgcgcgggatctccttcctcgacgccttccggtcctgcttcgttcccccggaggcgcgctcgccggagaactccatgtccgacgaatcccacccctcccaccaactctcgcagtctttgagctcacaaggttctaacagtgggagcgtgtttgggagcaagcgatcgattaaaggaatgtatagtcccatgcacaggagttctttagatagggagatccctggcagcacaaaattctccttgccacagatccagaaagcaacaaagaacttctcgccaaacttcaagattgggcagggtggttctgggactgtatacaagggtcagcttgctgatggtactcttgtcgctgtcaaacgtgccaagaagaatgtgtatgacaagtatatgggtcgtgagttctggaacgagattgagacattgcaacgcattgagcacctgaatttggttaggttccatgggtacctggagtttggtggcgagcagttgattattgtggagtatgttcccaatgggaatcttcgagagcacctcgactgtataaatggtaaaatattggaattctcactgagattggaaattgcaattgatgtggctcatgctattacatatcttcatacctattcagatcatccagtcatccacagagacatcaaatcctcaaacattcttctaatgaacaattgtcgagccaaggttgctgactttggattcgccaaattggctccaactgattctagtcatatatctactcaagtcaaaggaacagcaggctatctcgatccagaatatctcagaacataccagctcaatgagaagagtgatgtctactcctttggagtccttctggtggagttggttactgggaggcgccctatagagccaaaaaaggcaatcattgagcgtgttaccacaaaatgggcaatggaaaattttgtggagggcaatgctatccaaacactagatccgaatctggaagcgaccgatgcgatcaatctagcggtcgagaagctgtatgagctggctctgcaatgcttagccccaactaagaggaaccgaccgagcatgaagcggtgcgcagagattctgtggagcatccgtaaagattacagggagttggttgtacccacctctgcgatgaactgaagcaggtcgtctggagcagtcaagtgaacaaaaagatgtatcactccagtttgcctctcttgattcgcttcaaagattggtggttgaaatcatccgattgctgggattctttcagttaccgcaagtggtcgtgaacaggactgatggccttcctagatgctttgtttgtgctagaaaccagaaaagtcccttacaggtcttactatgctgtgtgaaagtgttgctgagtaaacatgtacgagtatatatcagatatctaatggtgtgtatatcttgtaggttctcttatacaggtaattgcatcacgcatgaagaaatctagttgtttccattgcatcttttttttttgtctatgatgaacaatattcagcgtatgattagcaagc

SEQ ID NO: 18464 - protein, 424 aa, Zea mays subsp. mays
  peptide (1)..(424): Ceres Seq. ID no. 12362951
  misc_feature (134)..(335): Pfam Name: Protein kinase domain Pfam Description: Protein kinase domain
  misc_feature (226)..(417): Homolog of NCBI NO: 7434312 NR Description: receptor-like protein kinase 5 homolog
  misc_feature (96)..(422): Homolog of NCBI NO: 34897358 NR Description: putative receptor kinase [Oryza sativa]
  misc_feature (118)..(413): Homolog of NCBI NO: 25287604 NR Description: probable protein kinase [imported] - Arabidopsis
  misc_feature (56)..(413): Homolog of NCBI NO: 18397027 NR Description: putative protein kinase
  misc_feature (110)..(413): Homolog of NCBI NO: 38345153 NR Description: OSJNBa0014K14.7 [Oryza sativa (japonica
  misc_feature (59)..(424): Homolog of NCBI NO: 15237782 NR Description: receptor-like protein kinase precursor - like
  misc_feature (126)..(414): Homolog of NCBI NO: 34908354 NR Description: P0529H11.30 [Oryza sativa (japonica
  misc_feature (31)..(424): Homolog of NCBI NO: 9759225 NR Description: contains similarity to protein
  misc_feature (9)..(417): Homolog of NCBI NO: 22328175 NR Description: coded for by A. thaliana cDNA R30513
  misc_feature (1)..(424): Homolog of NCBI NO: 27261468 NR Description: Hypothetical protein [Oryza sativa (japonica
MMKSVSGTGSAGSRSDPGGSGELSRFSVATTASSASQPSANGGARGISFLDAFRSCFVPPEARSPENSMSDESHPSHQLSQSLSSQGSNSGSVFGSKRSIKGMYSPMHRSSLDREIPGSTKFSLPQIQKATKNFSPNFKIGQGGSGTVYKGQLADGTLVAVKRAKKNVYDKYMGREFWNEIETLQRIEHLNLVRFHGYLEFGGEQLIIVEYVPNGNLREHLDCINGKILEFSLRLEIAIDVAHAITYLHTYSDHPVIHRDIKSSNILLMNNCRAKVADFGFAKLAPTDSSHISTQVKGTAGYLDPEYLRTYQLNEKSDVYSFGVLLVELVTGRRPIEPKKAIIERVTTKWAMENFVEGNAIQTLDPNLEATDAINLAVEKLYELALQCLAPTKRNRPSMKRCAEILWSIRKDYRELVVPTSAMN

SEQ ID NO: 18465 - protein, 423 aa, Zea mays subsp. mays
  peptide (1)..(423): Ceres Seq. ID no. 12362952
  misc_feature (133)..(334): Pfam Name: Protein kinase domain Pfam Description: Protein kinase domain
  misc_feature (8)..(416): Homolog of NCBI NO: 22328175 NR Description: coded for by A. thaliana cDNA R30513
  misc_feature (1)..(423): Homolog of NCBI NO: 27261468 NR Description: Hypothetical protein [Oryza sativa (japonica
  misc_feature (225)..(416): Homolog of NCBI NO: 7434312 NR Description: receptor-like protein kinase 5 homolog
  misc_feature (95)..(421): Homolog of NCBI NO: 34897358 NR Description: putative receptor kinase [Oryza sativa]
  misc_feature (117)..(412): Homolog of NCBI NO: 25287604 NR Description: probable protein kinase [imported] - Arabidopsis
  misc_feature (55)..(412): Homolog of NCBI NO: 18397027 NR Description: putative protein kinase
  misc_feature (109)..(412): Homolog of NCBI NO: 38345153 NR Description: OSJNBa0014K14.7 [Oryza sativa (japonica
  misc_feature (58)..(423): Homolog of NCBI NO: 15237782 NR Description: receptor-like protein kinase precursor - like
  misc_feature (125)..(413): Homolog of NCBI NO: 34908354 NR Description: P0529H11.30 [Oryza sativa (japonica
  misc_feature (30)..(423): Homolog of NCBI NO: 9759225 NR Description: contains similarity to protein
MKSVSGTGSAGSRSDPGGSGELSRFSVATTASSASQPSANGGARGISFLDAFRSCFVPPEARSPENSMSDESHPSHQLSQSLSSQGSNSGSVFGSKRSIKGMYSPMHRSSLDREIPGSTKFSLPQIQKATKNFSPNFKIGQGGSGTVYKGQLADGTLVAVKRAKKNVYDKYMGREFWNEIETLQRIEHLNLVRFHGYLEFGGEQLIIVEYVPNGNLREHLDCINGKILEFSLRLEIAIDVAHAITYLHTYSDHPVIHRDIKSSNILLMNNCRAKVADFGFAKLAPTDSSHISTQVKGTAGYLDPEYLRTYQLNEKSDVYSFGVLLVELVTGRRPIEPKKAIIERVTTKWAMENFVEGNAIQTLDPNLEATDAINLAVEKLYELALQCLAPTKRNRPSMKRCAEILWSIRKDYRELVVPTSAMN

SEQ ID NO: 18466 - protein, 356 aa, Zea mays subsp. mays
  peptide (1)..(356): Ceres Seq. ID no. 12362953
  misc_feature (66)..(267): Pfam Name: Protein kinase domain Pfam Description: Protein kinase domain
  misc_feature (158)..(349): Homolog of NCBI NO: 7434312 NR Description: receptor-like protein kinase 5 homolog
  misc_feature (28)..(354): Homolog of NCBI NO: 34897358 NR Description: putative receptor kinase [Oryza sativa]
  misc_feature (50)..(345): Homolog of NCBI NO: 25287604 NR Description: probable protein kinase [imported] - Arabidopsis
  misc_feature (1)..(345): Homolog of NCBI NO: 18397027 NR Description: putative protein kinase
  misc_feature (42)..(345): Homolog of NCBI NO: 38345153 NR Description: OSJNBa0014K14.7 [Oryza sativa (japonica
  misc_feature (1)..(356): Homolog of NCBI NO: 15237782 NR Description: receptor-like protein kinase precursor - like
  misc_feature (58)..(346): Homolog of NCBI NO: 34908354 NR Description: P0529H11.30 [Oryza sativa (japonica
  misc_feature (1)..(356): Homolog of NCBI NO: 9759225 NR Description: contains similarity to protein
  misc_feature (1)..(349): Homolog of NCBI NO: 22328175 NR Description: coded for by A. thaliana cDNA R30513
  misc_feature (1)..(356): Homolog of NCBI NO: 27261468 NR Description: Hypothetical protein [Oryza sativa (japonica
MSDESHPSHQLSQSLSSQGSNSGSVFGSKRSIKGMYSPMHRSSLDREIPGSTKFSLPQIQKATKNFSPNFKIGQGGSGTVYKGQLADGTLVAVKRAKKNVYDKYMGREFWNEIETLQRIEHLNLVRFHGYLEFGGEQLIIVEYVPNGNLREHLDCINGKILEFSLRLEIAIDVAHAITYLHTYSDHPVIHRDIKSSNILLMNNCRAKVADFGFAKLAPTDSSHISTQVKGTAGYLDPEYLRTYQLNEKSDVYSFGVLLVELVTGRRPIEPKKAIIERVTTKWAMENFVEGNAIQTLDPNLEATDAINLAVEKLYELALQCLAPTKRNRPSMKRCAEILWSIRKDYRELVVPTSAMN

SEQ ID NO: 18467 - DNA, 894 bp, Zea mays subsp. mays
  misc_feature (1)..(894): Ceres Seq. ID no. 12359615
  misc_feature: MA Experiment ID: 20000478 Result: Up-regulated in Transcription
  misc_feature: MA Experiment 20000478 PARAMETER Experiment Name: Zm_5mM_SA_P Parameter: Age (day) Value: 11
  misc_feature: MA Experiment 20000478 PARAMETER Experiment Name: Zm_5mM_SA_P Parameter: Organism Value: Zea mays
  misc_feature: MA Experiment 20000478 PARAMETER Experiment Name: Zm_5mM_SA_P Parameter: Plant Line Value: 35A19
  misc_feature: MA Experiment 20000478 PARAMETER Experiment Name: Zm_5mM_SA_P Parameter: Timepoint (hr) Value: 72
  misc_feature: MA Experiment 20000478 PARAMETER Experiment Name: Zm_5mM_SA_P Parameter: Tissue Value: Aerial
  misc_feature: MA Experiment 20000478 PARAMETER Experiment Name: Zm_5mM_SA_P Parameter: Treatment Value: 5mM SA vs. No Treatment
acgaagcggatgacggcaggcgcgccccgtctcctcctcgtgacgtctttgaccatgacaagtgcgggtacctcggctggctggacaccaagccggccaattcggtggtgtacatctccttcggcagctcgtcggttatgtgcaaggaccaggtcgcggagatcaccgacgccatggcgcaggtgaagaggccgttcctcttggtcctgaggaaggacaaccgcaagggccacgacgacgacgcggcggcggcggccgatgcggacagcgccggcgggatggtgctggagtggtgcgaccaggcgcgcgtgctgtcgcacccggcggtcgcatgcttcgtgacgcattgcgggtggaactcgaccctggagagcgcggcgtgcggcgtgccgaccgtcgcggttccgcggtactcggaccagggcacggccgcgtggctcgtggcggagcggatgggcaccggcgtccgcgcggcggcgcgcgcggacggcgtcgtggaggcccaggagntgaggcggtgngtggagnnccgcgnngnngggggcggtgncggcgcgcgccgcggcgtggaagcggaatgcgtgggntnccgtggccgacggcgggagctcgcaccagaacctgacggggttcctgaggcagatcgcccacggccgcggcgactaaaccggagacgacgtcgtattgtattgtatcacctcgttgtggtggcgttgcagccagctgccagcgtgcatttctagcgaaaccatggatacagttgattgcaatttgagcgaggacgcaatccatgtctggtttntgaagtctggcaacgtattcccttcggctcgacgtccatctgaatatctgatggttccaacttccaaaaccaaaagtgctcgcctgtgcctt

SEQ ID NO: 18468 - protein, 246 aa, Zea mays subsp. mays
  peptide (1)..(246): Ceres Seq. ID no. 12359616
  misc_feature (14)..(175): Pfam Name: UDP-glucoronosyl and UDP-glucosyl transferase Pfam Description: UDP-glucoronosyl and UDP-glucosyl transferase
  misc_feature (23)..(175): Homolog of NCBI NO: 7433892 NR Description: hypothetical protein - Arabidopsis thaliana
  misc_feature (10)..(175): Homolog of NCBI NO: 18390540 NR Description: UDP-glucose transferase(UGT1)
  misc_feature (23)..(175): Homolog of NCBI NO: 2149127 NR Description: UDP-glucose:indole-3-acetate
  misc_feature (24)..(175): Homolog of NCBI NO: 13236653 NR Description: putative glucosyltransferase [Oryza sativa]
  misc_feature (17)..(198): Homolog of NCBI NO: 34911270 NR Description: limonoid UDP-glucosyltransferase-like protein
  misc_feature (14)..(181): Homolog of NCBI NO: 4115559 NR Description: UDP-glucose:anthocysnin 5-O-glucosyltransferase
  misc_feature (14)..(184): Homolog of NCBI NO: 20146093 NR Description: glucosyltransferase NTGT2 [Nicotiana tabacum]
  misc_feature (14)..(184): Homolog of NCBI NO: 14192682 NR Description: cold-induced glucosyl transferase [Solanum
  misc_feature (14)..(184): Homolog of NCBI NO: 6683052 NR Description: anthocyanin 5-O-glucosyltransferase [Petunia x
  misc_feature (14)..(175): Homolog of NCBI NO: 34906162 NR Description: putative anthocyanin 5-O-glucosyltransferase
  misc_feature (170)..(170): Xaa is any aa, unknown or other
  misc_feature (173)..(173): Xaa is any aa, unknown or other
  misc_feature (176)..(176): Xaa is any aa, unknown or other
  misc_feature (178)..(178): Xaa is any aa, unknown or other
  misc_feature (179)..(179): Xaa is any aa, unknown or other
  misc_feature (183)..(183): Xaa is any aa, unknown or other
  misc_feature (195)..(195): Xaa is any aa, unknown or other
  misc_feature (196)..(196): Xaa is any aa, unknown or other
EADDGRRAPSPPRDVFDHDKCGYLGWLDTKPANSVVYISFGSSSVMCKDQVAEITDAMAQVKRPFLLVLRKDNRKGHDDDAAAAADADSAGGMVLEWCDQARVLSHPAVACFVTHCGWNSTLESAACGVPTVAVPRYSDQGTAAWLVAERMGTGVRAAARADGVVEAQEXRRXVEXRXXGGGXGARRGVEAECVXXRGRRRELAPEPDGVPEADRPRPRRLNRRRRRIVLYHLVVVALQPAASVHF

SEQ ID NO: 18469 - protein, 201 aa, Zea mays subsp. mays
  peptide (1)..(201): Ceres Seq. ID no. 12359617
  misc_feature (1)..(130): Pfam Name: UDP-glucoronosyl and UDP-glucosyl transferase Pfam Description: UDP-glucoronosyl and UDP-glucosyl transferase
  misc_feature (1)..(130): Homolog of NCBI NO: 7433892 NR Description: hypothetical protein - Arabidopsis thaliana
  misc_feature (1)..(130): Homolog of NCBI NO: 18390540 NR Description: UDP-glucose transferase(UGT1)
  misc_feature (1)..(130): Homolog of NCBI NO: 2149127 NR Description: UDP-glucose:indole-3-acetate
  misc_feature (1)..(130): Homolog of NCBI NO: 13236653 NR Description: putative glucosyltransferase [Oryza sativa]
  misc_feature (1)..(153): Homolog of NCBI NO: 34911270 NR Description: limonoid UDP-glucosyltransferase-like protein
  misc_feature (1)..(136): Homolog of NCBI NO: 4115559 NR Description: UDP-glucose:anthocysnin 5-O-glucosyltransferase
  misc_feature (1)..(139): Homolog of NCBI NO: 20146093 NR Description: glucosyltransferase NTGT2 [Nicotiana tabacum]
  misc_feature (1)..(139): Homolog of NCBI NO: 14192682 NR Description: cold-induced glucosyl transferase [Solanum
  misc_feature (1)..(139): Homolog of NCBI NO: 6683052 NR Description: anthocyanin 5-O-glucosyltransferase [Petunia x
  misc_feature (1)..(130): Homolog of NCBI NO: 34906162 NR Description: putative anthocyanin 5-O-glucosyltransferase
  misc_feature (125)..(125): Xaa is any aa, unknown or other
  misc_feature (128)..(128): Xaa is any aa, unknown or other
  misc_feature (131)..(131): Xaa is any aa, unknown or other
  misc_feature (133)..(133): Xaa is any aa, unknown or other
  misc_feature (134)..(134): Xaa is any aa, unknown or other
  misc_feature (138)..(138): Xaa is any aa, unknown or other
  misc_feature (150)..(150): Xaa is any aa, unknown or other
  misc_feature (151)..(151): Xaa is any aa, unknown or other
MCKDQVAEITDAMAQVKRPFLLVLRKDNRKGHDDDAAAAADADSAGGMVLEWCDQARVLSHPAVACFVTHCGWNSTLESAACGVPTVAVPRYSDQGTAAWLVAERMGTGVRAAARADGVVEAQEXRRXVEXRXXGGGXGARRGVEAECVXXRGRRRELAPEPDGVPEADRPRPRRLNRRRRRIVLYHLVVVALQPAASVHF

SEQ ID NO: 18470 - protein, 189 aa, Zea mays subsp. mays
  peptide (1)..(189): Ceres Seq. ID no. 12359618
  misc_feature (1)..(118): Pfam Name: UDP-glucoronosyl and UDP-glucosyl transferase Pfam Description: UDP-glucoronosyl and UDP-glucosyl transferase
  misc_feature (1)..(118): Homolog of NCBI NO: 7433892 NR Description: hypothetical protein - Arabidopsis thaliana
  misc_feature (1)..(118): Homolog of NCBI NO: 18390540 NR Description: UDP-glucose transferase(UGT1)
  misc_feature (1)..(118): Homolog of NCBI NO: 2149127 NR Description: UDP-glucose:indole-3-acetate
  misc_feature (1)..(118): Homolog of NCBI NO: 13236653 NR Description: putative glucosyltransferase [Oryza sativa]
  misc_feature (1)..(141): Homolog of NCBI NO: 34911270 NR Description: limonoid UDP-glucosyltransferase-like protein
  misc_feature (1)..(124): Homolog of NCBI NO: 4115559 NR Description: UDP-glucose:anthocysnin 5-O-glucosyltransferase
  misc_feature (1)..(127): Homolog of NCBI NO: 20146093 NR Description: glucosyltransferase NTGT2 [Nicotiana tabacum]
  misc_feature (1)..(127): Homolog of NCBI NO: 14192682 NR Description: cold-induced glucosyl transferase [Solanum
  misc_feature (1)..(127): Homolog of NCBI NO: 6683052 NR Description: anthocyanin 5-O-glucosyltransferase [Petunia x
  misc_feature (1)..(118): Homolog of NCBI NO: 34906162 NR Description: putative anthocyanin 5-O-glucosyltransferase
  misc_feature (113)..(113): Xaa is any aa, unknown or other
  misc_feature (116)..(116): Xaa is any aa, unknown or other
  misc_feature (119)..(119): Xaa is any aa, unknown or other
  misc_feature (121)..(121): Xaa is any aa, unknown or other
  misc_feature (122)..(122): Xaa is any aa, unknown or other
  misc_feature (126)..(126): Xaa is any aa, unknown or other
  misc_feature (138)..(138): Xaa is any aa, unknown or other
  misc_feature (139)..(139): Xaa is any aa, unknown or other
MAQVKRPFLLVLRKDNRKGHDDDAAAAADADSAGGMVLEWCDQARVLSHPAVACFVTHCGWNSTLESAACGVPTVAVPRYSDQGTAAWLVAERMGTGVRAAARADGVVEAQEXRRXVEXRXXGGGXGARRGVEAECVXXRGRRRELAPEPDGVPEADRPRPRRLNRRRRRIVLYHLVVVALQPAASVHF

SEQ ID NO: 18471 - DNA, 497 bp, Zea mays subsp. mays
  misc_feature (1)..(497): Ceres Seq. ID no. 3315326
  misc_feature: MA Experiment ID: 20000534 Result: Up-regulated in Transcription
  misc_feature: MA Experiment 20000534 PARAMETER Experiment Name: Zm_Hybrid_Pollen_P Parameter: Age (day) Value: 8
  misc_feature: MA Experiment 20000534 PARAMETER Experiment Name: Zm_Hybrid_Pollen_P Parameter: Organism Value: Zea mays
  misc_feature: MA Experiment 20000534 PARAMETER Experiment Name: Zm_Hybrid_Pollen_P Parameter: Plant Line Value: 35A19
  misc_feature: MA Experiment 20000534 PARAMETER Experiment Name: Zm_Hybrid_Pollen_P Parameter: Tissue Value: Pollen vs. Aerial
acggaggtgaggatacacgggtgcggaacgagagctaggcgaacctgtctggtacctcgcggcggagatggacgagaaggcgacgatggagagcaagctgtcctcggcggcggccttcgtggaggggggcgtgcaggacgcctgckacgacgcctgcagcatctgcctcgacgccttctgcgacassaacccctccacgatgaccaagtgcaagcatgactaccatcttcagtgcattcttgaatggtgccagagaagctcccagtgccccatgtgttggcagcatatcagcatgaaagatcctatgagccaagagctactagaggctgttgaacaagagaggaacatccgagctaatccttcacgtaatactgctgttttccaccatcaaatgctgggtgattttgagatccctgtaggtgcagatgatgcagaacttgaagaacgcattattcagcacttggctgccgcagctgcagtgcgtaggtcacaccgtc

SEQ ID NO: 18472 - protein, 143 aa, Zea mays subsp. mays
  peptide (1)..(143): Ceres Seq. ID no. 3315327
  misc_feature (30)..(70): Pfam Name: Zinc finger, C3HC4 type (RING finger) Pfam Description: Zinc finger, C3HC4 type (RING finger)
  misc_feature (28)..(136): Homolog of NCBI NO: 11358783 NR Description: RING-H2 finger protein RHF1a
  misc_feature (9)..(136): Homolog of NCBI NO: 26450997 NR Description: putative RING-H2 finger protein RHF1a
  misc_feature (9)..(136): Homolog of NCBI NO: 30682750 NR Description: zinc finger (C3HC4-type RING finger) protein
  misc_feature (9)..(136): Homolog of NCBI NO: 25360953 NR Description: RING-H2 finger protein RHF1a [imported] -
  misc_feature (1)..(111): Homolog of NCBI NO: 32400766 NR Description: RING-H2 finger protein [Triticum aestivum]
  misc_feature (6)..(141): Homolog of NCBI NO: 30688252 NR Description: zinc finger (C3HC4-type RING finger) protein
  misc_feature (3)..(141): Homolog of NCBI NO: 26451710 NR Description: putative RING-H2 finger protein RHF2a
  misc_feature (3)..(141): Homolog of NCBI NO: 18420424 NR Description: Expressed protein
  misc_feature (1)..(142): Homolog of NCBI NO: 32493110 NR Description: putative RING-H2 zinc finger protein
  misc_feature (1)..(142): Homolog of NCBI NO: 27819501 NR Description: putative zinc finger protein
  misc_feature (27)..(27): Xaa is any aa, unknown or other
  misc_feature (40)..(40): Xaa is any aa, unknown or other
MDEKATMESKLSSAAAFVEGGVQDACXDACSICLDAFCDXNPSTMTKCKHDYHLQCILEWCQRSSQCPMCWQHISMKDPMSQELLEAVEQERNIRANPSRNTAVFHHQMLGDFEIPVGADDAELEERIIQHLAAAAAVRRSHR

SEQ ID NO: 18473 - protein, 137 aa, Zea mays subsp. mays
  peptide (1)..(137): Ceres Seq. ID no. 3315328
  misc_feature (24)..(64): Pfam Name: Zinc finger, C3HC4 type (RING finger) Pfam Description: Zinc finger, C3HC4 type (RING finger)
  misc_feature (22)..(130): Homolog of NCBI NO: 11358783 NR Description: RING-H2 finger protein RHF1a
  misc_feature (3)..(130): Homolog of NCBI NO: 26450997 NR Description: putative RING-H2 finger protein RHF1a
  misc_feature (3)..(130): Homolog of NCBI NO: 30682750 NR Description: zinc finger (C3HC4-type RING finger) protein
  misc_feature (3)..(130): Homolog of NCBI NO: 25360953 NR Description: RING-H2 finger protein RHF1a [imported] -
  misc_feature (1)..(105): Homolog of NCBI NO: 32400766 NR Description: RING-H2 finger protein [Triticum aestivum]
  misc_feature (1)..(135): Homolog of NCBI NO: 30688252 NR Description: zinc finger (C3HC4-type RING finger) protein
  misc_feature (1)..(135): Homolog of NCBI NO: 26451710 NR Description: putative RING-H2 finger protein RHF2a
  misc_feature (1)..(135): Homolog of NCBI NO: 18420424 NR Description: Expressed protein
  misc_feature (1)..(136): Homolog of NCBI NO: 32493110 NR Description: putative RING-H2 zinc finger protein
  misc_feature (1)..(136): Homolog of NCBI NO: 27819501 NR Description: putative zinc finger protein
  misc_feature (21)..(21): Xaa is any aa, unknown or other
  misc_feature (34)..(34): Xaa is any aa, unknown or other
MESKLSSAAAFVEGGVQDACXDACSICLDAFCDXNPSTMTKCKHDYHLQCILEWCQRSSQCPMCWQHISMKDPMSQELLEAVEQERNIRANPSRNTAVFHHQMLGDFEIPVGADDAELEERIIQHLAAAAAVRRSHR

SEQ ID NO: 18474 - protein, 99 aa, Zea mays subsp. mays
  peptide (1)..(99): Ceres Seq. ID no. 3315329
  misc_feature (1)..(92): Homolog of NCBI NO: 11358783 NR Description: RING-H2 finger protein RHF1a
  misc_feature (1)..(92): Homolog of NCBI NO: 26450997 NR Description: putative RING-H2 finger protein RHF1a
  misc_feature (1)..(92): Homolog of NCBI NO: 30682750 NR Description: zinc finger (C3HC4-type RING finger) protein
  misc_feature (1)..(92): Homolog of NCBI NO: 25360953 NR Description: RING-H2 finger protein RHF1a [imported] -
  misc_feature (1)..(67): Homolog of NCBI NO: 32400766 NR Description: RING-H2 finger protein [Triticum aestivum]
  misc_feature (1)..(97): Homolog of NCBI NO: 30688252 NR Description: zinc finger (C3HC4-type RING finger) protein
  misc_feature (1)..(97): Homolog of NCBI NO: 26451710 NR Description: putative RING-H2 finger protein RHF2a
  misc_feature (1)..(97): Homolog of NCBI NO: 18420424 NR Description: Expressed protein
  misc_feature (1)..(98): Homolog of NCBI NO: 32493110 NR Description: putative RING-H2 zinc finger protein
  misc_feature (1)..(98): Homolog of NCBI NO: 27819501 NR Description: putative zinc finger protein
MTKCKHDYHLQCILEWCQRSSQCPMCWQHISMKDPMSQELLEAVEQERNIRANPSRNTAVFHHQMLGDFEIPVGADDAELEERIIQHLAAAAAVRRSHR

SEQ ID NO: 18475 - DNA, 480 bp, Zea mays subsp. mays
  misc_feature (1)..(480): Ceres Seq. ID no. 4612851
  misc_feature: MA Experiment ID: 108504 Result: Up-regulated in Transcription
  misc_feature: MA Experiment 108504 PARAMETER Experiment Name: Zm_Drought_P Parameter: Age (day) Value: 8
  misc_feature: MA Experiment 108504 PARAMETER Experiment Name: Zm_Drought_P Parameter: Organism Value: Zea mays
  misc_feature: MA Experiment 108504 PARAMETER Experiment Name: Zm_Drought_P Parameter: Plant Line Value: 35A19
  misc_feature: MA Experiment 108504 PARAMETER Experiment Name: Zm_Drought_P Parameter: Timepoint (hr) Value: 12
  misc_feature: MA Experiment 108504 PARAMETER Experiment Name: Zm_Drought_P Parameter: Tissue Value: Aerial
  misc_feature: MA Experiment 108504 PARAMETER Experiment Name: Zm_Drought_P Parameter: Treatment Value: Drought vs. No Drought
  misc_feature: MA Experiment ID: 108513 Result: Up-regulated in Transcription
  misc_feature: MA Experiment 108513 PARAMETER Experiment Name: Zm_100uM_ABA_P Parameter: Age (day) Value: 8
  misc_feature: MA Experiment 108513 PARAMETER Experiment Name: Zm_100uM_ABA_P Parameter: Organism Value: Zea mays
  misc_feature: MA Experiment 108513 PARAMETER Experiment Name: Zm_100uM_ABA_P Parameter: Plant Line Value: 35A19
  misc_feature: MA Experiment 108513 PARAMETER Experiment Name: Zm_100uM_ABA_P Parameter: Timepoint (hr) Value: 6
  misc_feature: MA Experiment 108513 PARAMETER Experiment Name: Zm_100uM_ABA_P Parameter: Tissue Value: Aerial
  misc_feature: MA Experiment 108513 PARAMETER Experiment Name: Zm_100uM_ABA_P Parameter: Treatment Value: 100uM ABA vs. No Treatment
  misc_feature: MA Experiment ID: 108540 Result: Up-regulated in Transcription
  misc_feature: MA Experiment 108540 PARAMETER Experiment Name: Zm_20percent_PEG_P Parameter: Age (day) Value: 8
  misc_feature: MA Experiment 108540 PARAMETER Experiment Name: Zm_20percent_PEG_P Parameter: Organism Value: Zea mays
  misc_feature: MA Experiment 108540 PARAMETER Experiment Name: Zm_20percent_PEG_P Parameter: Plant Line Value: 35A19
  misc_feature: MA Experiment 108540 PARAMETER Experiment Name: Zm_20percent_PEG_P Parameter: Timepoint (hr) Value: 6
  misc_feature: MA Experiment 108540 PARAMETER Experiment Name: Zm_20percent_PEG_P Parameter: Tissue Value: Aerial
  misc_feature: MA Experiment 108540 PARAMETER Experiment Name: Zm_20percent_PEG_P Parameter: Treatment Value: 20percent PEG vs. No Treatment
  misc_feature: MA Experiment ID: 108542 Result: Up-regulated in Transcription
  misc_feature: MA Experiment 108542 PARAMETER Experiment Name: Zm_150mM_NaCl_P Parameter: Age (day) Value: 8
  misc_feature: MA Experiment 108542 PARAMETER Experiment Name: Zm_150mM_NaCl_P Parameter: Organism Value: Zea mays
  misc_feature: MA Experiment 108542 PARAMETER Experiment Name: Zm_150mM_NaCl_P Parameter: Plant Line Value: 35A19
  misc_feature: MA Experiment 108542 PARAMETER Experiment Name: Zm_150mM_NaCl_P Parameter: Timepoint (hr) Value: 6
  misc_feature: MA Experiment 108542 PARAMETER Experiment Name: Zm_150mM_NaCl_P Parameter: Tissue Value: Aerial
  misc_feature: MA Experiment 108542 PARAMETER Experiment Name: Zm_150mM_NaCl_P Parameter: Treatment Value: 150mM NaCl vs. No Treatment
  misc_feature: MA Experiment ID: 108543 Result: Up-regulated in Transcription
  misc_feature: MA Experiment ID: 108544 Result: Up-regulated in Transcription
  misc_feature: MA Experiment ID: 108556 Result: Up-regulated in Transcription
  misc_feature: MA Experiment 108556 PARAMETER Experiment Name: Zm_Drought_P Parameter: Age (day) Value: 9
  misc_feature: MA Experiment 108556 PARAMETER Experiment Name: Zm_Drought_P Parameter: Organism Value: Zea mays
  misc_feature: MA Experiment 108556 PARAMETER Experiment Name: Zm_Drought_P Parameter: Plant Line Value: 35A19
  misc_feature: MA Experiment 108556 PARAMETER Experiment Name: Zm_Drought_P Parameter: Timepoint (hr) Value: 24
  misc_feature: MA Experiment 108556 PARAMETER Experiment Name: Zm_Drought_P Parameter: Tissue Value: Aerial
  misc_feature: MA Experiment 108556 PARAMETER Experiment Name: Zm_Drought_P Parameter: Treatment Value: Drought vs. No Drought
  misc_feature: MA Experiment ID: 108597 Result: Up-regulated in Transcription
  misc_feature: MA Experiment 108597 PARAMETER Experiment Name: Zm_100uM_ABA_P Parameter: Age (day) Value: 9
  misc_feature: MA Experiment 108597 PARAMETER Experiment Name: Zm_100uM_ABA_P Parameter: Organism Value: Zea mays
  misc_feature: MA Experiment 108597 PARAMETER Experiment Name: Zm_100uM_ABA_P Parameter: Plant Line Value: 35A19
  misc_feature: MA Experiment 108597 PARAMETER Experiment Name: Zm_100uM_ABA_P Parameter: Timepoint (hr) Value: 24
  misc_feature: MA Experiment 108597 PARAMETER Experiment Name: Zm_100uM_ABA_P Parameter: Tissue Value: Aerial
  misc_feature: MA Experiment 108597 PARAMETER Experiment Name: Zm_100uM_ABA_P Parameter: Treatment Value: 100uM ABA vs. No Treatment
  misc_feature: Pfam Name: Ricin_B_lectin Pfam Description: Ricin-type beta-trefoil lectin domain
aactttgcttatgatgcagcactggatcaaggacatgaagtacagcaccagggtgaaggatgaggaaggctaccctgccatcgtcctcgtcaacaaagccactggagaggctctcaagcattcccttggccagtcacaccctgttcttctgacccgccataatccagactccctggacgagtctgtcctgtggacaagagcagggacgttggggatgggttccgctgcattaggatggtcaacaacatctacctgaactttgatgctttacatggagacaaggaccatggtggtgtgcgcgacgggacggcccttgtgctgtgggagtggtgcgagggagacaaccagcgctggaagattgttccctggtgaacaaggaaatgtgtgaccgagcccgcaccaaggaggagctcctgccgtaataagtgaagtgattggtactgaagtttctggaaataagaggctcttctgagatgcctg

SEQ ID NO: 18476 - protein, 84 aa, Zea mays subsp. mays
  peptide (1)..(84): Ceres Seq. ID no. 4612852
  misc_feature: Pfam Name: Ricin_B_lectin Pfam Description: Ricin-type beta-trefoil lectin domain
  misc_feature (6)..(73): Homolog of NCBI NO: 34394517 NR Description: r40g2 protein [Oryza sativa (japonica
  misc_feature (6)..(73): Homolog of NCBI NO: 34394518 NR Description: putative r40c2 protein [Oryza sativa (japonica
  misc_feature (6)..(73): Homolog of NCBI NO: 34394517 NR Description: r40g2 protein [Oryza sativa (japonica
  misc_feature (6)..(73): Homolog of NCBI NO: 34902150 NR Description: Putative r40c1 protein - rice
  misc_feature (6)..(73): Homolog of NCBI NO: 7489571 NR Description: r40c1 protein - rice
  misc_feature (6)..(71): Homolog of NCBI NO: 34902150 NR Description: Putative r40c1 protein - rice
  misc_feature (6)..(71): Homolog of NCBI NO: 7489571 NR Description: r40c1 protein - rice
  misc_feature (6)..(73): Homolog of NCBI NO: 7489573 NR Description: r40g3 protein - rice
  misc_feature (6)..(73): Homolog of NCBI NO: 34394516 NR Description: putative r40c1 protein [Oryza sativa (japonica
  misc_feature (6)..(73): Homolog of NCBI NO: 34894060 NR Description: putative r40c1 protein [Oryza sativa (japonica
TLLMMQHWIKDMKYSTRVKDEEGYPAIVLVNKATGEALKHSLGQSHPVLLTRHNPDSLDESVLWTRAGTLGMGSAALGWSTTST

SEQ ID NO: 18477 - protein, 81 aa, Zea mays subsp. mays
  peptide (1)..(81): Ceres Seq. ID no. 4612853
  misc_feature: Pfam Name: Ricin_B_lectin Pfam Description: Ricin-type beta-trefoil lectin domain
  misc_feature (3)..(70): Homolog of NCBI NO: 34394517 NR Description: r40g2 protein [Oryza sativa (japonica
  misc_feature (3)..(70): Homolog of NCBI NO: 34394518 NR Description: putative r40c2 protein [Oryza sativa (japonica
  misc_feature (3)..(70): Homolog of NCBI NO: 34394517 NR Description: r40g2 protein [Oryza sativa (japonica
  misc_feature (3)..(70): Homolog of NCBI NO: 34902150 NR Description: Putative r40c1 protein - rice
  misc_feature (3)..(70): Homolog of NCBI NO: 7489571 NR Description: r40c1 protein - rice
  misc_feature (3)..(68): Homolog of NCBI NO: 34902150 NR Description: Putative r40c1 protein - rice
  misc_feature (3)..(68): Homolog of NCBI NO: 7489571 NR Description: r40c1 protein - rice
  misc_feature (3)..(70): Homolog of NCBI NO: 7489573 NR Description: r40g3 protein - rice
  misc_feature (3)..(70): Homolog of NCBI NO: 34394516 NR Description: putative r40c1 protein [Oryza sativa (japonica
  misc_feature (3)..(70): Homolog of NCBI NO: 34894060 NR Description: putative r40c1 protein [Oryza sativa (japonica
MMQHWIKDMKYSTRVKDEEGYPAIVLVNKATGEALKHSLGQSHPVLLTRHNPDSLDESVLWTRAGTLGMGSAALGWSTTST

SEQ ID NO: 18478 - protein, 80 aa, Zea mays subsp. mays
  peptide (1)..(80): Ceres Seq. ID no. 4612854
  misc_feature: Pfam Name: Ricin_B_lectin Pfam Description: Ricin-type beta-trefoil lectin domain
  misc_feature (2)..(69): Homolog of NCBI NO: 34394517 NR Description: r40g2 protein [Oryza sativa (japonica
  misc_feature (2)..(69): Homolog of NCBI NO: 34394518 NR Description: putative r40c2 protein [Oryza sativa (japonica
  misc_feature (2)..(69): Homolog of NCBI NO: 34394517 NR Description: r40g2 protein [Oryza sativa (japonica
  misc_feature (2)..(69): Homolog of NCBI NO: 34902150 NR Description: Putative r40c1 protein - rice
  misc_feature (2)..(69): Homolog of NCBI NO: 7489571 NR Description: r40c1 protein - rice
  misc_feature (2)..(67): Homolog of NCBI NO: 34902150 NR Description: Putative r40c1 protein - rice
  misc_feature (2)..(67): Homolog of NCBI NO: 7489571 NR Description: r40c1 protein - rice
  misc_feature (2)..(69): Homolog of NCBI NO: 7489573 NR Description: r40g3 protein - rice
  misc_feature (2)..(69): Homolog of NCBI NO: 34394516 NR Description: putative r40c1 protein [Oryza sativa (japonica
  misc_feature (2)..(69): Homolog of NCBI NO: 34894060 NR Description: putative r40c1 protein [Oryza sativa (japonica
MQHWIKDMKYSTRVKDEEGYPAIVLVNKATGEALKHSLGQSHPVLLTRHNPDSLDESVLWTRAGTLGMGSAALGWSTTST

SEQ ID NO: 18479 - DNA, 989 bp, Zea mays subsp. mays
  misc_feature (1)..(989): Ceres Seq. ID no. 12378246
  misc_feature: MA Experiment ID: 108528 Result: Up-regulated in Transcription
  misc_feature: MA Experiment 108528 PARAMETER Experiment Name: Zm_Imbibed_Seeds_P Parameter: Age (day) Value: 5 vs. 2
  misc_feature: MA Experiment 108528 PARAMETER Experiment Name: Zm_Imbibed_Seeds_P Parameter: Organism Value: Zea mays
  misc_feature: MA Experiment 108528 PARAMETER Experiment Name: Zm_Imbibed_Seeds_P Parameter: Plant Line Value: 35A19
  misc_feature: MA Experiment 108528 PARAMETER Experiment Name: Zm_Imbibed_Seeds_P Parameter: Tissue Value: Aerial vs. Embryo
  misc_feature: MA Experiment ID: 108530 Result: Up-regulated in Transcription
  misc_feature: MA Experiment 108530 PARAMETER Experiment Name: Zm_Imbibed_Seeds_P Parameter: Age (day) Value: 6 vs. 2
  misc_feature: MA Experiment 108530 PARAMETER Experiment Name: Zm_Imbibed_Seeds_P Parameter: Organism Value: Zea mays
  misc_feature: MA Experiment 108530 PARAMETER Experiment Name: Zm_Imbibed_Seeds_P Parameter: Plant Line Value: 35A19
  misc_feature: MA Experiment 108530 PARAMETER Experiment Name: Zm_Imbibed_Seeds_P Parameter: Tissue Value: Aerial vs. Embryo
  misc_feature: MA Experiment ID: 108534 Result: Up-regulated in Transcription
  misc_feature: MA Experiment 108534 PARAMETER Experiment Name: Zm_4deg_Cold_P Parameter: Age (hr) Value: 8
  misc_feature: MA Experiment 108534 PARAMETER Experiment Name: Zm_4deg_Cold_P Parameter: Organism Value: Zea mays
  misc_feature: MA Experiment 108534 PARAMETER Experiment Name: Zm_4deg_Cold_P Parameter: Plant Line Value: 35A19
  misc_feature: MA Experiment 108534 PARAMETER Experiment Name: Zm_4deg_Cold_P Parameter: Temperature (deg C) Value: 4 vs. 22
  misc_feature: MA Experiment 108534 PARAMETER Experiment Name: Zm_4deg_Cold_P Parameter: Timepoint (hr) Value: 6
  misc_feature: MA Experiment 108534 PARAMETER Experiment Name: Zm_4deg_Cold_P Parameter: Tissue Value: Aerial
  misc_feature: MA Experiment ID: 108536 Result: Down-regulated in Transcription
  misc_feature: MA Experiment 108536 PARAMETER Experiment Name: Zm_Meristem_P Parameter: Age (day) Value: 8
  misc_feature: MA Experiment 108536 PARAMETER Experiment Name: Zm_Meristem_P Parameter: Organism Value: Zea mays
  misc_feature: MA Experiment 108536 PARAMETER Experiment Name: Zm_Meristem_P Parameter: Plant Line Value: 35A19
  misc_feature: MA Experiment 108536 PARAMETER Experiment Name: Zm_Meristem_P Parameter: Tissue Value: Shoot Meristem vs. Above Shoot Meristem
  misc_feature: MA Experiment ID: 108545 Result: Up-regulated in Transcription
  misc_feature: MA Experiment 108545 PARAMETER Experiment Name: Zm_Imbibed_Seeds_P Parameter: Age (day) Value: 3 vs. 2
  misc_feature: MA Experiment 108545 PARAMETER Experiment Name: Zm_Imbibed_Seeds_P Parameter: Organism Value: Zea mays
  misc_feature: MA Experiment 108545 PARAMETER Experiment Name: Zm_Imbibed_Seeds_P Parameter: Plant Line Value: 35A19
  misc_feature: MA Experiment 108545 PARAMETER Experiment Name: Zm_Imbibed_Seeds_P Parameter: Tissue Value: Aerial vs. Embryo
  misc_feature: MA Experiment ID: 108547 Result: Up-regulated in Transcription
  misc_feature: MA Experiment 108547 PARAMETER Experiment Name: Zm_Imbibed_Seeds_P Parameter: Age (day) Value: 4 vs. 2
  misc_feature: MA Experiment 108547 PARAMETER Experiment Name: Zm_Imbibed_Seeds_P Parameter: Organism Value: Zea mays
  misc_feature: MA Experiment 108547 PARAMETER Experiment Name: Zm_Imbibed_Seeds_P Parameter: Plant Line Value: 35A19
  misc_feature: MA Experiment 108547 PARAMETER Experiment Name: Zm_Imbibed_Seeds_P Parameter: Tissue Value: Aerial vs. Embryo
  misc_feature: MA Experiment ID: 108556 Result: Down-regulated in Transcription
  misc_feature: MA Experiment 108556 PARAMETER Experiment Name: Zm_Drought_P Parameter: Age (day) Value: 9
  misc_feature: MA Experiment 108556 PARAMETER Experiment Name: Zm_Drought_P Parameter: Organism Value: Zea mays
  misc_feature: MA Experiment 108556 PARAMETER Experiment Name: Zm_Drought_P Parameter: Plant Line Value: 35A19
  misc_feature: MA Experiment 108556 PARAMETER Experiment Name: Zm_Drought_P Parameter: Timepoint (hr) Value: 24
  misc_feature: MA Experiment 108556 PARAMETER Experiment Name: Zm_Drought_P Parameter: Tissue Value: Aerial
  misc_feature: MA Experiment 108556 PARAMETER Experiment Name: Zm_Drought_P Parameter: Treatment Value: Drought vs. No Drought
  misc_feature: MA Experiment ID: 108687 Result: Down-regulated in Transcription
  misc_feature: MA Experiment 108687 PARAMETER Experiment Name: Zm_Embryos-Flowers__P Parameter: Tissue Value: Embryo vs. Aerial+
  misc_feature: MA Experiment ID: 20000478 Result: Down-regulated in Transcription
  misc_feature: MA Experiment 20000478 PARAMETER Experiment Name: Zm_5mM_SA_P Parameter: Age (day) Value: 11
  misc_feature: MA Experiment 20000478 PARAMETER Experiment Name: Zm_5mM_SA_P Parameter: Organism Value: Zea mays
  misc_feature: MA Experiment 20000478 PARAMETER Experiment Name: Zm_5mM_SA_P Parameter: Plant Line Value: 35A19
  misc_feature: MA Experiment 20000478 PARAMETER Experiment Name: Zm_5mM_SA_P Parameter: Timepoint (hr) Value: 72
  misc_feature: MA Experiment 20000478 PARAMETER Experiment Name: Zm_5mM_SA_P Parameter: Tissue Value: Aerial
  misc_feature: MA Experiment 20000478 PARAMETER Experiment Name: Zm_5mM_SA_P Parameter: Treatment Value: 5mM SA vs. No Treatment
  misc_feature: MA Experiment ID: 20000479 Result: Down-regulated in Transcription
  misc_feature: MA Experiment 20000479 PARAMETER Experiment Name: Zm_Drought_P Parameter: Age (day) Value: 10
  misc_feature: MA Experiment 20000479 PARAMETER Experiment Name: Zm_Drought_P Parameter: Organism Value: Zea mays
  misc_feature: MA Experiment 20000479 PARAMETER Experiment Name: Zm_Drought_P Parameter: Plant Line Value: 35A19
  misc_feature: MA Experiment 20000479 PARAMETER Experiment Name: Zm_Drought_P Parameter: Timepoint (hr) Value: 48
  misc_feature: MA Experiment 20000479 PARAMETER Experiment Name: Zm_Drought_P Parameter: Tissue Value: Aerial
  misc_feature: MA Experiment 20000479 PARAMETER Experiment Name: Zm_Drought_P Parameter: Treatment Value: Drought vs. No Drought
  misc_feature: MA Experiment ID: 20000480 Result: Down-regulated in Transcription
  misc_feature: MA Experiment 20000480 PARAMETER Experiment Name: Zm_Drought_P Parameter: Age (day) Value: 11
  misc_feature: MA Experiment 20000480 PARAMETER Experiment Name: Zm_Drought_P Parameter: Organism Value: Zea mays
  misc_feature: MA Experiment 20000480 PARAMETER Experiment Name: Zm_Drought_P Parameter: Plant Line Value: 35A19
  misc_feature: MA Experiment 20000480 PARAMETER Experiment Name: Zm_Drought_P Parameter: Timepoint (hr) Value: 72
  misc_feature: MA Experiment 20000480 PARAMETER Experiment Name: Zm_Drought_P Parameter: Tissue Value: Aerial
  misc_feature: MA Experiment 20000480 PARAMETER Experiment Name: Zm_Drought_P Parameter: Treatment Value: Drought vs. No Drought
gcacgagaccattacctagaacatcctaatcaaaagtttcggtgcgctaggccgagcgcacgcccctcagcacttgtgtcctcctataagtcgggctcccgccggccatggccatccccggattcggcagctgcgcggacggccggactgcagccggcaggcggaagtgatgggcagcaccgtcgacgacgacgaggcgtgcgagctggtgagcggctcggacctcgtcatcggcgagggcgacgacagcgtcagcgcgtaccttttcaaggccgtcaagaacaacaatggcaccggcatccttctcctctccgacatcttcggcttccaggactccgccacgcgggacttcgcctaccgcgtcgcctgcaatggctacaatgtcctagttccggacttgttccgtgggaacccgtggaagctgaacgtcccgttcgacggcgacagcttcgagcggtggctggcggggcaggccccgggccgggtgtccggcgacatcgacgcgtgcacgaggtggctggtggacgagttcaaggccgcgggggtgtccaagaagctgggcgtgatcgggttctgctacggcggcgggcgcctcgtggagacgctggcgcgcgacgccgagagctgcttcagcgcgggggtctgcttctacgggtcccggatggacgcgtccctgggcgaccgcgtcgcggcgcccgtcctgttcgtgtgcggcgacggcgacccgctgtgccccgtggagacggtgcgggagctggaggggcgcgcgagaggcgcccgggcggcggtgtacgccggcaggggccacgggttcgcgcaccggccgcagtcggtggaggaggacggcgacgccgaggacgcgttcaacgcgatgcgggggtggctgcacgaccacctgctcgcctgatcggacgatcagacgctgtacacgggtttggggttgcaaatcaaggatgctagtaaagagttggagtgaatccctgaaatcg

SEQ ID NO: 18480 - protein, 319 aa, Zea mays subsp. mays
  peptide (1)..(319): Ceres Seq. ID no. 12378247
ARDHYLEHPNQKFRCARPSARPSALVSSYKSGSRRPWPSPDSAAARTAGLQPAGGSDGQHRRRRRGVRAGERLGPRHRRGRRQRQRVPFQGRQEQQWHRHPSPLRHLRLPGLRHAGLRLPRRLQWLQCPSSGLVPWEPVEAERPVRRRQLRAVAGGAGPGPGVRRHRRVHEVAGGRVQGRGGVQEAGRDRVLLRRRAPRGDAGARRRELLQRGGLLLRVPDGRVPGRPRRGARPVRVRRRRPAVPRGDGAGAGGARERRPGGGVRRQGPRVRAPAAVGGGGRRRRGRVQRDAGVAARPPARLIGRSDAVHGFGVANQGC

SEQ ID NO: 18481 - protein, 245 aa, Zea mays subsp. mays
  peptide (1)..(245): Ceres Seq. ID no. 12378248
  misc_feature (28)..(243): Pfam Name: Dienelactone hydrolase family Pfam Description: Dienelactone hydrolase family
  misc_feature (28)..(243): Pfam Name: Dienelactone hydrolase family Pfam Description: Dienelactone hydrolase family
  misc_feature (8)..(243): Homolog of NCBI NO: 40253306 NR Description: putative Endo-1,3;1,4-beta-D-glucanase precursor
  misc_feature (29)..(243): Homolog of NCBI NO: 40253303 NR Description: putative Endo-1,3;1,4-beta-D-glucanase precursor
  misc_feature (26)..(243): Homolog of NCBI NO: 18676733 NR Description: unnamed protein product [Homo sapiens]
  misc_feature (26)..(243): Homolog of NCBI NO: 20270371 NR Description: hypothetical protein BC001573 [Homo sapiens]
  misc_feature (29)..(243): Homolog of NCBI NO: 40253303 NR Description: putative Endo-1,3;1,4-beta-D-glucanase precursor
  misc_feature (26)..(243): Homolog of NCBI NO: 20270371 NR Description: hypothetical protein BC001573 [Homo sapiens]
  misc_feature (5)..(244): Homolog of NCBI NO: 21553574 NR Description: unknown [Arabidopsis thaliana]
  misc_feature (5)..(244): Homolog of NCBI NO: 18399662 NR Description: expressed protein
  misc_feature (26)..(243): Homolog of NCBI NO: 34854915 NR Description: similar to Ab2-225 [Rattus norvegicus]
  misc_feature (26)..(243): Homolog of NCBI NO: 18676733 NR Description: unnamed protein product [Homo sapiens]
  misc_feature (8)..(243): Homolog of NCBI NO: 40253306 NR Description: putative Endo-1,3;1,4-beta-D-glucanase precursor
  misc_feature (26)..(243): Homolog of NCBI NO: 34854915 NR Description: similar to Ab2-225 [Rattus norvegicus]
  misc_feature (5)..(244): Homolog of NCBI NO: 21553574 NR Description: unknown [Arabidopsis thaliana]
  misc_feature (5)..(244): Homolog of NCBI NO: 18399662 NR Description: expressed protein
MGSTVDDDEACELVSGSDLVIGEGDDSVSAYLFKAVKNNNGTGILLLSDIFGFQDSATRDFAYRVACNGYNVLVPDLFRGNPWKLNVPFDGDSFERWLAGQAPGRVSGDIDACTRWLVDEFKAAGVSKKLGVIGFCYGGGRLVETLARDAESCFSAGVCFYGSRMDASLGDRVAAPVLFVCGDGDPLCPVETVRELEGRARGARAAVYAGRGHGFAHRPQSVEEDGDAEDAFNAMRGWLHDHLLA

SEQ ID NO: 18482 - DNA, 757 bp, Zea mays subsp. mays
  misc_feature (1)..(757): Ceres Seq. ID no. 12566307
  misc_feature: MA Experiment ID: 108527 Result: Up-regulated in Transcription
  misc_feature: MA Experiment 108527 PARAMETER Experiment Name: Zm_5mM_NO_P Parameter: Age (day) Value: 8
  misc_feature: MA Experiment 108527 PARAMETER Experiment Name: Zm_5mM_NO_P Parameter: Organism Value: Zea mays
  misc_feature: MA Experiment 108527 PARAMETER Experiment Name: Zm_5mM_NO_P Parameter: Plant Line Value: 35A19
  misc_feature: MA Experiment 108527 PARAMETER Experiment Name: Zm_5mM_NO_P Parameter: Timepoint (hr) Value: 6
  misc_feature: MA Experiment 108527 PARAMETER Experiment Name: Zm_5mM_NO_P Parameter: Tissue Value: Aerial
  misc_feature: MA Experiment 108527 PARAMETER Experiment Name: Zm_5mM_NO_P Parameter: Treatment Value: 5mM NO vs. No Treatment
  misc_feature: MA Experiment ID: 108528 Result: Down-regulated in Transcription
  misc_feature: MA Experiment 108528 PARAMETER Experiment Name: Zm_Imbibed_Seeds_P Parameter: Age (day) Value: 5 vs. 2
  misc_feature: MA Experiment 108528 PARAMETER Experiment Name: Zm_Imbibed_Seeds_P Parameter: Organism Value: Zea mays
  misc_feature: MA Experiment 108528 PARAMETER Experiment Name: Zm_Imbibed_Seeds_P Parameter: Plant Line Value: 35A19
  misc_feature: MA Experiment 108528 PARAMETER Experiment Name: Zm_Imbibed_Seeds_P Parameter: Tissue Value: Aerial vs. Embryo
  misc_feature: MA Experiment ID: 108530 Result: Down-regulated in Transcription
  misc_feature: MA Experiment 108530 PARAMETER Experiment Name: Zm_Imbibed_Seeds_P Parameter: Age (day) Value: 6 vs. 2
  misc_feature: MA Experiment 108530 PARAMETER Experiment Name: Zm_Imbibed_Seeds_P Parameter: Organism Value: Zea mays
  misc_feature: MA Experiment 108530 PARAMETER Experiment Name: Zm_Imbibed_Seeds_P Parameter: Plant Line Value: 35A19
  misc_feature: MA Experiment 108530 PARAMETER Experiment Name: Zm_Imbibed_Seeds_P Parameter: Tissue Value: Aerial vs. Embryo
  misc_feature: MA Experiment ID: 108533 Result: Down-regulated in Transcription
  misc_feature: MA Experiment 108533 PARAMETER Experiment Name: Zm_4deg_Cold_P Parameter: Age (hr) Value: 8
  misc_feature: MA Experiment 108533 PARAMETER Experiment Name: Zm_4deg_Cold_P Parameter: Organism Value: Zea mays
  misc_feature: MA Experiment 108533 PARAMETER Experiment Name: Zm_4deg_Cold_P Parameter: Plant Line Value: 35A19
  misc_feature: MA Experiment 108533 PARAMETER Experiment Name: Zm_4deg_Cold_P Parameter: Temperature (deg C) Value: 4 vs. 22
  misc_feature: MA Experiment 108533 PARAMETER Experiment Name: Zm_4deg_Cold_P Parameter: Timepoint (hr) Value: 1
  misc_feature: MA Experiment 108533 PARAMETER Experiment Name: Zm_4deg_Cold_P Parameter: Tissue Value: Aerial
  misc_feature: MA Experiment ID: 108544 Result: Down-regulated in Transcription
  misc_feature: MA Experiment ID: 108545 Result: Down-regulated in Transcription
  misc_feature: MA Experiment 108545 PARAMETER Experiment Name: Zm_Imbibed_Seeds_P Parameter: Age (day) Value: 3 vs. 2
  misc_feature: MA Experiment 108545 PARAMETER Experiment Name: Zm_Imbibed_Seeds_P Parameter: Organism Value: Zea mays
  misc_feature: MA Experiment 108545 PARAMETER Experiment Name: Zm_Imbibed_Seeds_P Parameter: Plant Line Value: 35A19
  misc_feature: MA Experiment 108545 PARAMETER Experiment Name: Zm_Imbibed_Seeds_P Parameter: Tissue Value: Aerial vs. Embryo
  misc_feature: MA Experiment ID: 108547 Result: Down-regulated in Transcription
  misc_feature: MA Experiment 108547 PARAMETER Experiment Name: Zm_Imbibed_Seeds_P Parameter: Age (day) Value: 4 vs. 2
  misc_feature: MA Experiment 108547 PARAMETER Experiment Name: Zm_Imbibed_Seeds_P Parameter: Organism Value: Zea mays
  misc_feature: MA Experiment 108547 PARAMETER Experiment Name: Zm_Imbibed_Seeds_P Parameter: Plant Line Value: 35A19
  misc_feature: MA Experiment 108547 PARAMETER Experiment Name: Zm_Imbibed_Seeds_P Parameter: Tissue Value: Aerial vs. Embryo
  misc_feature: MA Experiment ID: 108556 Result: Down-regulated in Transcription
  misc_feature: MA Experiment 108556 PARAMETER Experiment Name: Zm_Drought_P Parameter: Age (day) Value: 9
  misc_feature: MA Experiment 108556 PARAMETER Experiment Name: Zm_Drought_P Parameter: Organism Value: Zea mays
  misc_feature: MA Experiment 108556 PARAMETER Experiment Name: Zm_Drought_P Parameter: Plant Line Value: 35A19
  misc_feature: MA Experiment 108556 PARAMETER Experiment Name: Zm_Drought_P Parameter: Timepoint (hr) Value: 24
  misc_feature: MA Experiment 108556 PARAMETER Experiment Name: Zm_Drought_P Parameter: Tissue Value: Aerial
  misc_feature: MA Experiment 108556 PARAMETER Experiment Name: Zm_Drought_P Parameter: Treatment Value: Drought vs. No Drought
  misc_feature: MA Experiment ID: 108559 Result: Up-regulated in Transcription
  misc_feature: MA Experiment 108559 PARAMETER Experiment Name: Zm_5mM_NO_P Parameter: Age (day) Value: 8
  misc_feature: MA Experiment 108559 PARAMETER Experiment Name: Zm_5mM_NO_P Parameter: Organism Value: Zea mays
  misc_feature: MA Experiment 108559 PARAMETER Experiment Name: Zm_5mM_NO_P Parameter: Plant Line Value: 35A19
  misc_feature: MA Experiment 108559 PARAMETER Experiment Name: Zm_5mM_NO_P Parameter: Timepoint (hr) Value: 12
  misc_feature: MA Experiment 108559 PARAMETER Experiment Name: Zm_5mM_NO_P Parameter: Tissue Value: Aerial
  misc_feature: MA Experiment 108559 PARAMETER Experiment Name: Zm_5mM_NO_P Parameter: Treatment Value: 5mM NO vs. No Treatment
  misc_feature: MA Experiment ID: 108689 Result: Down-regulated in Transcription
  misc_feature: MA Experiment 108689 PARAMETER Experiment Name: Zm_Drought_Roots_P Parameter: Age (day) Value: 9
  misc_feature: MA Experiment 108689 PARAMETER Experiment Name: Zm_Drought_Roots_P Parameter: Organism Value: Zea mays
  misc_feature: MA Experiment 108689 PARAMETER Experiment Name: Zm_Drought_Roots_P Parameter: Plant Line Value: 35A19
  misc_feature: MA Experiment 108689 PARAMETER Experiment Name: Zm_Drought_Roots_P Parameter: Timepoint (hr) Value: 24
  misc_feature: MA Experiment 108689 PARAMETER Experiment Name: Zm_Drought_Roots_P Parameter: Tissue Value: Roots
  misc_feature: MA Experiment 108689 PARAMETER Experiment Name: Zm_Drought_Roots_P Parameter: Treatment Value: Drought vs. No Drought
  misc_feature: MA Experiment ID: 20000479 Result: Down-regulated in Transcription
  misc_feature: MA Experiment 20000479 PARAMETER Experiment Name: Zm_Drought_P Parameter: Age (day) Value: 10
  misc_feature: MA Experiment 20000479 PARAMETER Experiment Name: Zm_Drought_P Parameter: Organism Value: Zea mays
  misc_feature: MA Experiment 20000479 PARAMETER Experiment Name: Zm_Drought_P Parameter: Plant Line Value: 35A19
  misc_feature: MA Experiment 20000479 PARAMETER Experiment Name: Zm_Drought_P Parameter: Timepoint (hr) Value: 48
  misc_feature: MA Experiment 20000479 PARAMETER Experiment Name: Zm_Drought_P Parameter: Tissue Value: Aerial
  misc_feature: MA Experiment 20000479 PARAMETER Experiment Name: Zm_Drought_P Parameter: Treatment Value: Drought vs. No Drought
  misc_feature: MA Experiment ID: 20000480 Result: Down-regulated in Transcription
  misc_feature: MA Experiment 20000480 PARAMETER Experiment Name: Zm_Drought_P Parameter: Age (day) Value: 11
  misc_feature: MA Experiment 20000480 PARAMETER Experiment Name: Zm_Drought_P Parameter: Organism Value: Zea mays
  misc_feature: MA Experiment 20000480 PARAMETER Experiment Name: Zm_Drought_P Parameter: Plant Line Value: 35A19
  misc_feature: MA Experiment 20000480 PARAMETER Experiment Name: Zm_Drought_P Parameter: Timepoint (hr) Value: 72
  misc_feature: MA Experiment 20000480 PARAMETER Experiment Name: Zm_Drought_P Parameter: Tissue Value: Aerial
  misc_feature: MA Experiment 20000480 PARAMETER Experiment Name: Zm_Drought_P Parameter: Treatment Value: Drought vs. No Drought
  misc_feature: MA Experiment ID: 20000492 Result: Down-regulated in Transcription
  misc_feature: MA Experiment 20000492 PARAMETER Experiment Name: Zm_Hybrid_Seed_Dev_P Parameter: DAP Value: 12
  misc_feature: MA Experiment 20000492 PARAMETER Experiment Name: Zm_Hybrid_Seed_Dev_P Parameter: Organism Value: Zea mays
  misc_feature: MA Experiment 20000492 PARAMETER Experiment Name: Zm_Hybrid_Seed_Dev_P Parameter: Plant Line Value: 35A19
  misc_feature: MA Experiment 20000492 PARAMETER Experiment Name: Zm_Hybrid_Seed_Dev_P Parameter: Tissue Value: Fert Kernel vs. Unfert Floret
  misc_feature: MA Experiment ID: 20000532 Result: Up-regulated in Transcription
  misc_feature: MA Experiment 20000532 PARAMETER Experiment Name: Zm_0.001percent_MeJA_P Parameter: Age (day) Value: 10
  misc_feature: MA Experiment 20000532 PARAMETER Experiment Name: Zm_0.001percent_MeJA_P Parameter: Organism Value: Zea mays
  misc_feature: MA Experiment 20000532 PARAMETER Experiment Name: Zm_0.001percent_MeJA_P Parameter: Plant Line Value: 35A19
  misc_feature: MA Experiment 20000532 PARAMETER Experiment Name: Zm_0.001percent_MeJA_P Parameter: Timepoint (hr) Value: 48
  misc_feature: MA Experiment 20000532 PARAMETER Experiment Name: Zm_0.001percent_MeJA_P Parameter: Tissue Value: Aerial
  misc_feature: MA Experiment 20000532 PARAMETER Experiment Name: Zm_0.001percent_MeJA_P Parameter: Treatment Value: 0.001percent MeJA vs. No Treatment
  misc_feature: MA Experiment ID: 20000535 Result: Down-regulated in Transcription
  misc_feature: MA Experiment 20000535 PARAMETER Experiment Name: Zm_Hybrid_Seed_Dev_P Parameter: DAP Value: 30 vs. 12
  misc_feature: MA Experiment 20000535 PARAMETER Experiment Name: Zm_Hybrid_Seed_Dev_P Parameter: Organism Value: Zea mays
  misc_feature: MA Experiment 20000535 PARAMETER Experiment Name: Zm_Hybrid_Seed_Dev_P Parameter: Plant Line Value: 35A19
  misc_feature: MA Experiment 20000535 PARAMETER Experiment Name: Zm_Hybrid_Seed_Dev_P Parameter: Tissue Value: Embryo vs. Unfert Floret
  misc_feature: MA Experiment ID: 20000630 Result: Up-regulated in Transcription
  misc_feature: MA Experiment 20000630 PARAMETER Experiment Name: Zm_Herbicide-Treatments_P Parameter: Timepoint (hr) Value: 4
  misc_feature: MA Experiment 20000630 PARAMETER Experiment Name: Zm_Herbicide-Treatments_P Parameter: Tissue Value: Aerial
  misc_feature: MA Experiment 20000630 PARAMETER Experiment Name: Zm_Herbicide-Treatments_P Parameter: Treatment Value: Roundup vs. No Treatment
atctcgcaatcgaggcgtttttttctgcttcgtaagttcgtggtcgatccagcgagcgagcgagcagaccggcggctaaccgcggagggagagatggcgcaggggacgctggaggtgcttctcgtcggagccaggggcctcgagaacaccgattacctgagcaacatggacccctacgcgcttctgcaatgtcgctcccacgagcagaagagcagcgtcgcatctggcaaaggctgtgaacctgagtggaacgagaccttcgtgttcaccgtctccgatggcgcagcagagctgttcatcaagctcctggacagtgacggtggcactgatgacgattttgttggtgaggcaacgattcctctggaagcagtttacacggaaggaaacatccctccgactgtttacaatgttgtgaaagacgaagaataccgcggagaaatcaaagttggcctcacgttcactccagaggaccagggcttctgaggaataacttggcgtgtggccgctggaactggaggcagcaggcagtcgtcttatgattcagaagcaaacgacggatcgattcccttgatgtactgcagtccagtgagcgtgcatctacaacttgtagaagaagcctgcaacatgatcacgggatcctgtactgcatcactctaaagcctagctaaaaccaccagctcctgtacttgatgccgggcgggcttgtcatgtactgaaacctacaataacggtcgccgaaccccactctttgatgttc

SEQ ID NO: 18483 - protein, 160 aa, Zea mays subsp. mays
  peptide (1)..(160): Ceres Seq. ID no. 12566308
  misc_feature (37)..(118): Pfam Name: C2 domain Pfam Description: C2 domain
  misc_feature (35)..(154): Homolog of NCBI NO: 34908176 NR Description: putative FIERG1 protein [Oryza sativa (japonica
  misc_feature (35)..(154): Homolog of NCBI NO: 21998841 NR Description: RPP17-1 [Oryza sativa (japonica cultivar-group)]
  misc_feature (35)..(154): Homolog of NCBI NO: 7489474 NR Description: FIERG2 protein - rice
  misc_feature (32)..(156): Homolog of NCBI NO: 3860331 NR Description: hypothetical protein [Cicer arietinum]
  misc_feature (32)..(155): Homolog of NCBI NO: 38345558 NR Description: OSJNBa0032F06.15 [Oryza sativa (japonica
  misc_feature (32)..(155): Homolog of NCBI NO: 7489756 NR Description: hypothetical protein - maize
  misc_feature (32)..(155): Homolog of NCBI NO: 5565983 NR Description: unknown [Zea mays]
  misc_feature (32)..(160): Homolog of NCBI NO: 21553977 NR Description: putative elicitor-responsive gene [Arabidopsis
  misc_feature (32)..(160): Homolog of NCBI NO: 15221718 NR Description: putative elicitor-responsive gene
  misc_feature (32)..(160): Homolog of NCBI NO: 11358958 NR Description: elicitor-responsive gene 3 [imported] - rice
ISQSRRFFLLRKFVVDPASERADRRLTAEGEMAQGTLEVLLVGARGLENTDYLSNMDPYALLQCRSHEQKSSVASGKGCEPEWNETFVFTVSDGAAELFIKLLDSDGGTDDDFVGEATIPLEAVYTEGNIPPTVYNVVKDEEYRGEIKVGLTFTPEDQGF

SEQ ID NO: 18484 - protein, 129 aa, Zea mays subsp. mays
  peptide (1)..(129): Ceres Seq. ID no. 12566309
  misc_feature (6)..(87): Pfam Name: C2 domain Pfam Description: C2 domain
  misc_feature (4)..(123): Homolog of NCBI NO: 34908176 NR Description: putative FIERG1 protein [Oryza sativa (japonica
  misc_feature (4)..(123): Homolog of NCBI NO: 21998841 NR Description: RPP17-1 [Oryza sativa (japonica cultivar-group)]
  misc_feature (4)..(123): Homolog of NCBI NO: 7489474 NR Description: FIERG2 protein - rice
  misc_feature (1)..(125): Homolog of NCBI NO: 3860331 NR Description: hypothetical protein [Cicer arietinum]
  misc_feature (1)..(124): Homolog of NCBI NO: 38345558 NR Description: OSJNBa0032F06.15 [Oryza sativa (japonica
  misc_feature (1)..(124): Homolog of NCBI NO: 7489756 NR Description: hypothetical protein - maize
  misc_feature (1)..(124): Homolog of NCBI NO: 5565983 NR Description: unknown [Zea mays]
  misc_feature (1)..(129): Homolog of NCBI NO: 21553977 NR Description: putative elicitor-responsive gene [Arabidopsis
  misc_feature (1)..(129): Homolog of NCBI NO: 15221718 NR Description: putative elicitor-responsive gene
  misc_feature (1)..(129): Homolog of NCBI NO: 11358958 NR Description: elicitor-responsive gene 3 [imported] - rice
MAQGTLEVLLVGARGLENTDYLSNMDPYALLQCRSHEQKSSVASGKGCEPEWNETFVFTVSDGAAELFIKLLDSDGGTDDDFVGEATIPLEAVYTEGNIPPTVYNVVKDEEYRGEIKVGLTFTPEDQGF

SEQ ID NO: 18485 - protein, 105 aa, Zea mays subsp. mays
  peptide (1)..(105): Ceres Seq. ID no. 12566310
  misc_feature (1)..(63): Pfam Name: C2 domain Pfam Description: C2 domain
  misc_feature (1)..(99): Homolog of NCBI NO: 34908176 NR Description: putative FIERG1 protein [Oryza sativa (japonica
  misc_feature (1)..(99): Homolog of NCBI NO: 21998841 NR Description: RPP17-1 [Oryza sativa (japonica cultivar-group)]
  misc_feature (1)..(99): Homolog of NCBI NO: 7489474 NR Description: FIERG2 protein - rice
  misc_feature (1)..(101): Homolog of NCBI NO: 3860331 NR Description: hypothetical protein [Cicer arietinum]
  misc_feature (1)..(100): Homolog of NCBI NO: 38345558 NR Description: OSJNBa0032F06.15 [Oryza sativa (japonica
  misc_feature (1)..(100): Homolog of NCBI NO: 7489756 NR Description: hypothetical protein - maize
  misc_feature (1)..(100): Homolog of NCBI NO: 5565983 NR Description: unknown [Zea mays]
  misc_feature (1)..(105): Homolog of NCBI NO: 21553977 NR Description: putative elicitor-responsive gene [Arabidopsis
  misc_feature (1)..(105): Homolog of NCBI NO: 15221718 NR Description: putative elicitor-responsive gene
  misc_feature (1)..(105): Homolog of NCBI NO: 11358958 NR Description: elicitor-responsive gene 3 [imported] - rice
MDPYALLQCRSHEQKSSVASGKGCEPEWNETFVFTVSDGAAELFIKLLDSDGGTDDDFVGEATIPLEAVYTEGNIPPTVYNVVKDEEYRGEIKVGLTFTPEDQGF

SEQ ID NO: 18486 - DNA, 513 bp, Zea mays subsp. mays
  misc_feature (1)..(513): Ceres Seq. ID no. 12566894
  misc_feature: MA Experiment ID: 108535 Result: Up-regulated in Transcription
  misc_feature: MA Experiment 108535 PARAMETER Experiment Name: Zm_Meristem_P Parameter: Age (day) Value: 8
  misc_feature: MA Experiment 108535 PARAMETER Experiment Name: Zm_Meristem_P Parameter: Organism Value: Zea mays
  misc_feature: MA Experiment 108535 PARAMETER Experiment Name: Zm_Meristem_P Parameter: Plant Line Value: 35A19
  misc_feature: MA Experiment 108535 PARAMETER Experiment Name: Zm_Meristem_P Parameter: Tissue Value: Root Meristem vs. Above Root Meristem
  misc_feature: MA Experiment ID: 108545 Result: Up-regulated in Transcription
  misc_feature: MA Experiment 108545 PARAMETER Experiment Name: Zm_Imbibed_Seeds_P Parameter: Age (day) Value: 3 vs. 2
  misc_feature: MA Experiment 108545 PARAMETER Experiment Name: Zm_Imbibed_Seeds_P Parameter: Organism Value: Zea mays
  misc_feature: MA Experiment 108545 PARAMETER Experiment Name: Zm_Imbibed_Seeds_P Parameter: Plant Line Value: 35A19
  misc_feature: MA Experiment 108545 PARAMETER Experiment Name: Zm_Imbibed_Seeds_P Parameter: Tissue Value: Aerial vs. Embryo
cagcaagacacagtgtatgttgctggcctccagatggagctccagcaagcacgtgataggataagtgagctggaagtggagcggcggtcggctaggaagaagcttgatcacttgttcaagaaacttgcagaggagaaagcagcttggagaaacagagagcatgaaaaggtgcgtgctatcctcgaagatatgaaggcagaccttgaccatgagaagaaaaacaggaggcggctggagatgattaacttgaaactcgtcaatgagctgaaggaggccaagatgtcagcaaaacagctgttacaagagtatgagacagagaggaaggcgcgtgagctcaccgaggaggtatgcaacgagctagcaagagaggtgggggaagacaaagctgagattgaggccttgaaacgtgactccctgaggttgcgagaggaggtagacgaggaacggaagatgctccagatggctgaggtgtggccgtgaaacttttaatcaaatcagttcactcttttgcct

SEQ ID NO: 18487 - protein, 159 aa, Zea mays subsp. mays
  peptide (1)..(159): Ceres Seq. ID no. 12566895
  misc_feature (7)..(147): Pfam Name: Myosin tail Pfam Description: Myosin tail
  misc_feature (25)..(158): Homolog of NCBI NO: 34394172 NR Description: hypothetical protein [Oryza sativa (japonica
  misc_feature (4)..(158): Homolog of NCBI NO: 38346645 NR Description: OSJNBa0072D21.15 [Oryza sativa (japonica
  misc_feature (7)..(156): Homolog of NCBI NO: 18399293 NR Description: expressed protein
  misc_feature (7)..(156): Homolog of NCBI NO: 15724288 NR Description: AT3g11590/F24K9_26 [Arabidopsis thaliana]
  misc_feature (40)..(158): Homolog of NCBI NO: 29367527 NR Description: unknown [Oryza sativa (japonica cultivar-group)]
  misc_feature (3)..(158): Homolog of NCBI NO: 15231114 NR Description: unknown protein; protein id: At3g20350.1
  misc_feature (3)..(158): Homolog of NCBI NO: 9294553 NR Description: gb|AAF00675.1~gene_id:MQC12.10~similar to unknown
  misc_feature (7)..(158): Homolog of NCBI NO: 15223613 NR Description: unknown protein; protein id: At1g50660.1
  misc_feature (1)..(158): Homolog of NCBI NO: 40253811 NR Description: hypothetical protein [Oryza sativa (japonica
  misc_feature (1)..(158): Homolog of NCBI NO: 38344183 NR Description: OSJNBa0053K19.22 [Oryza sativa (japonica
QQDTVYVAGLQMELQQARDRISELEVERRSARKKLDHLFKKLAEEKAAWRNREHEKVRAILEDMKADLDHEKKNRRRLEMINLKLVNELKEAKMSAKQLLQEYETERKARELTEEVCNELAREVGEDKAEIEALKRDSLRLREEVDEERKMLQMAEVWP

SEQ ID NO: 18488 - protein, 148 aa, Zea mays subsp. mays
  peptide (1)..(148): Ceres Seq. ID no. 12566896
  misc_feature (1)..(136): Pfam Name: Myosin tail Pfam Description: Myosin tail
  misc_feature (14)..(147): Homolog of NCBI NO: 34394172 NR Description: hypothetical protein [Oryza sativa (japonica
  misc_feature (1)..(147): Homolog of NCBI NO: 38346645 NR Description: OSJNBa0072D21.15 [Oryza sativa (japonica
  misc_feature (1)..(145): Homolog of NCBI NO: 18399293 NR Description: expressed protein
  misc_feature (1)..(145): Homolog of NCBI NO: 15724288 NR Description: AT3g11590/F24K9_26 [Arabidopsis thaliana]
  misc_feature (29)..(147): Homolog of NCBI NO: 29367527 NR Description: unknown [Oryza sativa (japonica cultivar-group)]
  misc_feature (1)..(147): Homolog of NCBI NO: 15231114 NR Description: unknown protein; protein id: At3g20350.1
  misc_feature (1)..(147): Homolog of NCBI NO: 9294553 NR Description: gb|AAF00675.1~gene_id:MQC12.10~similar to unknown
  misc_feature (1)..(147): Homolog of NCBI NO: 15223613 NR Description: unknown protein; protein id: At1g50660.1
  misc_feature (1)..(147): Homolog of NCBI NO: 40253811 NR Description: hypothetical protein [Oryza sativa (japonica
  misc_feature (1)..(147): Homolog of NCBI NO: 38344183 NR Description: OSJNBa0053K19.22 [Oryza sativa (japonica
MELQQARDRISELEVERRSARKKLDHLFKKLAEEKAAWRNREHEKVRAILEDMKADLDHEKKNRRRLEMINLKLVNELKEAKMSAKQLLQEYETERKARELTEEVCNELAREVGEDKAEIEALKRDSLRLREEVDEERKMLQMAEVWP

SEQ ID NO: 18489 - protein, 96 aa, Zea mays subsp. mays
  peptide (1)..(96): Ceres Seq. ID no. 12566897
  misc_feature (1)..(84): Pfam Name: Myosin tail Pfam Description: Myosin tail
  misc_feature (1)..(95): Homolog of NCBI NO: 34394172 NR Description: hypothetical protein [Oryza sativa (japonica
  misc_feature (1)..(95): Homolog of NCBI NO: 38346645 NR Description: OSJNBa0072D21.15 [Oryza sativa (japonica
  misc_feature (1)..(93): Homolog of NCBI NO: 18399293 NR Description: expressed protein
  misc_feature (1)..(93): Homolog of NCBI NO: 15724288 NR Description: AT3g11590/F24K9_26 [Arabidopsis thaliana]
  misc_feature (1)..(95): Homolog of NCBI NO: 29367527 NR Description: unknown [Oryza sativa (japonica cultivar-group)]
  misc_feature (1)..(95): Homolog of NCBI NO: 15231114 NR Description: unknown protein; protein id: At3g20350.1
  misc_feature (1)..(95): Homolog of NCBI NO: 9294553 NR Description: gb|AAF00675.1~gene_id:MQC12.10~similar to unknown
  misc_feature (1)..(95): Homolog of NCBI NO: 15223613 NR Description: unknown protein; protein id: At1g50660.1
  misc_feature (1)..(95): Homolog of NCBI NO: 40253811 NR Description: hypothetical protein [Oryza sativa (japonica
  misc_feature (1)..(95): Homolog of NCBI NO: 38344183 NR Description: OSJNBa0053K19.22 [Oryza sativa (japonica
MKADLDHEKKNRRRLEMINLKLVNELKEAKMSAKQLLQEYETERKARELTEEVCNELAREVGEDKAEIEALKRDSLRLREEVDEERKMLQMAEVWP

SEQ ID NO: 18490 - DNA, 1330 bp, Zea mays subsp. mays
  misc_feature (1)..(1330): Ceres Seq. ID no. 12418837
  misc_feature: MA Experiment ID: 108687 Result: Down-regulated in Transcription
  misc_feature: MA Experiment 108687 PARAMETER Experiment Name: Zm_Embryos-Flowers__P Parameter: Tissue Value: Embryo vs. Aerial+
gcacgagaccattacctagaacatcctaatcgaaaacccgcttggtcactcctgcttccttgccgttcgagagctatccgacacctgaacagagctccagttcctctatcgacctgagggcattgggttcttgatgggagacagcaggaggcacgaaccgagggttagcctccaaccggatggctggctgcgcaggcctgcgttgggattgaacagcctgatgcagattcccgataagattcagagctctcttaaggtgcaatttgggcgtttcttgaacaaggatggtgctgtccgccgcatgagtgctgagatatcgtcagagaagcgaaaccgtcgtgttctgctgctgcttccgcggaggttcgcttggataggcatctccaagcttggtgggacaatcctagctggaccgacgagccaccagaaataaaggtgactgtaccagaaggttccctttgcaacctcaatctgagatttaaggccggattaccaccagatgcagtatacaatatcataattgatccagagaacaaaagggtgttcaagaatattaaggaagtaatatcaaggaaagtcttgctcgacgaaggatcaagacaagtagtcgaagtggagcaggcagcaatctggaagttcctctggtggtctggcaccttttccgttcatgtttttgttgatcagaacagaaaaaaacacaccgtaaagtttaggcaagggcgagctggctttatgaggaagtttgagggttgctggacgatagaacccctttttgttgacaaggaattatgccttcctctgaacccacattcattggaggaatatgaatcttgtactggtggcagggggagagttggatctgccattaccttggaccaacttatcgagcctgctcttttacccccaccacccatttcgtggtacttgagaggaattactacaaggacaactgagatgctggtgaacgatctgatagcggaaactgctcgattgcgcaccatctcaaacaacgcaaatgccaagcaaggtactgaagaaaccggtgatgctaacataggtgatccagctagagagtgtggtgacattaaggaaaggtggcgacagagaagaaaaagtggacgtcacggatcatcccttagattaacaagtcgattcttgtaagataagctatgaagcagtgctcattttaggacccgatttacctgtatcttagtttgtaaggttttggttgtaggtaacattgtgtaagatggttgtttgtgaacatgtagaagctggttgttcaatacttatatatgttttatttatatgaataaaggtttacttgctc

SEQ ID NO: 18491 - protein, 142 aa, Zea mays subsp. mays
  peptide (1)..(142): Ceres Seq. ID no. 12418838
  misc_feature (1)..(71): Pfam Name: Domain of unknown function DUF220 Pfam Description: Domain of unknown function DUF220
  misc_feature (1)..(90): Homolog of NCBI NO: 15220815 NR Description: OBP32pep protein, putative; protein id:
  misc_feature (1)..(90): Homolog of NCBI NO: 15220821 NR Description: hypothetical protein; protein id: At1g23660.1
  misc_feature (1)..(90): Homolog of NCBI NO: 15220802 NR Description: putative OBP32pep protein; protein id:
  misc_feature (1)..(101): Homolog of NCBI NO: 8778583 NR Description: F28C11.19 [Arabidopsis thaliana]
  misc_feature (1)..(130): Homolog of NCBI NO: 8778583 NR Description: F28C11.19 [Arabidopsis thaliana]
  misc_feature (1)..(130): Homolog of NCBI NO: 21554971 NR Description: unknown [Arabidopsis thaliana]
  misc_feature (1)..(130): Homolog of NCBI NO: 18395257 NR Description: Expressed protein
  misc_feature (1)..(86): Homolog of NCBI NO: 2129655 NR Description: hypothetical protein OBP32 - Arabidopsis thaliana
  misc_feature (1)..(130): Homolog of NCBI NO: 21592433 NR Description: unknown [Arabidopsis thaliana]
  misc_feature (1)..(130): Homolog of NCBI NO: 18409585 NR Description: expressed protein
MRKFEGCWTIEPLFVDKELCLPLNPHSLEEYESCTGGRGRVGSAITLDQLIEPALLPPPPISWYLRGITTRTTEMLVNDLIAETARLRTISNNANAKQGTEETGDANIGDPARECGDIKERWRQRRKSGRHGSSLRLTSRFL

SEQ ID NO: 18492 - protein, 99 aa, Zea mays subsp. mays
  peptide (1)..(99): Ceres Seq. ID no. 12418839
MGDSRRHEPRVSLQPDGWLRRPALGLNSLMQIPDKIQSSLKVQFGRFLNKDGAVRRMSAEISSEKRNRRVLLLLPRRFAWIGISKLGGTILAGPTSHQK

SEQ ID NO: 18493 - DNA, 1372 bp, Zea mays subsp. mays
  misc_feature (1)..(1372): Ceres Seq. ID no. 12359071
  misc_feature: MA Experiment ID: 108504 Result: Down-regulated in Transcription
  misc_feature: MA Experiment 108504 PARAMETER Experiment Name: Zm_Drought_P Parameter: Age (day) Value: 8
  misc_feature: MA Experiment 108504 PARAMETER Experiment Name: Zm_Drought_P Parameter: Organism Value: Zea mays
  misc_feature: MA Experiment 108504 PARAMETER Experiment Name: Zm_Drought_P Parameter: Plant Line Value: 35A19
  misc_feature: MA Experiment 108504 PARAMETER Experiment Name: Zm_Drought_P Parameter: Timepoint (hr) Value: 12
  misc_feature: MA Experiment 108504 PARAMETER Experiment Name: Zm_Drought_P Parameter: Tissue Value: Aerial
  misc_feature: MA Experiment 108504 PARAMETER Experiment Name: Zm_Drought_P Parameter: Treatment Value: Drought vs. No Drought
  misc_feature: MA Experiment ID: 108527 Result: Down-regulated in Transcription
  misc_feature: MA Experiment 108527 PARAMETER Experiment Name: Zm_5mM_NO_P Parameter: Age (day) Value: 8
  misc_feature: MA Experiment 108527 PARAMETER Experiment Name: Zm_5mM_NO_P Parameter: Organism Value: Zea mays
  misc_feature: MA Experiment 108527 PARAMETER Experiment Name: Zm_5mM_NO_P Parameter: Plant Line Value: 35A19
  misc_feature: MA Experiment 108527 PARAMETER Experiment Name: Zm_5mM_NO_P Parameter: Timepoint (hr) Value: 6
  misc_feature: MA Experiment 108527 PARAMETER Experiment Name: Zm_5mM_NO_P Parameter: Tissue Value: Aerial
  misc_feature: MA Experiment 108527 PARAMETER Experiment Name: Zm_5mM_NO_P Parameter: Treatment Value: 5mM NO vs. No Treatment
  misc_feature: MA Experiment ID: 108528 Result: Up-regulated in Transcription
  misc_feature: MA Experiment 108528 PARAMETER Experiment Name: Zm_Imbibed_Seeds_P Parameter: Age (day) Value: 5 vs. 2
  misc_feature: MA Experiment 108528 PARAMETER Experiment Name: Zm_Imbibed_Seeds_P Parameter: Organism Value: Zea mays
  misc_feature: MA Experiment 108528 PARAMETER Experiment Name: Zm_Imbibed_Seeds_P Parameter: Plant Line Value: 35A19
  misc_feature: MA Experiment 108528 PARAMETER Experiment Name: Zm_Imbibed_Seeds_P Parameter: Tissue Value: Aerial vs. Embryo
  misc_feature: MA Experiment ID: 108529 Result: Up-regulated in Transcription
  misc_feature: MA Experiment 108529 PARAMETER Experiment Name: Zm_Imbibed_Seeds_P Parameter: Age (day) Value: 5 vs. 2
  misc_feature: MA Experiment 108529 PARAMETER Experiment Name: Zm_Imbibed_Seeds_P Parameter: Organism Value: Zea mays
  misc_feature: MA Experiment 108529 PARAMETER Experiment Name: Zm_Imbibed_Seeds_P Parameter: Plant Line Value: 35A19
  misc_feature: MA Experiment 108529 PARAMETER Experiment Name: Zm_Imbibed_Seeds_P Parameter: Tissue Value: Roots vs. Embryo
  misc_feature: MA Experiment ID: 108530 Result: Up-regulated in Transcription
  misc_feature: MA Experiment 108530 PARAMETER Experiment Name: Zm_Imbibed_Seeds_P Parameter: Age (day) Value: 6 vs. 2
  misc_feature: MA Experiment 108530 PARAMETER Experiment Name: Zm_Imbibed_Seeds_P Parameter: Organism Value: Zea mays
  misc_feature: MA Experiment 108530 PARAMETER Experiment Name: Zm_Imbibed_Seeds_P Parameter: Plant Line Value: 35A19
  misc_feature: MA Experiment 108530 PARAMETER Experiment Name: Zm_Imbibed_Seeds_P Parameter: Tissue Value: Aerial vs. Embryo
  misc_feature: MA Experiment ID: 108535 Result: Down-regulated in Transcription
  misc_feature: MA Experiment 108535 PARAMETER Experiment Name: Zm_Meristem_P Parameter: Age (day) Value: 8
  misc_feature: MA Experiment 108535 PARAMETER Experiment Name: Zm_Meristem_P Parameter: Organism Value: Zea mays
  misc_feature: MA Experiment 108535 PARAMETER Experiment Name: Zm_Meristem_P Parameter: Plant Line Value: 35A19
  misc_feature: MA Experiment 108535 PARAMETER Experiment Name: Zm_Meristem_P Parameter: Tissue Value: Root Meristem vs. Above Root Meristem
  misc_feature: MA Experiment ID: 108542 Result: Down-regulated in Transcription
  misc_feature: MA Experiment 108542 PARAMETER Experiment Name: Zm_150mM_NaCl_P Parameter: Age (day) Value: 8
  misc_feature: MA Experiment 108542 PARAMETER Experiment Name: Zm_150mM_NaCl_P Parameter: Organism Value: Zea mays
  misc_feature: MA Experiment 108542 PARAMETER Experiment Name: Zm_150mM_NaCl_P Parameter: Plant Line Value: 35A19
  misc_feature: MA Experiment 108542 PARAMETER Experiment Name: Zm_150mM_NaCl_P Parameter: Timepoint (hr) Value: 6
  misc_feature: MA Experiment 108542 PARAMETER Experiment Name: Zm_150mM_NaCl_P Parameter: Tissue Value: Aerial
  misc_feature: MA Experiment 108542 PARAMETER Experiment Name: Zm_150mM_NaCl_P Parameter: Treatment Value: 150mM NaCl vs. No Treatment
  misc_feature: MA Experiment ID: 108543 Result: Down-regulated in Transcription
  misc_feature: MA Experiment ID: 108544 Result: Up-regulated in Transcription
  misc_feature: MA Experiment ID: 108547 Result: Up-regulated in Transcription
  misc_feature: MA Experiment 108547 PARAMETER Experiment Name: Zm_Imbibed_Seeds_P Parameter: Age (day) Value: 4 vs. 2
  misc_feature: MA Experiment 108547 PARAMETER Experiment Name: Zm_Imbibed_Seeds_P Parameter: Organism Value: Zea mays
  misc_feature: MA Experiment 108547 PARAMETER Experiment Name: Zm_Imbibed_Seeds_P Parameter: Plant Line Value: 35A19
  misc_feature: MA Experiment 108547 PARAMETER Experiment Name: Zm_Imbibed_Seeds_P Parameter: Tissue Value: Aerial vs. Embryo
  misc_feature: MA Experiment ID: 108556 Result: Down-regulated in Transcription
  misc_feature: MA Experiment 108556 PARAMETER Experiment Name: Zm_Drought_P Parameter: Age (day) Value: 9
  misc_feature: MA Experiment 108556 PARAMETER Experiment Name: Zm_Drought_P Parameter: Organism Value: Zea mays
  misc_feature: MA Experiment 108556 PARAMETER Experiment Name: Zm_Drought_P Parameter: Plant Line Value: 35A19
  misc_feature: MA Experiment 108556 PARAMETER Experiment Name: Zm_Drought_P Parameter: Timepoint (hr) Value: 24
  misc_feature: MA Experiment 108556 PARAMETER Experiment Name: Zm_Drought_P Parameter: Tissue Value: Aerial
  misc_feature: MA Experiment 108556 PARAMETER Experiment Name: Zm_Drought_P Parameter: Treatment Value: Drought vs. No Drought
  misc_feature: MA Experiment ID: 108559 Result: Down-regulated in Transcription
  misc_feature: MA Experiment 108559 PARAMETER Experiment Name: Zm_5mM_NO_P Parameter: Age (day) Value: 8
  misc_feature: MA Experiment 108559 PARAMETER Experiment Name: Zm_5mM_NO_P Parameter: Organism Value: Zea mays
  misc_feature: MA Experiment 108559 PARAMETER Experiment Name: Zm_5mM_NO_P Parameter: Plant Line Value: 35A19
  misc_feature: MA Experiment 108559 PARAMETER Experiment Name: Zm_5mM_NO_P Parameter: Timepoint (hr) Value: 12
  misc_feature: MA Experiment 108559 PARAMETER Experiment Name: Zm_5mM_NO_P Parameter: Tissue Value: Aerial
  misc_feature: MA Experiment 108559 PARAMETER Experiment Name: Zm_5mM_NO_P Parameter: Treatment Value: 5mM NO vs. No Treatment
  misc_feature: MA Experiment ID: 108597 Result: Down-regulated in Transcription
  misc_feature: MA Experiment 108597 PARAMETER Experiment Name: Zm_100uM_ABA_P Parameter: Age (day) Value: 9
  misc_feature: MA Experiment 108597 PARAMETER Experiment Name: Zm_100uM_ABA_P Parameter: Organism Value: Zea mays
  misc_feature: MA Experiment 108597 PARAMETER Experiment Name: Zm_100uM_ABA_P Parameter: Plant Line Value: 35A19
  misc_feature: MA Experiment 108597 PARAMETER Experiment Name: Zm_100uM_ABA_P Parameter: Timepoint (hr) Value: 24
  misc_feature: MA Experiment 108597 PARAMETER Experiment Name: Zm_100uM_ABA_P Parameter: Tissue Value: Aerial
  misc_feature: MA Experiment 108597 PARAMETER Experiment Name: Zm_100uM_ABA_P Parameter: Treatment Value: 100uM ABA vs. No Treatment
  misc_feature: MA Experiment ID: 108688 Result: Down-regulated in Transcription
  misc_feature: MA Experiment 108688 PARAMETER Experiment Name: Zm_Embryos-Flowers__P Parameter: Tissue Value: Immature Flowers vs. Aerial+
  misc_feature: MA Experiment ID: 108689 Result: Down-regulated in Transcription
  misc_feature: MA Experiment 108689 PARAMETER Experiment Name: Zm_Drought_Roots_P Parameter: Age (day) Value: 9
  misc_feature: MA Experiment 108689 PARAMETER Experiment Name: Zm_Drought_Roots_P Parameter: Organism Value: Zea mays
  misc_feature: MA Experiment 108689 PARAMETER Experiment Name: Zm_Drought_Roots_P Parameter: Plant Line Value: 35A19
  misc_feature: MA Experiment 108689 PARAMETER Experiment Name: Zm_Drought_Roots_P Parameter: Timepoint (hr) Value: 24
  misc_feature: MA Experiment 108689 PARAMETER Experiment Name: Zm_Drought_Roots_P Parameter: Tissue Value: Roots
  misc_feature: MA Experiment 108689 PARAMETER Experiment Name: Zm_Drought_Roots_P Parameter: Treatment Value: Drought vs. No Drought
  misc_feature: MA Experiment ID: 20000477 Result: Down-regulated in Transcription
  misc_feature: MA Experiment 20000477 PARAMETER Experiment Name: Zm_5mM_SA_P Parameter: Age (day) Value: 10
  misc_feature: MA Experiment 20000477 PARAMETER Experiment Name: Zm_5mM_SA_P Parameter: Organism Value: Zea mays
  misc_feature: MA Experiment 20000477 PARAMETER Experiment Name: Zm_5mM_SA_P Parameter: Plant Line Value: 35A19
  misc_feature: MA Experiment 20000477 PARAMETER Experiment Name: Zm_5mM_SA_P Parameter: Timepoint (hr) Value: 48
  misc_feature: MA Experiment 20000477 PARAMETER Experiment Name: Zm_5mM_SA_P Parameter: Tissue Value: Aerial
  misc_feature: MA Experiment 20000477 PARAMETER Experiment Name: Zm_5mM_SA_P Parameter: Treatment Value: 5mM SA vs. No Treatment
  misc_feature: MA Experiment ID: 20000478 Result: Down-regulated in Transcription
  misc_feature: MA Experiment 20000478 PARAMETER Experiment Name: Zm_5mM_SA_P Parameter: Age (day) Value: 11
  misc_feature: MA Experiment 20000478 PARAMETER Experiment Name: Zm_5mM_SA_P Parameter: Organism Value: Zea mays
  misc_feature: MA Experiment 20000478 PARAMETER Experiment Name: Zm_5mM_SA_P Parameter: Plant Line Value: 35A19
  misc_feature: MA Experiment 20000478 PARAMETER Experiment Name: Zm_5mM_SA_P Parameter: Timepoint (hr) Value: 72
  misc_feature: MA Experiment 20000478 PARAMETER Experiment Name: Zm_5mM_SA_P Parameter: Tissue Value: Aerial
  misc_feature: MA Experiment 20000478 PARAMETER Experiment Name: Zm_5mM_SA_P Parameter: Treatment Value: 5mM SA vs. No Treatment
aagtggggcgtgcactcaaacccctcatccccatgagaccgcacgagttggagcaaggctcagtgcccgcctgcccccgcatgccgtgcgatgccatggaggcgcgcgtccctgggcgtcgtcacgtcctcactccttgtccgtctgcctgtcgccttgtctcgccttgcaggtcgtagacggcagacgaggagcagcagcagcacgaggcggccgggcccgggccacgccatgccggagaaggaggcgcaggccgccgcgttctgcggcgaggcggtgatcgccgagttcgagtccctcacgcgggacgccgccgccgtgcagcgcgacacgctgcgccggatcctggcagacaacgcctgcgccgagtacctccgctgccggggcctcgcgggccgcaccgacgccgccagcttccgcgcctgcgtgccgctcgccacgcacgccgacatcgagccctacattgcgcgtatcgccgacggcgacacgtcccccgtgctcaccgccaagcccatcacctccatctccctcagctccggcacgacgcaggggaagcgcaagtacctgcccttcaaccaggagctcgtcaagtccacgatgcagatataccggacttcctacgccttcaggaacagggctgtaccggtaccgtctaggggacgtggtgcaggtggccgggttctacaactcgacgccgaagctcaagttcgtgtgccggcggaacctgttgctgagcatcaacatcgacaagagcagcgagcaggacctgcagctggccgtggacagcgcggccaaggtcctggcggcggagaagctggaggtggtggactacagcagccacgcggaggtgtcgcgcgacccgggccactacgtggtgttctgggagctgaacgccgacgccggcgacgacgtgctgcagagctgctgcgacgagctggaccgcgccttcgcggacccgggctacgtcgggtcgcggagggcgcgcagcatcggcccgctcgagctgcgggtgctgcagcgcggcaccttccagaaggtgctccgccactacctctccctcggcgcccccgtcagccagttcaagtcgccccgctgcgtcggccgggccaacaactccggcgtcctccagatcctctccgccaacgtcgtcaaggccttcttcagcgccgcctacgactgaacccgctgcgttcggtggcgacagatcctcaggtagttgtagactctgcatgcagctgtgctgctgtctgtgactgtgtattcacaggattccaggtgctcgatctgcgcgtagatgacgcatcgcatttgtggcctgtttgcaaagttagcagtgtcgtctatggatcgagtgaaataaaacctattgatt

SEQ ID NO: 18494 - protein, 427 aa, Zea mays subsp. mays
  peptide (1)..(427): Ceres Seq. ID no. 12359072
  misc_feature (62)..(186): Pfam Name: GH3 auxin-responsive promoter Pfam Description: GH3 auxin-responsive promoter
  misc_feature (60)..(186): Homolog of NCBI NO: 34904090 NR Description: unnamed protein product [Oryza sativa (japonica
  misc_feature (64)..(167): Homolog of NCBI NO: 15221934 NR Description: Nt-gh3 deduced protein, putative; protein id:
  misc_feature (70)..(160): Homolog of NCBI NO: 40644906 NR Description: GH3-like protein [Physcomitrella patens]
  misc_feature (48)..(213): Homolog of NCBI NO: 17978966 NR Description: AT5g54510/F24B18_13 [Arabidopsis thaliana]
  misc_feature (48)..(213): Homolog of NCBI NO: 15239653 NR Description: auxin-responsive-like protein
  misc_feature (61)..(190): Homolog of NCBI NO: 16610205 NR Description: GH3-like protein 1 [Physcomitrella patens]
  misc_feature (63)..(191): Homolog of NCBI NO: 15236304 NR Description: putative GH3-like protein
  misc_feature (63)..(191): Homolog of NCBI NO: 15292855 NR Description: putative auxin-responsive protein [Arabidopsis
  misc_feature (63)..(191): Homolog of NCBI NO: 25345298 NR Description: auxin-regulated protein GH3 homolog At2g46370 -
  misc_feature (63)..(191): Homolog of NCBI NO: 18407057 NR Description: putative auxin-responsive protein
MPWRRASLGVVTSSLLVRLPVALSRLAGRRRQTRSSSSTRRPGPGHAMPEKEAQAAAFCGEAVIAEFESLTRDAAAVQRDTLRRILADNACAEYLRCRGLAGRTDAASFRACVPLATHADIEPYIARIADGDTSPVLTAKPITSISLSSGTTQGKRKYLPFNQELVKSTMQIYRTSYAFRNRAVPVPSRGRGAGGRVLQLDAEAQVRVPAEPVAEHQHRQEQRAGPAAGRGQRGQGPGGGEAGGGGLQQPRGGVARPGPLRGVLGAERRRRRRRAAELLRRAGPRLRGPGLRRVAEGAQHRPARAAGAAARHLPEGAPPLPLPRRPRQPVQVAPLRRPGQQLRRPPDPLRQRRQGLLQRRLRLNPLRSVATDPQVVVDSACSCAAVCDCVFTGFQVLDLRVDDASHLWPVCKVSSVVYGSSEIKPID

SEQ ID NO: 18495 - protein, 380 aa, Zea mays subsp. mays
  peptide (1)..(380): Ceres Seq. ID no. 12359073
  misc_feature (15)..(139): Pfam Name: GH3 auxin-responsive promoter Pfam Description: GH3 auxin-responsive promoter
  misc_feature (17)..(120): Homolog of NCBI NO: 15221934 NR Description: Nt-gh3 deduced protein, putative; protein id:
  misc_feature (23)..(113): Homolog of NCBI NO: 40644906 NR Description: GH3-like protein [Physcomitrella patens]
  misc_feature (1)..(166): Homolog of NCBI NO: 17978966 NR Description: AT5g54510/F24B18_13 [Arabidopsis thaliana]
  misc_feature (1)..(166): Homolog of NCBI NO: 15239653 NR Description: auxin-responsive-like protein
  misc_feature (14)..(143): Homolog of NCBI NO: 16610205 NR Description: GH3-like protein 1 [Physcomitrella patens]
  misc_feature (16)..(144): Homolog of NCBI NO: 15236304 NR Description: putative GH3-like protein
  misc_feature (16)..(144): Homolog of NCBI NO: 15292855 NR Description: putative auxin-responsive protein [Arabidopsis
  misc_feature (16)..(144): Homolog of NCBI NO: 25345298 NR Description: auxin-regulated protein GH3 homolog At2g46370 -
  misc_feature (16)..(144): Homolog of NCBI NO: 18407057 NR Description: putative auxin-responsive protein
  misc_feature (13)..(139): Homolog of NCBI NO: 34904090 NR Description: unnamed protein product [Oryza sativa (japonica
MPEKEAQAAAFCGEAVIAEFESLTRDAAAVQRDTLRRILADNACAEYLRCRGLAGRTDAASFRACVPLATHADIEPYIARIADGDTSPVLTAKPITSISLSSGTTQGKRKYLPFNQELVKSTMQIYRTSYAFRNRAVPVPSRGRGAGGRVLQLDAEAQVRVPAEPVAEHQHRQEQRAGPAAGRGQRGQGPGGGEAGGGGLQQPRGGVARPGPLRGVLGAERRRRRRRAAELLRRAGPRLRGPGLRRVAEGAQHRPARAAGAAARHLPEGAPPLPLPRRPRQPVQVAPLRRPGQQLRRPPDPLRQRRQGLLQRRLRLNPLRSVATDPQVVVDSACSCAAVCDCVFTGFQVLDLRVDDASHLWPVCKVSSVVYGSSEIKPID

SEQ ID NO: 18496 - protein, 258 aa, Zea mays subsp. mays
  peptide (1)..(258): Ceres Seq. ID no. 12359074
  misc_feature (57)..(89): Homolog of NCBI NO: 15805485 NR Description: hypothetical protein [Deinococcus radiodurans]
  misc_feature (1)..(52): Homolog of NCBI NO: 34909816 NR Description: putative auxin-responsive GH3 protein
  misc_feature (1)..(44): Homolog of NCBI NO: 17978966 NR Description: AT5g54510/F24B18_13 [Arabidopsis thaliana]
  misc_feature (1)..(44): Homolog of NCBI NO: 15239653 NR Description: auxin-responsive-like protein
  misc_feature (1)..(21): Homolog of NCBI NO: 16610205 NR Description: GH3-like protein 1 [Physcomitrella patens]
  misc_feature (1)..(22): Homolog of NCBI NO: 15236304 NR Description: putative GH3-like protein
  misc_feature (1)..(22): Homolog of NCBI NO: 15292855 NR Description: putative auxin-responsive protein [Arabidopsis
  misc_feature (1)..(22): Homolog of NCBI NO: 25345298 NR Description: auxin-regulated protein GH3 homolog At2g46370 -
  misc_feature (1)..(22): Homolog of NCBI NO: 18407057 NR Description: putative auxin-responsive protein
  misc_feature (1)..(17): Homolog of NCBI NO: 34904090 NR Description: unnamed protein product [Oryza sativa (japonica
MQIYRTSYAFRNRAVPVPSRGRGAGGRVLQLDAEAQVRVPAEPVAEHQHRQEQRAGPAAGRGQRGQGPGGGEAGGGGLQQPRGGVARPGPLRGVLGAERRRRRRRAAELLRRAGPRLRGPGLRRVAEGAQHRPARAAGAAARHLPEGAPPLPLPRRPRQPVQVAPLRRPGQQLRRPPDPLRQRRQGLLQRRLRLNPLRSVATDPQVVVDSACSCAAVCDCVFTGFQVLDLRVDDASHLWPVCKVSSVVYGSSEIKPID

SEQ ID NO: 18497 - DNA, 675 bp, Zea mays subsp. mays
  misc_feature (1)..(675): Ceres Seq. ID no. 12360054
  misc_feature: MA Experiment ID: 108527 Result: Up-regulated in Transcription
  misc_feature: MA Experiment 108527 PARAMETER Experiment Name: Zm_5mM_NO_P Parameter: Age (day) Value: 8
  misc_feature: MA Experiment 108527 PARAMETER Experiment Name: Zm_5mM_NO_P Parameter: Organism Value: Zea mays
  misc_feature: MA Experiment 108527 PARAMETER Experiment Name: Zm_5mM_NO_P Parameter: Plant Line Value: 35A19
  misc_feature: MA Experiment 108527 PARAMETER Experiment Name: Zm_5mM_NO_P Parameter: Timepoint (hr) Value: 6
  misc_feature: MA Experiment 108527 PARAMETER Experiment Name: Zm_5mM_NO_P Parameter: Tissue Value: Aerial
  misc_feature: MA Experiment 108527 PARAMETER Experiment Name: Zm_5mM_NO_P Parameter: Treatment Value: 5mM NO vs. No Treatment
  misc_feature: MA Experiment ID: 108529 Result: Up-regulated in Transcription
  misc_feature: MA Experiment 108529 PARAMETER Experiment Name: Zm_Imbibed_Seeds_P Parameter: Age (day) Value: 5 vs. 2
  misc_feature: MA Experiment 108529 PARAMETER Experiment Name: Zm_Imbibed_Seeds_P Parameter: Organism Value: Zea mays
  misc_feature: MA Experiment 108529 PARAMETER Experiment Name: Zm_Imbibed_Seeds_P Parameter: Plant Line Value: 35A19
  misc_feature: MA Experiment 108529 PARAMETER Experiment Name: Zm_Imbibed_Seeds_P Parameter: Tissue Value: Roots vs. Embryo
  misc_feature: MA Experiment ID: 108536 Result: Up-regulated in Transcription
  misc_feature: MA Experiment 108536 PARAMETER Experiment Name: Zm_Meristem_P Parameter: Age (day) Value: 8
  misc_feature: MA Experiment 108536 PARAMETER Experiment Name: Zm_Meristem_P Parameter: Organism Value: Zea mays
  misc_feature: MA Experiment 108536 PARAMETER Experiment Name: Zm_Meristem_P Parameter: Plant Line Value: 35A19
  misc_feature: MA Experiment 108536 PARAMETER Experiment Name: Zm_Meristem_P Parameter: Tissue Value: Shoot Meristem vs. Above Shoot Meristem
  misc_feature: MA Experiment ID: 108543 Result: Down-regulated in Transcription
  misc_feature: MA Experiment ID: 108559 Result: Up-regulated in Transcription
  misc_feature: MA Experiment 108559 PARAMETER Experiment Name: Zm_5mM_NO_P Parameter: Age (day) Value: 8
  misc_feature: MA Experiment 108559 PARAMETER Experiment Name: Zm_5mM_NO_P Parameter: Organism Value: Zea mays
  misc_feature: MA Experiment 108559 PARAMETER Experiment Name: Zm_5mM_NO_P Parameter: Plant Line Value: 35A19
  misc_feature: MA Experiment 108559 PARAMETER Experiment Name: Zm_5mM_NO_P Parameter: Timepoint (hr) Value: 12
  misc_feature: MA Experiment 108559 PARAMETER Experiment Name: Zm_5mM_NO_P Parameter: Tissue Value: Aerial
  misc_feature: MA Experiment 108559 PARAMETER Experiment Name: Zm_5mM_NO_P Parameter: Treatment Value: 5mM NO vs. No Treatment
ccttccaggttccgggaggtctatgactactattcggcactttttgattcactggatgccacccttccaagggaaagcccagatagaatgaacgtggagcgccagtgcctcgcacgggaaatcgtcaacatcttagcttgtgaaggccctgaccgtgtggaaaggtatgaagtggctgggaaatggagagctaggatggcaatggcgggctttgtgccgtccccatttaacagcggcgcggttgatggcataagatctctactgaaatcgtactgcgataagtacaggttcgagaaggtccaggacggcctccactttggctggggcgacaagacgctcgtcttctcttcggcgtggcaatagaagcttgcttgtagtattgccgatctgagcactttccagcgttttaggagcatctggtgcaagggctgtaaagagatttctgtcgccgtattgttgaagtacactcgtagctaaccttagcgtgttgcctgcctgtaggcttgtgaggtctacggtttacctagtttcttagatgaagtatgttgtgcattgtacacctactgaactacatgtagactgtagagtcgcgggtgtatttaattttgcccttcttttggaggggcagaatcacaatatgtcgacattgtttcgtgtataaagtactggatgatg

SEQ ID NO: 18498 - protein, 120 aa, Zea mays subsp. mays
  peptide (1)..(120): Ceres Seq. ID no. 12360055
  misc_feature (3)..(120): Homolog of NCBI NO: 25405382 NR Description: scarecrow-like protein [imported] - Arabidopsis
  misc_feature (3)..(120): Homolog of NCBI NO: 11358827 NR Description: scarecrow-like protein 5
  misc_feature (3)..(119): Homolog of NCBI NO: 37533564 NR Description: putative SCARECROW gene regulator-like
  misc_feature (3)..(120): Homolog of NCBI NO: 15224425 NR Description: putative SCARECROW gene regulator
  misc_feature (3)..(120): Homolog of NCBI NO: 26450054 NR Description: putative SCARECROW gene regulator [Arabidopsis
  misc_feature (3)..(120): Homolog of NCBI NO: 15238903 NR Description: SCARECROW gene regulator-like
  misc_feature (1)..(119): Homolog of NCBI NO: 25989334 NR Description: chitin-inducible gibberellin-responsive protein
  misc_feature (3)..(120): Homolog of NCBI NO: 15218990 NR Description: scarecrow-like 1
  misc_feature (3)..(120): Homolog of NCBI NO: 11358822 NR Description: scarecrow-like protein 1
  misc_feature (2)..(120): Homolog of NCBI NO: 34907424 NR Description: scarecrow-like protein [Oryza sativa (japonica
PSRFREVYDYYSALFDSLDATLPRESPDRMNVERQCLAREIVNILACEGPDRVERYEVAGKWRARMAMAGFVPSPFNSGAVDGIRSLLKSYCDKYRFEKVQDGLHFGWGDKTLVFSSAWQ

SEQ ID NO: 18499 - protein, 91 aa, Zea mays subsp. mays
  peptide (1)..(91): Ceres Seq. ID no. 12360056
  misc_feature (1)..(91): Homolog of NCBI NO: 25405382 NR Description: scarecrow-like protein [imported] - Arabidopsis
  misc_feature (1)..(91): Homolog of NCBI NO: 11358827 NR Description: scarecrow-like protein 5
  misc_feature (1)..(90): Homolog of NCBI NO: 37533564 NR Description: putative SCARECROW gene regulator-like
  misc_feature (1)..(91): Homolog of NCBI NO: 15224425 NR Description: putative SCARECROW gene regulator
  misc_feature (1)..(91): Homolog of NCBI NO: 26450054 NR Description: putative SCARECROW gene regulator [Arabidopsis
  misc_feature (1)..(91): Homolog of NCBI NO: 15238903 NR Description: SCARECROW gene regulator-like
  misc_feature (1)..(90): Homolog of NCBI NO: 25989334 NR Description: chitin-inducible gibberellin-responsive protein
  misc_feature (1)..(91): Homolog of NCBI NO: 15218990 NR Description: scarecrow-like 1
  misc_feature (1)..(91): Homolog of NCBI NO: 11358822 NR Description: scarecrow-like protein 1
  misc_feature (1)..(91): Homolog of NCBI NO: 34907424 NR Description: scarecrow-like protein [Oryza sativa (japonica
MNVERQCLAREIVNILACEGPDRVERYEVAGKWRARMAMAGFVPSPFNSGAVDGIRSLLKSYCDKYRFEKVQDGLHFGWGDKTLVFSSAWQ

SEQ ID NO: 18500 - DNA, 979 bp, Zea mays subsp. mays
  misc_feature (1)..(979): Ceres Seq. ID no. 13586215
  misc_feature: MA Experiment ID: 108527 Result: Up-regulated in Transcription
  misc_feature: MA Experiment 108527 PARAMETER Experiment Name: Zm_5mM_NO_P Parameter: Age (day) Value: 8
  misc_feature: MA Experiment 108527 PARAMETER Experiment Name: Zm_5mM_NO_P Parameter: Organism Value: Zea mays
  misc_feature: MA Experiment 108527 PARAMETER Experiment Name: Zm_5mM_NO_P Parameter: Plant Line Value: 35A19
  misc_feature: MA Experiment 108527 PARAMETER Experiment Name: Zm_5mM_NO_P Parameter: Timepoint (hr) Value: 6
  misc_feature: MA Experiment 108527 PARAMETER Experiment Name: Zm_5mM_NO_P Parameter: Tissue Value: Aerial
  misc_feature: MA Experiment 108527 PARAMETER Experiment Name: Zm_5mM_NO_P Parameter: Treatment Value: 5mM NO vs. No Treatment
  misc_feature: MA Experiment ID: 108533 Result: Up-regulated in Transcription
  misc_feature: MA Experiment 108533 PARAMETER Experiment Name: Zm_4deg_Cold_P Parameter: Age (hr) Value: 8
  misc_feature: MA Experiment 108533 PARAMETER Experiment Name: Zm_4deg_Cold_P Parameter: Organism Value: Zea mays
  misc_feature: MA Experiment 108533 PARAMETER Experiment Name: Zm_4deg_Cold_P Parameter: Plant Line Value: 35A19
  misc_feature: MA Experiment 108533 PARAMETER Experiment Name: Zm_4deg_Cold_P Parameter: Temperature (deg C) Value: 4 vs. 22
  misc_feature: MA Experiment 108533 PARAMETER Experiment Name: Zm_4deg_Cold_P Parameter: Timepoint (hr) Value: 1
  misc_feature: MA Experiment 108533 PARAMETER Experiment Name: Zm_4deg_Cold_P Parameter: Tissue Value: Aerial
  misc_feature: MA Experiment ID: 108536 Result: Up-regulated in Transcription
  misc_feature: MA Experiment 108536 PARAMETER Experiment Name: Zm_Meristem_P Parameter: Age (day) Value: 8
  misc_feature: MA Experiment 108536 PARAMETER Experiment Name: Zm_Meristem_P Parameter: Organism Value: Zea mays
  misc_feature: MA Experiment 108536 PARAMETER Experiment Name: Zm_Meristem_P Parameter: Plant Line Value: 35A19
  misc_feature: MA Experiment 108536 PARAMETER Experiment Name: Zm_Meristem_P Parameter: Tissue Value: Shoot Meristem vs. Above Shoot Meristem
  misc_feature: MA Experiment ID: 108544 Result: Down-regulated in Transcription
  misc_feature: MA Experiment ID: 20000535 Result: Down-regulated in Transcription
  misc_feature: MA Experiment 20000535 PARAMETER Experiment Name: Zm_Hybrid_Seed_Dev_P Parameter: DAP Value: 30 vs. 12
  misc_feature: MA Experiment 20000535 PARAMETER Experiment Name: Zm_Hybrid_Seed_Dev_P Parameter: Organism Value: Zea mays
  misc_feature: MA Experiment 20000535 PARAMETER Experiment Name: Zm_Hybrid_Seed_Dev_P Parameter: Plant Line Value: 35A19
  misc_feature: MA Experiment 20000535 PARAMETER Experiment Name: Zm_Hybrid_Seed_Dev_P Parameter: Tissue Value: Embryo vs. Unfert Floret
gaaaaagcagccgtgacggatccagccgaaccccctcgcagtcgcagccccctcacgccacgcgacatgggcaagatcaggatgcccgtgccgtccctgttccgccgccgctcctccaagccgccgccgccgcagccgcagcagcaggcgcctgccgcgggcgacggcgacggcagcgggtccccggagcgggcgacggcggaggaggagatggcgcgcgtgttccgcaagttcgacgcgaacggcgacgggcggatctcgcggtcggagctggcggcgctgttcgagagcctgggccacggcgcgtcggacgacgaggtggcgcgcatgatggccgaggcggacgcggacggcgacggcttcatcagcctgcccgagttcgcggccctcaacgccacggtggccggcgacgcggccgccgtcgaggaggacctgcgccacgccttccgcgtcttcgacgccgacggcagcggcgccatctccgccgccgagctcgcgcgcgtcctccgcagcctcggcgagcccgcctccgtcgcgcagtgccgccgcatgatcgagggcgtcgaccagaacggcgacggcctcatctccttcgacgagttcaaggtcatgatggccaggggaggaggctgcttcgctaagatcgcctaggtaattagaggttccctcccggcccagccctttcgaatctctgctgctccacccatcccccccacctccgttcacagcagccgagagtatggcgtcgtgtgcggtcttaagtaaagtgtatatagaagccaagatcatcgtggagaagcactagcgctagattcttctctctactaataattgggaaccacggcggatattgctttttgcaagattggagcctggatgaaagcagtggttcagagctaacttctgttctagagatgcggatgcttgactctgtgaatgaaagagtagacgattcgaacctactcctatgtggatctct

SEQ ID NO: 18501 - protein, 216 aa, Zea mays subsp. mays
  peptide (1)..(216): Ceres Seq. ID no. 13586216
  misc_feature (180)..(208): Pfam Name: EF hand Pfam Description: EF hand
  misc_feature (70)..(210): Homolog of NCBI NO: 28301674 NR Description: calcium-binding protein [Lotus japonicus]
  misc_feature (68)..(211): Homolog of NCBI NO: 13397927 NR Description: putative calmodulin-related protein [Medicago
  misc_feature (53)..(210): Homolog of NCBI NO: 6901654 NR Description: calcium-binding protein [Olea europaea]
  misc_feature (69)..(210): Homolog of NCBI NO: 15240340 NR Description: calmodulin-related protein 2, touch-induced
  misc_feature (69)..(205): Homolog of NCBI NO: 14589311 NR Description: calcium binding protein [Sesbania rostrata]
  misc_feature (39)..(215): Homolog of NCBI NO: 21740787 NR Description: OSJNBb0091E11.1 [Oryza sativa (japonica
  misc_feature (65)..(207): Homolog of NCBI NO: 34895640 NR Description: OSJNBa0083M16.33 [Oryza sativa (japonica
  misc_feature (49)..(205): Homolog of NCBI NO: 14423843 NR Description: Polcalcin Jun o 2 (Calcium-binding pollen
  misc_feature (56)..(208): Homolog of NCBI NO: 15221781 NR Description: polcalcin (calcium-binding pollen allergen),
  misc_feature (23)..(216): Homolog of NCBI NO: 19386815 NR Description: B1147A04.10 [Oryza sativa (japonica
EKAAVTDPAEPPRSRSPLTPRDMGKIRMPVPSLFRRRSSKPPPPQPQQQAPAAGDGDGSGSPERATAEEEMARVFRKFDANGDGRISRSELAALFESLGHGASDDEVARMMAEADADGDGFISLPEFAALNATVAGDAAAVEEDLRHAFRVFDADGSGAISAAELARVLRSLGEPASVAQCRRMIEGVDQNGDGLISFDEFKVMMARGGGCFAKIA

SEQ ID NO: 18502 - protein, 212 aa, Zea mays subsp. mays
  peptide (1)..(212): Ceres Seq. ID no. 13586217
  misc_feature (6)..(109): Pfam Name: Progesterone receptor Pfam Description: Progesterone receptor
  misc_feature (45)..(209): Homolog of NCBI NO: 34894284 NR Description: unnamed protein product [Oryza sativa (japonica
  misc_feature (46)..(209): Homolog of NCBI NO: 29367367 NR Description: calmodulin-related protein
KSSRDGSSRTPSQSQPPHATRHGQDQDARAVPVPPPLLQAAAAAAAAAGACRGRRRRQRVPGAGDGGGGDGARVPQVRRERRRADLAVGAGGAVREPGPRRVGRRGGAHDGRGGRGRRRLHQPARVRGPQRHGGRRRGRRRGGPAPRLPRLRRRRQRRHLRRRARARPPQPRRARLRRAVPPHDRGRRPERRRPHLLRRVQGHDGQGRRLLR

SEQ ID NO: 18503 - protein, 194 aa, Zea mays subsp. mays
  peptide (1)..(194): Ceres Seq. ID no. 13586218
  misc_feature (158)..(186): Pfam Name: EF hand Pfam Description: EF hand
  misc_feature (48)..(188): Homolog of NCBI NO: 28301674 NR Description: calcium-binding protein [Lotus japonicus]
  misc_feature (46)..(189): Homolog of NCBI NO: 13397927 NR Description: putative calmodulin-related protein [Medicago
  misc_feature (31)..(188): Homolog of NCBI NO: 6901654 NR Description: calcium-binding protein [Olea europaea]
  misc_feature (47)..(188): Homolog of NCBI NO: 15240340 NR Description: calmodulin-related protein 2, touch-induced
  misc_feature (47)..(183): Homolog of NCBI NO: 14589311 NR Description: calcium binding protein [Sesbania rostrata]
  misc_feature (17)..(193): Homolog of NCBI NO: 21740787 NR Description: OSJNBb0091E11.1 [Oryza sativa (japonica
  misc_feature (43)..(185): Homolog of NCBI NO: 34895640 NR Description: OSJNBa0083M16.33 [Oryza sativa (japonica
  misc_feature (27)..(183): Homolog of NCBI NO: 14423843 NR Description: Polcalcin Jun o 2 (Calcium-binding pollen
  misc_feature (34)..(186): Homolog of NCBI NO: 15221781 NR Description: polcalcin (calcium-binding pollen allergen),
  misc_feature (1)..(194): Homolog of NCBI NO: 19386815 NR Description: B1147A04.10 [Oryza sativa (japonica
MGKIRMPVPSLFRRRSSKPPPPQPQQQAPAAGDGDGSGSPERATAEEEMARVFRKFDANGDGRISRSELAALFESLGHGASDDEVARMMAEADADGDGFISLPEFAALNATVAGDAAAVEEDLRHAFRVFDADGSGAISAAELARVLRSLGEPASVAQCRRMIEGVDQNGDGLISFDEFKVMMARGGGCFAKIA

SEQ ID NO: 18504 - DNA, 657 bp, Zea mays subsp. mays
  misc_feature (1)..(657): Ceres Seq. ID no. 13492707
  misc_feature: MA Experiment ID: 108504 Result: Down-regulated in Transcription
  misc_feature: MA Experiment 108504 PARAMETER Experiment Name: Zm_Drought_P Parameter: Age (day) Value: 8
  misc_feature: MA Experiment 108504 PARAMETER Experiment Name: Zm_Drought_P Parameter: Organism Value: Zea mays
  misc_feature: MA Experiment 108504 PARAMETER Experiment Name: Zm_Drought_P Parameter: Plant Line Value: 35A19
  misc_feature: MA Experiment 108504 PARAMETER Experiment Name: Zm_Drought_P Parameter: Timepoint (hr) Value: 12
  misc_feature: MA Experiment 108504 PARAMETER Experiment Name: Zm_Drought_P Parameter: Tissue Value: Aerial
  misc_feature: MA Experiment 108504 PARAMETER Experiment Name: Zm_Drought_P Parameter: Treatment Value: Drought vs. No Drought
  misc_feature: MA Experiment ID: 108523 Result: Down-regulated in Transcription
  misc_feature: MA Experiment 108523 PARAMETER Experiment Name: Zm_42deg_Heat_P Parameter: Age (day) Value: 8
  misc_feature: MA Experiment 108523 PARAMETER Experiment Name: Zm_42deg_Heat_P Parameter: Organism Value: Zea mays
  misc_feature: MA Experiment 108523 PARAMETER Experiment Name: Zm_42deg_Heat_P Parameter: Plant Line Value: 35A19
  misc_feature: MA Experiment 108523 PARAMETER Experiment Name: Zm_42deg_Heat_P Parameter: Temperature (deg C) Value: 42 vs. 22
  misc_feature: MA Experiment 108523 PARAMETER Experiment Name: Zm_42deg_Heat_P Parameter: Timepoint (hr) Value: 6
  misc_feature: MA Experiment 108523 PARAMETER Experiment Name: Zm_42deg_Heat_P Parameter: Tissue Value: Aerial
  misc_feature: MA Experiment ID: 108527 Result: Down-regulated in Transcription
  misc_feature: MA Experiment 108527 PARAMETER Experiment Name: Zm_5mM_NO_P Parameter: Age (day) Value: 8
  misc_feature: MA Experiment 108527 PARAMETER Experiment Name: Zm_5mM_NO_P Parameter: Organism Value: Zea mays
  misc_feature: MA Experiment 108527 PARAMETER Experiment Name: Zm_5mM_NO_P Parameter: Plant Line Value: 35A19
  misc_feature: MA Experiment 108527 PARAMETER Experiment Name: Zm_5mM_NO_P Parameter: Timepoint (hr) Value: 6
  misc_feature: MA Experiment 108527 PARAMETER Experiment Name: Zm_5mM_NO_P Parameter: Tissue Value: Aerial
  misc_feature: MA Experiment 108527 PARAMETER Experiment Name: Zm_5mM_NO_P Parameter: Treatment Value: 5mM NO vs. No Treatment
  misc_feature: MA Experiment ID: 108530 Result: Up-regulated in Transcription
  misc_feature: MA Experiment 108530 PARAMETER Experiment Name: Zm_Imbibed_Seeds_P Parameter: Age (day) Value: 6 vs. 2
  misc_feature: MA Experiment 108530 PARAMETER Experiment Name: Zm_Imbibed_Seeds_P Parameter: Organism Value: Zea mays
  misc_feature: MA Experiment 108530 PARAMETER Experiment Name: Zm_Imbibed_Seeds_P Parameter: Plant Line Value: 35A19
  misc_feature: MA Experiment 108530 PARAMETER Experiment Name: Zm_Imbibed_Seeds_P Parameter: Tissue Value: Aerial vs. Embryo
  misc_feature: MA Experiment ID: 108534 Result: Down-regulated in Transcription
  misc_feature: MA Experiment 108534 PARAMETER Experiment Name: Zm_4deg_Cold_P Parameter: Age (hr) Value: 8
  misc_feature: MA Experiment 108534 PARAMETER Experiment Name: Zm_4deg_Cold_P Parameter: Organism Value: Zea mays
  misc_feature: MA Experiment 108534 PARAMETER Experiment Name: Zm_4deg_Cold_P Parameter: Plant Line Value: 35A19
  misc_feature: MA Experiment 108534 PARAMETER Experiment Name: Zm_4deg_Cold_P Parameter: Temperature (deg C) Value: 4 vs. 22
  misc_feature: MA Experiment 108534 PARAMETER Experiment Name: Zm_4deg_Cold_P Parameter: Timepoint (hr) Value: 6
  misc_feature: MA Experiment 108534 PARAMETER Experiment Name: Zm_4deg_Cold_P Parameter: Tissue Value: Aerial
  misc_feature: MA Experiment ID: 108536 Result: Up-regulated in Transcription
  misc_feature: MA Experiment 108536 PARAMETER Experiment Name: Zm_Meristem_P Parameter: Age (day) Value: 8
  misc_feature: MA Experiment 108536 PARAMETER Experiment Name: Zm_Meristem_P Parameter: Organism Value: Zea mays
  misc_feature: MA Experiment 108536 PARAMETER Experiment Name: Zm_Meristem_P Parameter: Plant Line Value: 35A19
  misc_feature: MA Experiment 108536 PARAMETER Experiment Name: Zm_Meristem_P Parameter: Tissue Value: Shoot Meristem vs. Above Shoot Meristem
  misc_feature: MA Experiment ID: 108542 Result: Down-regulated in Transcription
  misc_feature: MA Experiment 108542 PARAMETER Experiment Name: Zm_150mM_NaCl_P Parameter: Age (day) Value: 8
  misc_feature: MA Experiment 108542 PARAMETER Experiment Name: Zm_150mM_NaCl_P Parameter: Organism Value: Zea mays
  misc_feature: MA Experiment 108542 PARAMETER Experiment Name: Zm_150mM_NaCl_P Parameter: Plant Line Value: 35A19
  misc_feature: MA Experiment 108542 PARAMETER Experiment Name: Zm_150mM_NaCl_P Parameter: Timepoint (hr) Value: 6
  misc_feature: MA Experiment 108542 PARAMETER Experiment Name: Zm_150mM_NaCl_P Parameter: Tissue Value: Aerial
  misc_feature: MA Experiment 108542 PARAMETER Experiment Name: Zm_150mM_NaCl_P Parameter: Treatment Value: 150mM NaCl vs. No Treatment
  misc_feature: MA Experiment ID: 108556 Result: Down-regulated in Transcription
  misc_feature: MA Experiment 108556 PARAMETER Experiment Name: Zm_Drought_P Parameter: Age (day) Value: 9
  misc_feature: MA Experiment 108556 PARAMETER Experiment Name: Zm_Drought_P Parameter: Organism Value: Zea mays
  misc_feature: MA Experiment 108556 PARAMETER Experiment Name: Zm_Drought_P Parameter: Plant Line Value: 35A19
  misc_feature: MA Experiment 108556 PARAMETER Experiment Name: Zm_Drought_P Parameter: Timepoint (hr) Value: 24
  misc_feature: MA Experiment 108556 PARAMETER Experiment Name: Zm_Drought_P Parameter: Tissue Value: Aerial
  misc_feature: MA Experiment 108556 PARAMETER Experiment Name: Zm_Drought_P Parameter: Treatment Value: Drought vs. No Drought
  misc_feature: MA Experiment ID: 108559 Result: Down-regulated in Transcription
  misc_feature: MA Experiment 108559 PARAMETER Experiment Name: Zm_5mM_NO_P Parameter: Age (day) Value: 8
  misc_feature: MA Experiment 108559 PARAMETER Experiment Name: Zm_5mM_NO_P Parameter: Organism Value: Zea mays
  misc_feature: MA Experiment 108559 PARAMETER Experiment Name: Zm_5mM_NO_P Parameter: Plant Line Value: 35A19
  misc_feature: MA Experiment 108559 PARAMETER Experiment Name: Zm_5mM_NO_P Parameter: Timepoint (hr) Value: 12
  misc_feature: MA Experiment 108559 PARAMETER Experiment Name: Zm_5mM_NO_P Parameter: Tissue Value: Aerial
  misc_feature: MA Experiment 108559 PARAMETER Experiment Name: Zm_5mM_NO_P Parameter: Treatment Value: 5mM NO vs. No Treatment
  misc_feature: MA Experiment ID: 108597 Result: Down-regulated in Transcription
  misc_feature: MA Experiment 108597 PARAMETER Experiment Name: Zm_100uM_ABA_P Parameter: Age (day) Value: 9
  misc_feature: MA Experiment 108597 PARAMETER Experiment Name: Zm_100uM_ABA_P Parameter: Organism Value: Zea mays
  misc_feature: MA Experiment 108597 PARAMETER Experiment Name: Zm_100uM_ABA_P Parameter: Plant Line Value: 35A19
  misc_feature: MA Experiment 108597 PARAMETER Experiment Name: Zm_100uM_ABA_P Parameter: Timepoint (hr) Value: 24
  misc_feature: MA Experiment 108597 PARAMETER Experiment Name: Zm_100uM_ABA_P Parameter: Tissue Value: Aerial
  misc_feature: MA Experiment 108597 PARAMETER Experiment Name: Zm_100uM_ABA_P Parameter: Treatment Value: 100uM ABA vs. No Treatment
  misc_feature: MA Experiment ID: 20000477 Result: Down-regulated in Transcription
  misc_feature: MA Experiment 20000477 PARAMETER Experiment Name: Zm_5mM_SA_P Parameter: Age (day) Value: 10
  misc_feature: MA Experiment 20000477 PARAMETER Experiment Name: Zm_5mM_SA_P Parameter: Organism Value: Zea mays
  misc_feature: MA Experiment 20000477 PARAMETER Experiment Name: Zm_5mM_SA_P Parameter: Plant Line Value: 35A19
  misc_feature: MA Experiment 20000477 PARAMETER Experiment Name: Zm_5mM_SA_P Parameter: Timepoint (hr) Value: 48
  misc_feature: MA Experiment 20000477 PARAMETER Experiment Name: Zm_5mM_SA_P Parameter: Tissue Value: Aerial
  misc_feature: MA Experiment 20000477 PARAMETER Experiment Name: Zm_5mM_SA_P Parameter: Treatment Value: 5mM SA vs. No Treatment
  misc_feature: MA Experiment ID: 20000478 Result: Down-regulated in Transcription
  misc_feature: MA Experiment 20000478 PARAMETER Experiment Name: Zm_5mM_SA_P Parameter: Age (day) Value: 11
  misc_feature: MA Experiment 20000478 PARAMETER Experiment Name: Zm_5mM_SA_P Parameter: Organism Value: Zea mays
  misc_feature: MA Experiment 20000478 PARAMETER Experiment Name: Zm_5mM_SA_P Parameter: Plant Line Value: 35A19
  misc_feature: MA Experiment 20000478 PARAMETER Experiment Name: Zm_5mM_SA_P Parameter: Timepoint (hr) Value: 72
  misc_feature: MA Experiment 20000478 PARAMETER Experiment Name: Zm_5mM_SA_P Parameter: Tissue Value: Aerial
  misc_feature: MA Experiment 20000478 PARAMETER Experiment Name: Zm_5mM_SA_P Parameter: Treatment Value: 5mM SA vs. No Treatment
  misc_feature: MA Experiment ID: 20000479 Result: Down-regulated in Transcription
  misc_feature: MA Experiment 20000479 PARAMETER Experiment Name: Zm_Drought_P Parameter: Age (day) Value: 10
  misc_feature: MA Experiment 20000479 PARAMETER Experiment Name: Zm_Drought_P Parameter: Organism Value: Zea mays
  misc_feature: MA Experiment 20000479 PARAMETER Experiment Name: Zm_Drought_P Parameter: Plant Line Value: 35A19
  misc_feature: MA Experiment 20000479 PARAMETER Experiment Name: Zm_Drought_P Parameter: Timepoint (hr) Value: 48
  misc_feature: MA Experiment 20000479 PARAMETER Experiment Name: Zm_Drought_P Parameter: Tissue Value: Aerial
  misc_feature: MA Experiment 20000479 PARAMETER Experiment Name: Zm_Drought_P Parameter: Treatment Value: Drought vs. No Drought
  misc_feature: MA Experiment ID: 20000480 Result: Down-regulated in Transcription
  misc_feature: MA Experiment 20000480 PARAMETER Experiment Name: Zm_Drought_P Parameter: Age (day) Value: 11
  misc_feature: MA Experiment 20000480 PARAMETER Experiment Name: Zm_Drought_P Parameter: Organism Value: Zea mays
  misc_feature: MA Experiment 20000480 PARAMETER Experiment Name: Zm_Drought_P Parameter: Plant Line Value: 35A19
  misc_feature: MA Experiment 20000480 PARAMETER Experiment Name: Zm_Drought_P Parameter: Timepoint (hr) Value: 72
  misc_feature: MA Experiment 20000480 PARAMETER Experiment Name: Zm_Drought_P Parameter: Tissue Value: Aerial
  misc_feature: MA Experiment 20000480 PARAMETER Experiment Name: Zm_Drought_P Parameter: Treatment Value: Drought vs. No Drought
  misc_feature: MA Experiment ID: 20000488 Result: Down-regulated in Transcription
  misc_feature: MA Experiment 20000488 PARAMETER Experiment Name: Zm_50mM_NH4NO3_L_to_H_P Parameter: Organism Value: Zea mays
  misc_feature: MA Experiment 20000488 PARAMETER Experiment Name: Zm_50mM_NH4NO3_L_to_H_P Parameter: Timepoint (hr) Value: 8
  misc_feature: MA Experiment 20000488 PARAMETER Experiment Name: Zm_50mM_NH4NO3_L_to_H_P Parameter: Tissue Value: Leaves
  misc_feature: MA Experiment 20000488 PARAMETER Experiment Name: Zm_50mM_NH4NO3_L_to_H_P Parameter: Treatment Value: 50mM NH4NO3 vs. 100mM Mannitol
  misc_feature: MA Experiment ID: 20000630 Result: Down-regulated in Transcription
  misc_feature: MA Experiment 20000630 PARAMETER Experiment Name: Zm_Herbicide-Treatments_P Parameter: Timepoint (hr) Value: 4
  misc_feature: MA Experiment 20000630 PARAMETER Experiment Name: Zm_Herbicide-Treatments_P Parameter: Tissue Value: Aerial
  misc_feature: MA Experiment 20000630 PARAMETER Experiment Name: Zm_Herbicide-Treatments_P Parameter: Treatment Value: Roundup vs. No Treatment
  misc_feature: MA Experiment ID: 20001608 Result: Down-regulated in Transcription
  misc_feature: MA Experiment 20001608 PARAMETER Experiment Name: Zm_50ppm_KNO3_L-to-H_P Parameter: Age (day) Value: 21
  misc_feature: MA Experiment 20001608 PARAMETER Experiment Name: Zm_50ppm_KNO3_L-to-H_P Parameter: Organism Value: Zea mays
  misc_feature: MA Experiment 20001608 PARAMETER Experiment Name: Zm_50ppm_KNO3_L-to-H_P Parameter: Plant Line Value: 35A19
  misc_feature: MA Experiment 20001608 PARAMETER Experiment Name: Zm_50ppm_KNO3_L-to-H_P Parameter: Timepoint (hr) Value: 48
  misc_feature: MA Experiment 20001608 PARAMETER Experiment Name: Zm_50ppm_KNO3_L-to-H_P Parameter: Tissue Value: Shoots
  misc_feature: MA Experiment 20001608 PARAMETER Experiment Name: Zm_50ppm_KNO3_L-to-H_P Parameter: Treatment Value: 50ppm KNO3 vs. 50ppm KCl
  misc_feature: MA Experiment ID: 20001610 Result: Down-regulated in Transcription
  misc_feature: MA Experiment 20001610 PARAMETER Experiment Name: Zm_50ppm_KNO3_L-to-H_P Parameter: Age (day) Value: 19
  misc_feature: MA Experiment 20001610 PARAMETER Experiment Name: Zm_50ppm_KNO3_L-to-H_P Parameter: Organism Value: Zea mays
  misc_feature: MA Experiment 20001610 PARAMETER Experiment Name: Zm_50ppm_KNO3_L-to-H_P Parameter: Plant Line Value: 35A19
  misc_feature: MA Experiment 20001610 PARAMETER Experiment Name: Zm_50ppm_KNO3_L-to-H_P Parameter: Timepoint (hr) Value: 2
  misc_feature: MA Experiment 20001610 PARAMETER Experiment Name: Zm_50ppm_KNO3_L-to-H_P Parameter: Tissue Value: Roots
  misc_feature: MA Experiment 20001610 PARAMETER Experiment Name: Zm_50ppm_KNO3_L-to-H_P Parameter: Treatment Value: 50ppm KNO3 vs. 50ppm KCl
gtagtttcaattatcataacctccgactccgacgatctgaactgtgaagatgagcacttatccaccgccgacgggggaatggaccaccggcctctgtggctgcttcagcgactgcaagagctgttgcctgtcgttcttgtgcccgtgtatcccgttcggacaggtggcagaggtcttggacaagggcatgacatcctgtggtctggccggcctcctctactgtttgctgctgcatgccggggtggctgtggtcccgtgccactgcatctacacctgcacctaccgtcgcaagctccgggcggcgtacgacctgccgccggagccgtgcgccgattgctgcgtccacatgtggtgcgggccatgcgccatctcccagatgtaccgggagctcaagaacagaggcgccgacccggccatgggatgggaagtgctctcgaaaaagacgactatggctcctgtaccaatgcaagacatgacgcgctgacgacagcaactcgatctcctagcaaaccaggattacgtgttgcatatatgcacagtttgtgtgttatgtggctatgtcagcaagtaaatggatcggagtctatgagtggataaaattaagtggatgtgttcgcgtcttagtaataagtgaataaaatttcataagtgttactt

SEQ ID NO: 18505 - protein, 198 aa, Zea mays subsp. mays
  peptide (1)..(198): Ceres Seq. ID no. 13492708
  misc_feature (90)..(183): Homolog of NCBI NO: 34897272 NR Description: hypothetical protein [Oryza sativa (japonica
VVSIIITSDSDDLNCEDEHLSTADGGMDHRPLWLLQRLQELLPVVLVPVYPVRTGGRGLGQGHDILWSGRPPLLFAAACRGGCGPVPLHLHLHLPSQAPGGVRPAAGAVRRLLRPHVVRAMRHLPDVPGAQEQRRRPGHGMGSALEKDDYGSCTNARHDALTTATRSPSKPGLRVAYMHSLCVMWLCQQVNGSESMSG

SEQ ID NO: 18506 - protein, 172 aa, Zea mays subsp. mays
  peptide (1)..(172): Ceres Seq. ID no. 13492709
  misc_feature (64)..(157): Homolog of NCBI NO: 34897272 NR Description: hypothetical protein [Oryza sativa (japonica
MDHRPLWLLQRLQELLPVVLVPVYPVRTGGRGLGQGHDILWSGRPPLLFAAACRGGCGPVPLHLHLHLPSQAPGGVRPAAGAVRRLLRPHVVRAMRHLPDVPGAQEQRRRPGHGMGSALEKDDYGSCTNARHDALTTATRSPSKPGLRVAYMHSLCVMWLCQQVNGSESMSG

SEQ ID NO: 18507 - protein, 144 aa, Zea mays subsp. mays
  peptide (1)..(144): Ceres Seq. ID no. 13492710
  misc_feature (9)..(115): Pfam Name: Protein of unknown function, DUF614 Pfam Description: Protein of unknown function, DUF614
  misc_feature (5)..(125): Homolog of NCBI NO: 15223920 NR Description: expressed protein [Arabidopsis thaliana]
  misc_feature (8)..(144): Homolog of NCBI NO: 27414003 NR Description: fw2.2 [Lycopersicon cheesmanii]
  misc_feature (8)..(144): Homolog of NCBI NO: 8272628 NR Description: ORFX [Lycopersicon pennellii]
  misc_feature (8)..(144): Homolog of NCBI NO: 8272626 NR Description: ORFX [Lycopersicon esculentum]
  misc_feature (6)..(144): Homolog of NCBI NO: 34897268 NR Description: unknown protein [Oryza sativa (japonica
  misc_feature (5)..(144): Homolog of NCBI NO: 34897270 NR Description: hypothetical protein [Oryza sativa (japonica
  misc_feature (5)..(135): Homolog of NCBI NO: 34897274 NR Description: hypothetical protein [Oryza sativa (japonica
  misc_feature (8)..(144): Homolog of NCBI NO: 27414005 NR Description: fw2.2 [Lycopersicon pimpinellifolium]
  misc_feature (8)..(144): Homolog of NCBI NO: 27414017 NR Description: fw2.2 [Lycopersicon pennellii]
  misc_feature (1)..(124): Homolog of NCBI NO: 37530512 NR Description: unknown protein [Oryza sativa (japonica
MSTYPPPTGEWTTGLCGCFSDCKSCCLSFLCPCIPFGQVAEVLDKGMTSCGLAGLLYCLLLHAGVAVVPCHCIYTCTYRRKLRAAYDLPPEPCADCCVHMWCGPCAISQMYRELKNRGADPAMGWEVLSKKTTMAPVPMQDMTR

SEQ ID NO: 18508 - DNA, 1349 bp, Zea mays subsp. mays
  misc_feature (1)..(1349): Ceres Seq. ID no. 13499297
  misc_feature: MA Experiment ID: 108534 Result: Up-regulated in Transcription
  misc_feature: MA Experiment 108534 PARAMETER Experiment Name: Zm_4deg_Cold_P Parameter: Age (hr) Value: 8
  misc_feature: MA Experiment 108534 PARAMETER Experiment Name: Zm_4deg_Cold_P Parameter: Organism Value: Zea mays
  misc_feature: MA Experiment 108534 PARAMETER Experiment Name: Zm_4deg_Cold_P Parameter: Plant Line Value: 35A19
  misc_feature: MA Experiment 108534 PARAMETER Experiment Name: Zm_4deg_Cold_P Parameter: Temperature (deg C) Value: 4 vs. 22
  misc_feature: MA Experiment 108534 PARAMETER Experiment Name: Zm_4deg_Cold_P Parameter: Timepoint (hr) Value: 6
  misc_feature: MA Experiment 108534 PARAMETER Experiment Name: Zm_4deg_Cold_P Parameter: Tissue Value: Aerial
taatcgaaaaaccgcgagctcttgcagcctaacggccttagctaatttaagagagattagtaaacaaacagcagacttaagagcgagcctagctagcggcagtaccatgaggcgcctccagttcctggccgccgccgccgccgccatcttcctcctcgcgcttccgctgatggcgacggcccagccgaagctgaggccggactactacgccggcgtctgcccgaacctcgagagcattgtccgcggcgccgtgcggcagtccgtggcgctctcgccgctcgccgccccggccacgctccggctcttcttccacgactgcgcggtcaggggctgcgacgcgtcggtgatgctcatcgacccggccggcggcgacgagtggcggagccccgacggcgtgatgctgaagccggaagggttcagcacggtgatgagcgccaaggcggcggtggacagcgacccgcagtgccggaacattgtgtcctgcgccgacatcttggccctcgccgccagggactccgtgttcctgagcggagggccagactacgaagtggagctgggcaggttcgacggcagggtgtcgagtggtggcagcgtcgtggttcctcatggcacgttcgacctcgaccagctcaacgccttcttctccagcctcggtctctcccagaccgacatgatcgcactgtcagggggtcacacgatcggcgcggcgtcgtgcggctccttcgcgtaccgggtgggcgcggatccggccatggacccggcgctcgcgcagcaggtcctggcgcgctgcccggggggcgggccagccgggttcgcgttcctggacgccacgacgccgctgcggttcgacaacgagtactaccggaacctgctcggcgggatggggatcctggcctccgaccaggtgctgtacgccgacccgaggtcccgcggcgccgtcgagcgctacgccgcggaccaggccgccttcttcggggactttgccgcggcaatgacgaggctcggcagggtcggggtccgcacggcggccgacggcgagatacgccgcgactgcaggttccccaacccccaactgatgggttcgccggctggctgtggcttggcttgtggttgcgcacttgcgcttgcgcgacggttttgtgttgcttctatcttctgtgacgtcacccgtggacgtggcgcgagtgggtgtctgtgttgcgttgttgacttgagtggacgtgcagaaggccgcgtgtcttttggaccaggaaggctctgggcctggtgggctgtgtcctgtgtggctccaagatgggtgtcatatctgttgtgaagggaaatgaaatgtaaagattggtggttggcct

SEQ ID NO: 18509 - protein, 437 aa, Zea mays subsp. mays
  peptide (1)..(437): Ceres Seq. ID no. 13499298
  misc_feature (80)..(318): Pfam Name: Peroxidase Pfam Description: Peroxidase
  misc_feature (51)..(351): Homolog of NCBI NO: 28629828 NR Description: peroxidase 1 [Artemisia annua]
  misc_feature (36)..(351): Homolog of NCBI NO: 13992528 NR Description: peroxidase2 [Medicago sativa]
  misc_feature (49)..(351): Homolog of NCBI NO: 4138647 NR Description: peroxidase [Trifolium repens]
  misc_feature (63)..(351): Homolog of NCBI NO: 17027274 NR Description: putative peroxidase [Oryza sativa (japonica
  misc_feature (36)..(351): Homolog of NCBI NO: 2117624 NR Description: peroxidase (EC 1.11.1.7) 2 precursor - alfalfa
  misc_feature (49)..(351): Homolog of NCBI NO: 15224266 NR Description: peroxidase, putative [Arabidopsis thaliana]
  misc_feature (49)..(351): Homolog of NCBI NO: 1620369 NR Description: peroxidase ATP22a [Arabidopsis thaliana]
  misc_feature (42)..(355): Homolog of NCBI NO: 39545735 NR Description: OSJNBa0071I13.13 [Oryza sativa (japonica
  misc_feature (50)..(351): Homolog of NCBI NO: 15234648 NR Description: peroxidase, putative [Arabidopsis thaliana]
  misc_feature (44)..(355): Homolog of NCBI NO: 34915320 NR Description: putative peroxidase [Oryza sativa (japonica
NRKTASSCSLTALANLREISKQTADLRASLASGSTMRRLQFLAAAAAAIFLLALPLMATAQPKLRPDYYAGVCPNLESIVRGAVRQSVALSPLAAPATLRLFFHDCAVRGCDASVMLIDPAGGDEWRSPDGVMLKPEGFSTVMSAKAAVDSDPQCRNIVSCADILALAARDSVFLSGGPDYEVELGRFDGRVSSGGSVVVPHGTFDLDQLNAFFSSLGLSQTDMIALSGGHTIGAASCGSFAYRVGADPAMDPALAQQVLARCPGGGPAGFAFLDATTPLRFDNEYYRNLLGGMGILASDQVLYADPRSRGAVERYAADQAAFFGDFAAAMTRLGRVGVRTAADGEIRRDCRFPNPQLMGSPAGCGLACGCALALARRFCVASIFCDVTRGRGASGCLCCVVDLSGRAEGRVSFGPGRLWAWWAVSCVAPRWVSYLL

SEQ ID NO: 18510 - protein, 402 aa, Zea mays subsp. mays
  peptide (1)..(402): Ceres Seq. ID no. 13499299
  misc_feature (45)..(283): Pfam Name: Peroxidase Pfam Description: Peroxidase
  misc_feature (16)..(316): Homolog of NCBI NO: 28629828 NR Description: peroxidase 1 [Artemisia annua]
  misc_feature (1)..(316): Homolog of NCBI NO: 13992528 NR Description: peroxidase2 [Medicago sativa]
  misc_feature (14)..(316): Homolog of NCBI NO: 4138647 NR Description: peroxidase [Trifolium repens]
  misc_feature (28)..(316): Homolog of NCBI NO: 17027274 NR Description: putative peroxidase [Oryza sativa (japonica
  misc_feature (1)..(316): Homolog of NCBI NO: 2117624 NR Description: peroxidase (EC 1.11.1.7) 2 precursor - alfalfa
  misc_feature (14)..(316): Homolog of NCBI NO: 15224266 NR Description: peroxidase, putative [Arabidopsis thaliana]
  misc_feature (14)..(316): Homolog of NCBI NO: 1620369 NR Description: peroxidase ATP22a [Arabidopsis thaliana]
  misc_feature (7)..(320): Homolog of NCBI NO: 39545735 NR Description: OSJNBa0071I13.13 [Oryza sativa (japonica
  misc_feature (15)..(316): Homolog of NCBI NO: 15234648 NR Description: peroxidase, putative [Arabidopsis thaliana]
  misc_feature (9)..(320): Homolog of NCBI NO: 34915320 NR Description: putative peroxidase [Oryza sativa (japonica
MRRLQFLAAAAAAIFLLALPLMATAQPKLRPDYYAGVCPNLESIVRGAVRQSVALSPLAAPATLRLFFHDCAVRGCDASVMLIDPAGGDEWRSPDGVMLKPEGFSTVMSAKAAVDSDPQCRNIVSCADILALAARDSVFLSGGPDYEVELGRFDGRVSSGGSVVVPHGTFDLDQLNAFFSSLGLSQTDMIALSGGHTIGAASCGSFAYRVGADPAMDPALAQQVLARCPGGGPAGFAFLDATTPLRFDNEYYRNLLGGMGILASDQVLYADPRSRGAVERYAADQAAFFGDFAAAMTRLGRVGVRTAADGEIRRDCRFPNPQLMGSPAGCGLACGCALALARRFCVASIFCDVTRGRGASGCLCCVVDLSGRAEGRVSFGPGRLWAWWAVSCVAPRWVSYLL

SEQ ID NO: 18511 - protein, 381 aa, Zea mays subsp. mays
  peptide (1)..(381): Ceres Seq. ID no. 13499300
  misc_feature (24)..(262): Pfam Name: Peroxidase Pfam Description: Peroxidase
  misc_feature (1)..(295): Homolog of NCBI NO: 28629828 NR Description: peroxidase 1 [Artemisia annua]
  misc_feature (1)..(295): Homolog of NCBI NO: 13992528 NR Description: peroxidase2 [Medicago sativa]
  misc_feature (1)..(295): Homolog of NCBI NO: 4138647 NR Description: peroxidase [Trifolium repens]
  misc_feature (7)..(295): Homolog of NCBI NO: 17027274 NR Description: putative peroxidase [Oryza sativa (japonica
  misc_feature (1)..(295): Homolog of NCBI NO: 2117624 NR Description: peroxidase (EC 1.11.1.7) 2 precursor - alfalfa
  misc_feature (1)..(295): Homolog of NCBI NO: 15224266 NR Description: peroxidase, putative [Arabidopsis thaliana]
  misc_feature (1)..(295): Homolog of NCBI NO: 1620369 NR Description: peroxidase ATP22a [Arabidopsis thaliana]
  misc_feature (1)..(299): Homolog of NCBI NO: 39545735 NR Description: OSJNBa0071I13.13 [Oryza sativa (japonica
  misc_feature (1)..(295): Homolog of NCBI NO: 15234648 NR Description: peroxidase, putative [Arabidopsis thaliana]
  misc_feature (1)..(299): Homolog of NCBI NO: 34915320 NR Description: putative peroxidase [Oryza sativa (japonica
MATAQPKLRPDYYAGVCPNLESIVRGAVRQSVALSPLAAPATLRLFFHDCAVRGCDASVMLIDPAGGDEWRSPDGVMLKPEGFSTVMSAKAAVDSDPQCRNIVSCADILALAARDSVFLSGGPDYEVELGRFDGRVSSGGSVVVPHGTFDLDQLNAFFSSLGLSQTDMIALSGGHTIGAASCGSFAYRVGADPAMDPALAQQVLARCPGGGPAGFAFLDATTPLRFDNEYYRNLLGGMGILASDQVLYADPRSRGAVERYAADQAAFFGDFAAAMTRLGRVGVRTAADGEIRRDCRFPNPQLMGSPAGCGLACGCALALARRFCVASIFCDVTRGRGASGCLCCVVDLSGRAEGRVSFGPGRLWAWWAVSCVAPRWVSYLL

SEQ ID NO: 18512 - DNA, 1773 bp, Zea mays subsp. mays; identical to SEQ ID NO: 3856
  misc_feature (1)..(1773): Ceres Seq. ID no. 12407294
  misc_feature: MA Experiment ID: 108515 Result: Up-regulated in Transcription
  misc_feature: MA Experiment 108515 PARAMETER Experiment Name: Zm_2mM_SA_P Parameter: Age (day) Value: 8
  misc_feature: MA Experiment 108515 PARAMETER Experiment Name: Zm_2mM_SA_P Parameter: Organism Value: Zea mays
  misc_feature: MA Experiment 108515 PARAMETER Experiment Name: Zm_2mM_SA_P Parameter: Plant Line Value: 35A19
  misc_feature: MA Experiment 108515 PARAMETER Experiment Name: Zm_2mM_SA_P Parameter: Timepoint (hr) Value: 12
  misc_feature: MA Experiment 108515 PARAMETER Experiment Name: Zm_2mM_SA_P Parameter: Tissue Value: Aerial
  misc_feature: MA Experiment 108515 PARAMETER Experiment Name: Zm_2mM_SA_P Parameter: Treatment Value: 2mM SA vs. No Treatment
  misc_feature: MA Experiment ID: 108526 Result: Up-regulated in Transcription
  misc_feature: MA Experiment 108526 PARAMETER Experiment Name: Zm_5mM_NO_P Parameter: Age (day) Value: 8
  misc_feature: MA Experiment 108526 PARAMETER Experiment Name: Zm_5mM_NO_P Parameter: Organism Value: Zea mays
  misc_feature: MA Experiment 108526 PARAMETER Experiment Name: Zm_5mM_NO_P Parameter: Plant Line Value: 35A19
  misc_feature: MA Experiment 108526 PARAMETER Experiment Name: Zm_5mM_NO_P Parameter: Timepoint (hr) Value: 1
  misc_feature: MA Experiment 108526 PARAMETER Experiment Name: Zm_5mM_NO_P Parameter: Tissue Value: Aerial
  misc_feature: MA Experiment 108526 PARAMETER Experiment Name: Zm_5mM_NO_P Parameter: Treatment Value: 5mM NO vs. No Treatment
  misc_feature: MA Experiment ID: 108527 Result: Up-regulated in Transcription
  misc_feature: MA Experiment 108527 PARAMETER Experiment Name: Zm_5mM_NO_P Parameter: Age (day) Value: 8
  misc_feature: MA Experiment 108527 PARAMETER Experiment Name: Zm_5mM_NO_P Parameter: Organism Value: Zea mays
  misc_feature: MA Experiment 108527 PARAMETER Experiment Name: Zm_5mM_NO_P Parameter: Plant Line Value: 35A19
  misc_feature: MA Experiment 108527 PARAMETER Experiment Name: Zm_5mM_NO_P Parameter: Timepoint (hr) Value: 6
  misc_feature: MA Experiment 108527 PARAMETER Experiment Name: Zm_5mM_NO_P Parameter: Tissue Value: Aerial
  misc_feature: MA Experiment 108527 PARAMETER Experiment Name: Zm_5mM_NO_P Parameter: Treatment Value: 5mM NO vs. No Treatment
  misc_feature: MA Experiment ID: 108529 Result: Down-regulated in Transcription
  misc_feature: MA Experiment 108529 PARAMETER Experiment Name: Zm_Imbibed_Seeds_P Parameter: Age (day) Value: 5 vs. 2
  misc_feature: MA Experiment 108529 PARAMETER Experiment Name: Zm_Imbibed_Seeds_P Parameter: Organism Value: Zea mays
  misc_feature: MA Experiment 108529 PARAMETER Experiment Name: Zm_Imbibed_Seeds_P Parameter: Plant Line Value: 35A19
  misc_feature: MA Experiment 108529 PARAMETER Experiment Name: Zm_Imbibed_Seeds_P Parameter: Tissue Value: Roots vs. Embryo
  misc_feature: MA Experiment ID: 108533 Result: Down-regulated in Transcription
  misc_feature: MA Experiment 108533 PARAMETER Experiment Name: Zm_4deg_Cold_P Parameter: Age (hr) Value: 8
  misc_feature: MA Experiment 108533 PARAMETER Experiment Name: Zm_4deg_Cold_P Parameter: Organism Value: Zea mays
  misc_feature: MA Experiment 108533 PARAMETER Experiment Name: Zm_4deg_Cold_P Parameter: Plant Line Value: 35A19
  misc_feature: MA Experiment 108533 PARAMETER Experiment Name: Zm_4deg_Cold_P Parameter: Temperature (deg C) Value: 4 vs. 22
  misc_feature: MA Experiment 108533 PARAMETER Experiment Name: Zm_4deg_Cold_P Parameter: Timepoint (hr) Value: 1
  misc_feature: MA Experiment 108533 PARAMETER Experiment Name: Zm_4deg_Cold_P Parameter: Tissue Value: Aerial
  misc_feature: MA Experiment ID: 20000108 Result: Up-regulated in Transcription
  misc_feature: MA Experiment 20000108 PARAMETER Experiment Name: Zm_Root-Tips_P Parameter: Age (day) Value: 12
  misc_feature: MA Experiment 20000108 PARAMETER Experiment Name: Zm_Root-Tips_P Parameter: Organism Value: Zea mays
  misc_feature: MA Experiment 20000108 PARAMETER Experiment Name: Zm_Root-Tips_P Parameter: Tissue Value: Root tips vs. Root mid region    35
  misc_feature: MA Experiment 20000108 PARAMETER Experiment Name: Zm_Root-Tips_P Parameter: Tissue Value: Root tips vs. Root mid region   Sequence Listing-Misc Features (4)
  misc_feature: MA Experiment ID: 20000488 Result: Down-regulated in Transcription
  misc_feature: MA Experiment 20000488 PARAMETER Experiment Name: Zm_50mM_NH4NO3_L_to_H_P Parameter: Organism Value: Zea mays
  misc_feature: MA Experiment 20000488 PARAMETER Experiment Name: Zm_50mM_NH4NO3_L_to_H_P Parameter: Timepoint (hr) Value: 8
  misc_feature: MA Experiment 20000488 PARAMETER Experiment Name: Zm_50mM_NH4NO3_L_to_H_P Parameter: Tissue Value: Leaves
  misc_feature: MA Experiment 20000488 PARAMETER Experiment Name: Zm_50mM_NH4NO3_L_to_H_P Parameter: Treatment Value: 50mM NH4NO3 vs. 100mM Mannitol
  misc_feature: MA Experiment ID: 20000532 Result: Up-regulated in Transcription
  misc_feature: MA Experiment 20000532 PARAMETER Experiment Name: Zm_0.001percent_MeJA_P Parameter: Age (day) Value: 10
  misc_feature: MA Experiment 20000532 PARAMETER Experiment Name: Zm_0.001percent_MeJA_P Parameter: Organism Value: Zea mays
  misc_feature: MA Experiment 20000532 PARAMETER Experiment Name: Zm_0.001percent_MeJA_P Parameter: Plant Line Value: 35A19
  misc_feature: MA Experiment 20000532 PARAMETER Experiment Name: Zm_0.001percent_MeJA_P Parameter: Timepoint (hr) Value: 48
  misc_feature: MA Experiment 20000532 PARAMETER Experiment Name: Zm_0.001percent_MeJA_P Parameter: Tissue Value: Aerial
  misc_feature: MA Experiment 20000532 PARAMETER Experiment Name: Zm_0.001percent_MeJA_P Parameter: Treatment Value: 0.001percent MeJA vs. No Treatment

SEQ ID NO: 18513 - protein, 532 aa, Zea mays subsp. mays; identical to SEQ ID NO: 3857
  peptide (1)..(532): Ceres Seq. ID no. 12407295
  misc_feature (380)..(525): Pfam Name: UDP-glucoronosyl and UDP-glucosyl transferase Pfam Description: UDP-glucoronosyl and UDP-glucosyl transferase
  misc_feature (380)..(525): Pfam Name: UDP-glucoronosyl and UDP-glucosyl transferase Pfam Description: UDP-glucoronosyl and UDP-glucosyl transferase
  misc_feature (429)..(527): Homolog of NCBI NO: 27530877 NR Description: anthocyanin 5-glucosyltransferase [Torenia
  misc_feature (429)..(529): Homolog of NCBI NO: 4115563 NR Description: UDP-glucose:anthocyanin 5-O-glucosyltransferase
  misc_feature (429)..(523): Homolog of NCBI NO: 7433892 NR Description: hypothetical protein - Arabidopsis thaliana
  misc_feature (429)..(523): Homolog of NCBI NO: 15220556 NR Description: UDP-glycosyltransferase family; protein id:
  misc_feature (429)..(529): Homolog of NCBI NO: 18390540 NR Description: UDP-glucose transferase(UGT1)
  misc_feature (429)..(527): Homolog of NCBI NO: 27530877 NR Description: anthocyanin 5-glucosyltransferase [Torenia
  misc_feature (429)..(523): Homolog of NCBI NO: 7433892 NR Description: hypothetical protein - Arabidopsis thaliana
  misc_feature (429)..(529): Homolog of NCBI NO: 18390540 NR Description: UDP-glucose transferase(UGT1)
  misc_feature (380)..(525): Homolog of NCBI NO: 34906162 NR Description: putative anthocyanin 5-O-glucosyltransferase
  misc_feature (429)..(530): Homolog of NCBI NO: 20146093 NR Description: glucosyltransferase NTGT2 [Nicotiana tabacum]
  misc_feature (429)..(523): Homolog of NCBI NO: 14192682 NR Description: cold-induced glucosyl transferase [Solanum
  misc_feature (429)..(531): Homolog of NCBI NO: 40714353 NR Description: anthocyanin 5-O-glucosyltransferase [Iris
  misc_feature (429)..(530): Homolog of NCBI NO: 6683052 NR Description: anthocyanin 5-O-glucosyltransferase [Petunia x
  misc_feature (429)..(523): Homolog of NCBI NO: 15220556 NR Description: UDP-glycosyltransferase family; protein id:
  misc_feature (429)..(529): Homolog of NCBI NO: 4115563 NR Description: UDP-glucose:anthocyanin 5-O-glucosyltransferase
  misc_feature (429)..(530): Homolog of NCBI NO: 6683052 NR Description: anthocyanin 5-O-glucosyltransferase [Petunia x
  misc_feature (429)..(531): Homolog of NCBI NO: 40714353 NR Description: anthocyanin 5-O-glucosyltransferase [Iris
  misc_feature (429)..(523): Homolog of NCBI NO: 14192682 NR Description: cold-induced glucosyl transferase [Solanum
  misc_feature (429)..(530): Homolog of NCBI NO: 20146093 NR Description: glucosyltransferase NTGT2 [Nicotiana tabacum]
  misc_feature (380)..(525): Homolog of NCBI NO: 34906162 NR Description: putative anthocyanin 5-O-glucosyltransferase
  misc_feature (274)..(274): Xaa is any aa, unknown or other

SEQ ID NO: 18514 - protein, 499 aa, Zea mays subsp. mays; identical to SEQ ID NO: 3858
  peptide (1)..(499): Ceres Seq. ID no. 12407296
  misc_feature (37)..(383): Pfam Name: UDP-glucoronosyl and UDP-glucosyl transferase Pfam Description: UDP-glucoronosyl and UDP-glucosyl transferase
  misc_feature (37)..(383): Pfam Name: UDP-glucoronosyl and UDP-glucosyl transferase Pfam Description: UDP-glucoronosyl and UDP-glucosyl transferase
  misc_feature (162)..(383): Homolog of NCBI NO: 7433892 NR Description: hypothetical protein - Arabidopsis thaliana
  misc_feature (16)..(207): Homolog of NCBI NO: 15220556 NR Description: UDP-glycosyltransferase family; protein id:
  misc_feature (192)..(383): Homolog of NCBI NO: 15220556 NR Description: UDP-glycosyltransferase family; protein id:
  misc_feature (14)..(211): Homolog of NCBI NO: 18390540 NR Description: UDP-glucose transferase(UGT1)
  misc_feature (193)..(383): Homolog of NCBI NO: 18390540 NR Description: UDP-glucose transferase(UGT1)
  misc_feature (162)..(383): Homolog of NCBI NO: 7433892 NR Description: hypothetical protein - Arabidopsis thaliana
  misc_feature (192)..(383): Homolog of NCBI NO: 15220556 NR Description: UDP-glycosyltransferase family; protein id:
  misc_feature (193)..(383): Homolog of NCBI NO: 18390540 NR Description: UDP-glucose transferase(UGT1)
  misc_feature (1)..(383): Homolog of NCBI NO: 34906162 NR Description: putative anthocyanin 5-O-glucosyltransferase
  misc_feature (16)..(383): Homolog of NCBI NO: 20146093 NR Description: glucosyltransferase NTGT2 [Nicotiana tabacum]
  misc_feature (16)..(383): Homolog of NCBI NO: 14192682 NR Description: cold-induced glucosyl transferase [Solanum
  misc_feature (18)..(383): Homolog of NCBI NO: 40714353 NR Description: anthocyanin 5-O-glucosyltransferase [Iris
  misc_feature (16)..(383): Homolog of NCBI NO: 6683052 NR Description: anthocyanin 5-O-glucosyltransferase [Petunia x
  misc_feature (14)..(211): Homolog of NCBI NO: 18390540 NR Description: UDP-glucose transferase(UGT1)
  misc_feature (16)..(207): Homolog of NCBI NO: 15220556 NR Description: UDP-glycosyltransferase family; protein id:
  misc_feature (16)..(383): Homolog of NCBI NO: 6683052 NR Description: anthocyanin 5-O-glucosyltransferase [Petunia x
  misc_feature (18)..(383): Homolog of NCBI NO: 40714353 NR Description: anthocyanin 5-O-glucosyltransferase [Iris
  misc_feature (16)..(383): Homolog of NCBI NO: 14192682 NR Description: cold-induced glucosyl transferase [Solanum
  misc_feature (16)..(383): Homolog of NCBI NO: 20146093 NR Description: glucosyltransferase NTGT2 [Nicotiana tabacum]
  misc_feature (1)..(383): Homolog of NCBI NO: 34906162 NR Description: putative anthocyanin 5-O-glucosyltransferase
  misc_feature (232)..(232): Xaa is any aa, unknown or other

SEQ ID NO: 18515 - protein, 496 aa, Zea mays subsp. mays; identical to SEQ ID NO: 3859
  peptide (1)..(496): Ceres Seq. ID no. 12407297
  misc_feature (34)..(380): Pfam Name: UDP-glucoronosyl and UDP-glucosyl transferase Pfam Description: UDP-glucoronosyl and UDP-glucosyl transferase
  misc_feature (34)..(380): Pfam Name: UDP-glucoronosyl and UDP-glucosyl transferase Pfam Description: UDP-glucoronosyl and UDP-glucosyl transferase
  misc_feature (159)..(380): Homolog of NCBI NO: 7433892 NR Description: hypothetical protein - Arabidopsis thaliana
  misc_feature (13)..(204): Homolog of NCBI NO: 15220556 NR Description: UDP-glycosyltransferase family; protein id:
  misc_feature (189)..(380): Homolog of NCBI NO: 15220556 NR Description: UDP-glycosyltransferase family; protein id:
  misc_feature (11)..(208): Homolog of NCBI NO: 18390540 NR Description: UDP-glucose transferase(UGT1)
  misc_feature (190)..(380): Homolog of NCBI NO: 18390540 NR Description: UDP-glucose transferase(UGT1)
  misc_feature (159)..(380): Homolog of NCBI NO: 7433892 NR Description: hypothetical protein - Arabidopsis thaliana
  misc_feature (189)..(380): Homolog of NCBI NO: 15220556 NR Description: UDP-glycosyltransferase family; protein id:
  misc_feature (190)..(380): Homolog of NCBI NO: 18390540 NR Description: UDP-glucose transferase(UGT1)
  misc_feature (1)..(380): Homolog of NCBI NO: 34906162 NR Description: putative anthocyanin 5-O-glucosyltransferase
  misc_feature (13)..(380): Homolog of NCBI NO: 20146093 NR Description: glucosyltransferase NTGT2 [Nicotiana tabacum]
  misc_feature (13)..(380): Homolog of NCBI NO: 14192682 NR Description: cold-induced glucosyl transferase [Solanum
  misc_feature (15)..(380): Homolog of NCBI NO: 40714353 NR Description: anthocyanin 5-O-glucosyltransferase [Iris
  misc_feature (13)..(380): Homolog of NCBI NO: 6683052 NR Description: anthocyanin 5-O-glucosyltransferase [Petunia x
  misc_feature (11)..(208): Homolog of NCBI NO: 18390540 NR Description: UDP-glucose transferase(UGT1)
  misc_feature (13)..(204): Homolog of NCBI NO: 15220556 NR Description: UDP-glycosyltransferase family; protein id:
  misc_feature (13)..(380): Homolog of NCBI NO: 6683052 NR Description: anthocyanin 5-O-glucosyltransferase [Petunia x
  misc_feature (15)..(380): Homolog of NCBI NO: 40714353 NR Description: anthocyanin 5-O-glucosyltransferase [Iris
  misc_feature (13)..(380): Homolog of NCBI NO: 14192682 NR Description: cold-induced glucosyl transferase [Solanum
  misc_feature (13)..(380): Homolog of NCBI NO: 20146093 NR Description: glucosyltransferase NTGT2 [Nicotiana tabacum]
  misc_feature (1)..(380): Homolog of NCBI NO: 34906162 NR Description: putative anthocyanin 5-O-glucosyltransferase
  misc_feature (229)..(229): Xaa is any aa, unknown or other

SEQ ID NO: 18516 - DNA, 1121 bp, Zea mays subsp. mays
  misc_feature (1)..(1121): Ceres Seq. ID no. 12359075
  misc_feature: MA Experiment ID: 108515 Result: Up-regulated in Transcription
  misc_feature: MA Experiment 108515 PARAMETER Experiment Name: Zm_2mM_SA_P Parameter: Age (day) Value: 8
  misc_feature: MA Experiment 108515 PARAMETER Experiment Name: Zm_2mM_SA_P Parameter: Organism Value: Zea mays
  misc_feature: MA Experiment 108515 PARAMETER Experiment Name: Zm_2mM_SA_P Parameter: Plant Line Value: 35A19
  misc_feature: MA Experiment 108515 PARAMETER Experiment Name: Zm_2mM_SA_P Parameter: Timepoint (hr) Value: 12
  misc_feature: MA Experiment 108515 PARAMETER Experiment Name: Zm_2mM_SA_P Parameter: Tissue Value: Aerial
  misc_feature: MA Experiment 108515 PARAMETER Experiment Name: Zm_2mM_SA_P Parameter: Treatment Value: 2mM SA vs. No Treatment
  misc_feature: MA Experiment ID: 108523 Result: Down-regulated in Transcription
  misc_feature: MA Experiment 108523 PARAMETER Experiment Name: Zm_42deg_Heat_P Parameter: Age (day) Value: 8
  misc_feature: MA Experiment 108523 PARAMETER Experiment Name: Zm_42deg_Heat_P Parameter: Organism Value: Zea mays
  misc_feature: MA Experiment 108523 PARAMETER Experiment Name: Zm_42deg_Heat_P Parameter: Plant Line Value: 35A19
  misc_feature: MA Experiment 108523 PARAMETER Experiment Name: Zm_42deg_Heat_P Parameter: Temperature (deg C) Value: 42 vs. 22
  misc_feature: MA Experiment 108523 PARAMETER Experiment Name: Zm_42deg_Heat_P Parameter: Timepoint (hr) Value: 6
  misc_feature: MA Experiment 108523 PARAMETER Experiment Name: Zm_42deg_Heat_P Parameter: Tissue Value: Aerial
  misc_feature: MA Experiment ID: 108527 Result: Down-regulated in Transcription
  misc_feature: MA Experiment 108527 PARAMETER Experiment Name: Zm_5mM_NO_P Parameter: Age (day) Value: 8
  misc_feature: MA Experiment 108527 PARAMETER Experiment Name: Zm_5mM_NO_P Parameter: Organism Value: Zea mays
  misc_feature: MA Experiment 108527 PARAMETER Experiment Name: Zm_5mM_NO_P Parameter: Plant Line Value: 35A19
  misc_feature: MA Experiment 108527 PARAMETER Experiment Name: Zm_5mM_NO_P Parameter: Timepoint (hr) Value: 6
  misc_feature: MA Experiment 108527 PARAMETER Experiment Name: Zm_5mM_NO_P Parameter: Tissue Value: Aerial
  misc_feature: MA Experiment 108527 PARAMETER Experiment Name: Zm_5mM_NO_P Parameter: Treatment Value: 5mM NO vs. No Treatment
  misc_feature: MA Experiment ID: 108528 Result: Up-regulated in Transcription
  misc_feature: MA Experiment 108528 PARAMETER Experiment Name: Zm_Imbibed_Seeds_P Parameter: Age (day) Value: 5 vs. 2
  misc_feature: MA Experiment 108528 PARAMETER Experiment Name: Zm_Imbibed_Seeds_P Parameter: Organism Value: Zea mays
  misc_feature: MA Experiment 108528 PARAMETER Experiment Name: Zm_Imbibed_Seeds_P Parameter: Plant Line Value: 35A19
  misc_feature: MA Experiment 108528 PARAMETER Experiment Name: Zm_Imbibed_Seeds_P Parameter: Tissue Value: Aerial vs. Embryo
  misc_feature: MA Experiment ID: 108530 Result: Up-regulated in Transcription
  misc_feature: MA Experiment 108530 PARAMETER Experiment Name: Zm_Imbibed_Seeds_P Parameter: Age (day) Value: 6 vs. 2
  misc_feature: MA Experiment 108530 PARAMETER Experiment Name: Zm_Imbibed_Seeds_P Parameter: Organism Value: Zea mays
  misc_feature: MA Experiment 108530 PARAMETER Experiment Name: Zm_Imbibed_Seeds_P Parameter: Plant Line Value: 35A19
  misc_feature: MA Experiment 108530 PARAMETER Experiment Name: Zm_Imbibed_Seeds_P Parameter: Tissue Value: Aerial vs. Embryo
  misc_feature: MA Experiment ID: 108534 Result: Down-regulated in Transcription
  misc_feature: MA Experiment 108534 PARAMETER Experiment Name: Zm_4deg_Cold_P Parameter: Age (hr) Value: 8
  misc_feature: MA Experiment 108534 PARAMETER Experiment Name: Zm_4deg_Cold_P Parameter: Organism Value: Zea mays
  misc_feature: MA Experiment 108534 PARAMETER Experiment Name: Zm_4deg_Cold_P Parameter: Plant Line Value: 35A19
  misc_feature: MA Experiment 108534 PARAMETER Experiment Name: Zm_4deg_Cold_P Parameter: Temperature (deg C) Value: 4 vs. 22
  misc_feature: MA Experiment 108534 PARAMETER Experiment Name: Zm_4deg_Cold_P Parameter: Timepoint (hr) Value: 6
  misc_feature: MA Experiment 108534 PARAMETER Experiment Name: Zm_4deg_Cold_P Parameter: Tissue Value: Aerial
  misc_feature: MA Experiment ID: 108540 Result: Down-regulated in Transcription
  misc_feature: MA Experiment 108540 PARAMETER Experiment Name: Zm_20percent_PEG_P Parameter: Age (day) Value: 8
  misc_feature: MA Experiment 108540 PARAMETER Experiment Name: Zm_20percent_PEG_P Parameter: Organism Value: Zea mays
  misc_feature: MA Experiment 108540 PARAMETER Experiment Name: Zm_20percent_PEG_P Parameter: Plant Line Value: 35A19
  misc_feature: MA Experiment 108540 PARAMETER Experiment Name: Zm_20percent_PEG_P Parameter: Timepoint (hr) Value: 6
  misc_feature: MA Experiment 108540 PARAMETER Experiment Name: Zm_20percent_PEG_P Parameter: Tissue Value: Aerial
  misc_feature: MA Experiment 108540 PARAMETER Experiment Name: Zm_20percent_PEG_P Parameter: Treatment Value: 20percent PEG vs. No Treatment
  misc_feature: MA Experiment ID: 108556 Result: Down-regulated in Transcription
  misc_feature: MA Experiment 108556 PARAMETER Experiment Name: Zm_Drought_P Parameter: Age (day) Value: 9
  misc_feature: MA Experiment 108556 PARAMETER Experiment Name: Zm_Drought_P Parameter: Organism Value: Zea mays
  misc_feature: MA Experiment 108556 PARAMETER Experiment Name: Zm_Drought_P Parameter: Plant Line Value: 35A19
  misc_feature: MA Experiment 108556 PARAMETER Experiment Name: Zm_Drought_P Parameter: Timepoint (hr) Value: 24
  misc_feature: MA Experiment 108556 PARAMETER Experiment Name: Zm_Drought_P Parameter: Tissue Value: Aerial
  misc_feature: MA Experiment 108556 PARAMETER Experiment Name: Zm_Drought_P Parameter: Treatment Value: Drought vs. No Drought
  misc_feature: MA Experiment ID: 108559 Result: Down-regulated in Transcription
  misc_feature: MA Experiment 108559 PARAMETER Experiment Name: Zm_5mM_NO_P Parameter: Age (day) Value: 8
  misc_feature: MA Experiment 108559 PARAMETER Experiment Name: Zm_5mM_NO_P Parameter: Organism Value: Zea mays
  misc_feature: MA Experiment 108559 PARAMETER Experiment Name: Zm_5mM_NO_P Parameter: Plant Line Value: 35A19
  misc_feature: MA Experiment 108559 PARAMETER Experiment Name: Zm_5mM_NO_P Parameter: Timepoint (hr) Value: 12
  misc_feature: MA Experiment 108559 PARAMETER Experiment Name: Zm_5mM_NO_P Parameter: Tissue Value: Aerial
  misc_feature: MA Experiment 108559 PARAMETER Experiment Name: Zm_5mM_NO_P Parameter: Treatment Value: 5mM NO vs. No Treatment
  misc_feature: MA Experiment ID: 108687 Result: Down-regulated in Transcription
  misc_feature: MA Experiment 108687 PARAMETER Experiment Name: Zm_Embryos-Flowers__P Parameter: Tissue Value: Embryo vs. Aerial+
  misc_feature: MA Experiment ID: 108688 Result: Down-regulated in Transcription
  misc_feature: MA Experiment 108688 PARAMETER Experiment Name: Zm_Embryos-Flowers__P Parameter: Tissue Value: Immature Flowers vs. Aerial+
  misc_feature: MA Experiment ID: 20000479 Result: Down-regulated in Transcription
  misc_feature: MA Experiment 20000479 PARAMETER Experiment Name: Zm_Drought_P Parameter: Age (day) Value: 10
  misc_feature: MA Experiment 20000479 PARAMETER Experiment Name: Zm_Drought_P Parameter: Organism Value: Zea mays
  misc_feature: MA Experiment 20000479 PARAMETER Experiment Name: Zm_Drought_P Parameter: Plant Line Value: 35A19
  misc_feature: MA Experiment 20000479 PARAMETER Experiment Name: Zm_Drought_P Parameter: Timepoint (hr) Value: 48
  misc_feature: MA Experiment 20000479 PARAMETER Experiment Name: Zm_Drought_P Parameter: Tissue Value: Aerial
  misc_feature: MA Experiment 20000479 PARAMETER Experiment Name: Zm_Drought_P Parameter: Treatment Value: Drought vs. No Drought
  misc_feature: MA Experiment ID: 20000480 Result: Down-regulated in Transcription
  misc_feature: MA Experiment 20000480 PARAMETER Experiment Name: Zm_Drought_P Parameter: Age (day) Value: 11
  misc_feature: MA Experiment 20000480 PARAMETER Experiment Name: Zm_Drought_P Parameter: Organism Value: Zea mays
  misc_feature: MA Experiment 20000480 PARAMETER Experiment Name: Zm_Drought_P Parameter: Plant Line Value: 35A19
  misc_feature: MA Experiment 20000480 PARAMETER Experiment Name: Zm_Drought_P Parameter: Timepoint (hr) Value: 72
  misc_feature: MA Experiment 20000480 PARAMETER Experiment Name: Zm_Drought_P Parameter: Tissue Value: Aerial
  misc_feature: MA Experiment 20000480 PARAMETER Experiment Name: Zm_Drought_P Parameter: Treatment Value: Drought vs. No Drought
  misc_feature: MA Experiment ID: 20000488 Result: Down-regulated in Transcription
  misc_feature: MA Experiment 20000488 PARAMETER Experiment Name: Zm_50mM_NH4NO3_L_to_H_P Parameter: Organism Value: Zea mays
  misc_feature: MA Experiment 20000488 PARAMETER Experiment Name: Zm_50mM_NH4NO3_L_to_H_P Parameter: Timepoint (hr) Value: 8
  misc_feature: MA Experiment 20000488 PARAMETER Experiment Name: Zm_50mM_NH4NO3_L_to_H_P Parameter: Tissue Value: Leaves
  misc_feature: MA Experiment 20000488 PARAMETER Experiment Name: Zm_50mM_NH4NO3_L_to_H_P Parameter: Treatment Value: 50mM NH4NO3 vs. 100mM Mannitol
  misc_feature: MA Experiment ID: 20000492 Result: Down-regulated in Transcription
  misc_feature: MA Experiment 20000492 PARAMETER Experiment Name: Zm_Hybrid_Seed_Dev_P Parameter: DAP Value: 12
  misc_feature: MA Experiment 20000492 PARAMETER Experiment Name: Zm_Hybrid_Seed_Dev_P Parameter: Organism Value: Zea mays
  misc_feature: MA Experiment 20000492 PARAMETER Experiment Name: Zm_Hybrid_Seed_Dev_P Parameter: Plant Line Value: 35A19
  misc_feature: MA Experiment 20000492 PARAMETER Experiment Name: Zm_Hybrid_Seed_Dev_P Parameter: Tissue Value: Fert Kernel vs. Unfert Floret
  misc_feature: MA Experiment ID: 20000534 Result: Down-regulated in Transcription
  misc_feature: MA Experiment 20000534 PARAMETER Experiment Name: Zm_Hybrid_Pollen_P Parameter: Age (day) Value: 8
  misc_feature: MA Experiment 20000534 PARAMETER Experiment Name: Zm_Hybrid_Pollen_P Parameter: Organism Value: Zea mays
  misc_feature: MA Experiment 20000534 PARAMETER Experiment Name: Zm_Hybrid_Pollen_P Parameter: Plant Line Value: 35A19
  misc_feature: MA Experiment 20000534 PARAMETER Experiment Name: Zm_Hybrid_Pollen_P Parameter: Tissue Value: Pollen vs. Aerial
  misc_feature: MA Experiment ID: 20000535 Result: Down-regulated in Transcription
  misc_feature: MA Experiment 20000535 PARAMETER Experiment Name: Zm_Hybrid_Seed_Dev_P Parameter: DAP Value: 30 vs. 12
  misc_feature: MA Experiment 20000535 PARAMETER Experiment Name: Zm_Hybrid_Seed_Dev_P Parameter: Organism Value: Zea mays
  misc_feature: MA Experiment 20000535 PARAMETER Experiment Name: Zm_Hybrid_Seed_Dev_P Parameter: Plant Line Value: 35A19
  misc_feature: MA Experiment 20000535 PARAMETER Experiment Name: Zm_Hybrid_Seed_Dev_P Parameter: Tissue Value: Embryo vs. Unfert Floret
  misc_feature: MA Experiment ID: 20000626 Result: Down-regulated in Transcription
  misc_feature: MA Experiment 20000626 PARAMETER Experiment Name: Zm_Herbicide-Treatments_P Parameter: Timepoint (hr) Value: 12
  misc_feature: MA Experiment 20000626 PARAMETER Experiment Name: Zm_Herbicide-Treatments_P Parameter: Tissue Value: Aerial
  misc_feature: MA Experiment 20000626 PARAMETER Experiment Name: Zm_Herbicide-Treatments_P Parameter: Treatment Value: Roundup vs. No Treatment
  misc_feature: MA Experiment ID: 20001606 Result: Down-regulated in Transcription
  misc_feature: MA Experiment 20001606 PARAMETER Experiment Name: Zm_50ppm_KNO3_L-to-H_P Parameter: Age (day) Value: 19
  misc_feature: MA Experiment 20001606 PARAMETER Experiment Name: Zm_50ppm_KNO3_L-to-H_P Parameter: Organism Value: Zea mays
  misc_feature: MA Experiment 20001606 PARAMETER Experiment Name: Zm_50ppm_KNO3_L-to-H_P Parameter: Plant Line Value: 35A19
  misc_feature: MA Experiment 20001606 PARAMETER Experiment Name: Zm_50ppm_KNO3_L-to-H_P Parameter: Timepoint (hr) Value: 8
  misc_feature: MA Experiment 20001606 PARAMETER Experiment Name: Zm_50ppm_KNO3_L-to-H_P Parameter: Tissue Value: Shoots
  misc_feature: MA Experiment 20001606 PARAMETER Experiment Name: Zm_50ppm_KNO3_L-to-H_P Parameter: Treatment Value: 50ppm KNO3 vs. 50ppm KCl
  misc_feature: MA Experiment ID: 20001608 Result: Down-regulated in Transcription
  misc_feature: MA Experiment 20001608 PARAMETER Experiment Name: Zm_50ppm_KNO3_L-to-H_P Parameter: Age (day) Value: 21
  misc_feature: MA Experiment 20001608 PARAMETER Experiment Name: Zm_50ppm_KNO3_L-to-H_P Parameter: Organism Value: Zea mays
  misc_feature: MA Experiment 20001608 PARAMETER Experiment Name: Zm_50ppm_KNO3_L-to-H_P Parameter: Plant Line Value: 35A19
  misc_feature: MA Experiment 20001608 PARAMETER Experiment Name: Zm_50ppm_KNO3_L-to-H_P Parameter: Timepoint (hr) Value: 48
  misc_feature: MA Experiment 20001608 PARAMETER Experiment Name: Zm_50ppm_KNO3_L-to-H_P Parameter: Tissue Value: Shoots
  misc_feature: MA Experiment 20001608 PARAMETER Experiment Name: Zm_50ppm_KNO3_L-to-H_P Parameter: Treatment Value: 50ppm KNO3 vs. 50ppm KCl
accattgagccgagcatcctgcgagagcgagcaagagaatcacgacttataactagggttctccacaggtaccgagatacgaatagctagctaggatgatgctgcttgcactgcattctccatctaccggtaccgtcgcttggcgtcgtcgtcgtccggctccattacccgccatctcgcgccgcgctcgcattatccggccgtctccattcgctctgtccaccgcggcggccacggacacgagcaccggccatgccccggccacggccgatcgcgaggcgccgctactccagctcctccacagcggggtgcgggcagagtcgctgccgcggcacgtagggttggtgatcgatgggcacgcgagatgggcgcgcgccagggggctgtcggtgtcggagggccacgcggttgggcggcgcacggtggagcacacggtgcgactgtcgcgagcgtggggcatccgcgtgctcaccgtcttcgcctgctcccacgagaacatgacgacccgccccaaggcggagatggacttcttcatgcagctgtacgaggggtttatccgtgacaacgtcgaccagttctgcagggagggaatccggctgcatctcatcggcgactcgccgggattgccagcgtccctgctgcgcgcggcgagggaagccaaccagctggccacgcagagcgagtcggagatggtcctgatgctggccatgggctacagcgggcggcgggacatactgcgggcgtgccaagagctcgccacggaggtgcagcggaacctgctgaggccagaggacatcgacgaggcgctcatcgccgggaagctggggaccagtatcgccggcggcgagctctcttaccccgacctggtcatcaggaccagcggcgagctgcggctgagcaacttcctgctgtggcagtccgcattcgcggagctcttcttctctgacgtcatgtggccggattttggggaggacgagtacctcggggccttgcgttcctaccagaccagacaacggcgcttcggccaacgaaagtagagctcacttcttcttcttttttcctttcaaaatacaacaaacgaggaaataaaaagctacatcactactatatagatttgattc

SEQ ID NO: 18517 - protein, 313 aa, Zea mays subsp. mays
  peptide (1)..(313): Ceres Seq. ID no. 12359076
  misc_feature (84)..(310): Pfam Name: Putative undecaprenyl diphosphate synthase Pfam Description: Putative undecaprenyl diphosphate synthase
  misc_feature (71)..(312): Homolog of NCBI NO: 7447521 NR Description: hypothetical protein At2g23410 [imported] -
  misc_feature (77)..(312): Homolog of NCBI NO: 18424148 NR Description: dehydrodolichyl diphosphate synthase (DEDOL-PP
  misc_feature (77)..(312): Homolog of NCBI NO: 8843800 NR Description: cis-prenyltransferase homolog-like
  misc_feature (75)..(313): Homolog of NCBI NO: 17230924 NR Description: undecaprenyl pyrophosphate synthetase [Nostoc sp.
  misc_feature (75)..(311): Homolog of NCBI NO: 22299306 NR Description: undecaprenyl pyrophosphate synthetase
  misc_feature (77)..(310): Homolog of NCBI NO: 16078716 NR Description: similar to hypothetical proteins [Bacillus
  misc_feature (64)..(311): Homolog of NCBI NO: 37519677 NR Description: undecaprenyl pyrophosphate synthetase
  misc_feature (72)..(312): Homolog of NCBI NO: 18424144 NR Description: dehydrodolichyl diphosphate synthase (DEDOL-PP
  misc_feature (58)..(313): Homolog of NCBI NO: 15237748 NR Description: dehydrodolichyl diphosphate synthase (DEDOL-PP
  misc_feature (62)..(313): Homolog of NCBI NO: 34908428 NR Description: putative undecaprenyl pyrophosphate synthetase
MMLLALHSPSTGTVAWRRRRPAPLPAISRRARIIRPSPFALSTAAATDTSTGHAPATADREAPLLQLLHSGVRAESLPRHVGLVIDGHARWARARGLSVSEGHAVGRRTVEHTVRLSRAWGIRVLTVFACSHENMTTRPKAEMDFFMQLYEGFIRDNVDQFCREGIRLHLIGDSPGLPASLLRAAREANQLATQSESEMVLMLAMGYSGRRDILRACQELATEVQRNLLRPEDIDEALIAGKLGTSIAGGELSYPDLVIRTSGELRLSNFLLWQSAFAELFFSDVMWPDFGEDEYLGALRSYQTRQRRFGQRK

SEQ ID NO: 18518 - protein, 312 aa, Zea mays subsp. mays
  peptide (1)..(312): Ceres Seq. ID no. 12359077
  misc_feature (83)..(309): Pfam Name: Putative undecaprenyl diphosphate synthase Pfam Description: Putative undecaprenyl diphosphate synthase
  misc_feature (63)..(310): Homolog of NCBI NO: 37519677 NR Description: undecaprenyl pyrophosphate synthetase
  misc_feature (71)..(311): Homolog of NCBI NO: 18424144 NR Description: dehydrodolichyl diphosphate synthase (DEDOL-PP
  misc_feature (70)..(311): Homolog of NCBI NO: 7447521 NR Description: hypothetical protein At2g23410 [imported] -
  misc_feature (76)..(311): Homolog of NCBI NO: 8843800 NR Description: cis-prenyltransferase homolog-like
  misc_feature (74)..(310): Homolog of NCBI NO: 22299306 NR Description: undecaprenyl pyrophosphate synthetase
  misc_feature (76)..(309): Homolog of NCBI NO: 16078716 NR Description: similar to hypothetical proteins [Bacillus
  misc_feature (74)..(312): Homolog of NCBI NO: 17230924 NR Description: undecaprenyl pyrophosphate synthetase [Nostoc sp.
  misc_feature (76)..(311): Homolog of NCBI NO: 18424148 NR Description: dehydrodolichyl diphosphate synthase (DEDOL-PP
  misc_feature (57)..(312): Homolog of NCBI NO: 15237748 NR Description: dehydrodolichyl diphosphate synthase (DEDOL-PP
  misc_feature (61)..(312): Homolog of NCBI NO: 34908428 NR Description: putative undecaprenyl pyrophosphate synthetase
MLLALHSPSTGTVAWRRRRPAPLPAISRRARIIRPSPFALSTAAATDTSTGHAPATADREAPLLQLLHSGVRAESLPRHVGLVIDGHARWARARGLSVSEGHAVGRRTVEHTVRLSRAWGIRVLTVFACSHENMTTRPKAEMDFFMQLYEGFIRDNVDQFCREGIRLHLIGDSPGLPASLLRAAREANQLATQSESEMVLMLAMGYSGRRDILRACQELATEVQRNLLRPEDIDEALIAGKLGTSIAGGELSYPDLVIRTSGELRLSNFLLWQSAFAELFFSDVMWPDFGEDEYLGALRSYQTRQRRFGQRK

SEQ ID NO: 18519 - protein, 179 aa, Zea mays subsp. mays
  peptide (1)..(179): Ceres Seq. ID no. 12359078
  misc_feature (1)..(176): Pfam Name: Putative undecaprenyl diphosphate synthase Pfam Description: Putative undecaprenyl diphosphate synthase
  misc_feature (1)..(178): Homolog of NCBI NO: 7447521 NR Description: hypothetical protein At2g23410 [imported] -
  misc_feature (1)..(178): Homolog of NCBI NO: 18424148 NR Description: dehydrodolichyl diphosphate synthase (DEDOL-PP
  misc_feature (1)..(178): Homolog of NCBI NO: 8843800 NR Description: cis-prenyltransferase homolog-like
  misc_feature (1)..(179): Homolog of NCBI NO: 17230924 NR Description: undecaprenyl pyrophosphate synthetase [Nostoc sp.
  misc_feature (1)..(177): Homolog of NCBI NO: 22299306 NR Description: undecaprenyl pyrophosphate synthetase
  misc_feature (1)..(176): Homolog of NCBI NO: 16078716 NR Description: similar to hypothetical proteins [Bacillus
  misc_feature (1)..(177): Homolog of NCBI NO: 37519677 NR Description: undecaprenyl pyrophosphate synthetase
  misc_feature (1)..(178): Homolog of NCBI NO: 18424144 NR Description: dehydrodolichyl diphosphate synthase (DEDOL-PP
  misc_feature (1)..(179): Homolog of NCBI NO: 15237748 NR Description: dehydrodolichyl diphosphate synthase (DEDOL-PP
  misc_feature (1)..(179): Homolog of NCBI NO: 34908428 NR Description: putative undecaprenyl pyrophosphate synthetase
MTTRPKAEMDFFMQLYEGFIRDNVDQFCREGIRLHLIGDSPGLPASLLRAAREANQLATQSESEMVLMLAMGYSGRRDILRACQELATEVQRNLLRPEDIDEALIAGKLGTSIAGGELSYPDLVIRTSGELRLSNFLLWQSAFAELFFSDVMWPDFGEDEYLGALRSYQTRQRRFGQRK

SEQ ID NO: 18520 - DNA, 922 bp, Zea mays subsp. mays
  misc_feature (1)..(922): Ceres Seq. ID no. 12358505
  misc_feature: MA Experiment ID: 108515 Result: Up-regulated in Transcription
  misc_feature: MA Experiment 108515 PARAMETER Experiment Name: Zm_2mM_SA_P Parameter: Age (day) Value: 8
  misc_feature: MA Experiment 108515 PARAMETER Experiment Name: Zm_2mM_SA_P Parameter: Organism Value: Zea mays
  misc_feature: MA Experiment 108515 PARAMETER Experiment Name: Zm_2mM_SA_P Parameter: Plant Line Value: 35A19
  misc_feature: MA Experiment 108515 PARAMETER Experiment Name: Zm_2mM_SA_P Parameter: Timepoint (hr) Value: 12
  misc_feature: MA Experiment 108515 PARAMETER Experiment Name: Zm_2mM_SA_P Parameter: Tissue Value: Aerial
  misc_feature: MA Experiment 108515 PARAMETER Experiment Name: Zm_2mM_SA_P Parameter: Treatment Value: 2mM SA vs. No Treatment
  misc_feature: MA Experiment ID: 108523 Result: Down-regulated in Transcription
  misc_feature: MA Experiment 108523 PARAMETER Experiment Name: Zm_42deg_Heat_P Parameter: Age (day) Value: 8
  misc_feature: MA Experiment 108523 PARAMETER Experiment Name: Zm_42deg_Heat_P Parameter: Organism Value: Zea mays
  misc_feature: MA Experiment 108523 PARAMETER Experiment Name: Zm_42deg_Heat_P Parameter: Plant Line Value: 35A19
  misc_feature: MA Experiment 108523 PARAMETER Experiment Name: Zm_42deg_Heat_P Parameter: Temperature (deg C) Value: 42 vs. 22
  misc_feature: MA Experiment 108523 PARAMETER Experiment Name: Zm_42deg_Heat_P Parameter: Timepoint (hr) Value: 6
  misc_feature: MA Experiment 108523 PARAMETER Experiment Name: Zm_42deg_Heat_P Parameter: Tissue Value: Aerial
  misc_feature: MA Experiment ID: 108528 Result: Down-regulated in Transcription
  misc_feature: MA Experiment 108528 PARAMETER Experiment Name: Zm_Imbibed_Seeds_P Parameter: Age (day) Value: 5 vs. 2
  misc_feature: MA Experiment 108528 PARAMETER Experiment Name: Zm_Imbibed_Seeds_P Parameter: Organism Value: Zea mays
  misc_feature: MA Experiment 108528 PARAMETER Experiment Name: Zm_Imbibed_Seeds_P Parameter: Plant Line Value: 35A19
  misc_feature: MA Experiment 108528 PARAMETER Experiment Name: Zm_Imbibed_Seeds_P Parameter: Tissue Value: Aerial vs. Embryo
  misc_feature: MA Experiment ID: 108542 Result: Down-regulated in Transcription
  misc_feature: MA Experiment 108542 PARAMETER Experiment Name: Zm_150mM_NaCl_P Parameter: Age (day) Value: 8
  misc_feature: MA Experiment 108542 PARAMETER Experiment Name: Zm_150mM_NaCl_P Parameter: Organism Value: Zea mays
  misc_feature: MA Experiment 108542 PARAMETER Experiment Name: Zm_150mM_NaCl_P Parameter: Plant Line Value: 35A19
  misc_feature: MA Experiment 108542 PARAMETER Experiment Name: Zm_150mM_NaCl_P Parameter: Timepoint (hr) Value: 6
  misc_feature: MA Experiment 108542 PARAMETER Experiment Name: Zm_150mM_NaCl_P Parameter: Tissue Value: Aerial
  misc_feature: MA Experiment 108542 PARAMETER Experiment Name: Zm_150mM_NaCl_P Parameter: Treatment Value: 150mM NaCl vs. No Treatment
  misc_feature: MA Experiment ID: 108545 Result: Down-regulated in Transcription
  misc_feature: MA Experiment 108545 PARAMETER Experiment Name: Zm_Imbibed_Seeds_P Parameter: Age (day) Value: 3 vs. 2
  misc_feature: MA Experiment 108545 PARAMETER Experiment Name: Zm_Imbibed_Seeds_P Parameter: Organism Value: Zea mays
  misc_feature: MA Experiment 108545 PARAMETER Experiment Name: Zm_Imbibed_Seeds_P Parameter: Plant Line Value: 35A19
  misc_feature: MA Experiment 108545 PARAMETER Experiment Name: Zm_Imbibed_Seeds_P Parameter: Tissue Value: Aerial vs. Embryo
  misc_feature: MA Experiment ID: 108547 Result: Down-regulated in Transcription
  misc_feature: MA Experiment 108547 PARAMETER Experiment Name: Zm_Imbibed_Seeds_P Parameter: Age (day) Value: 4 vs. 2
  misc_feature: MA Experiment 108547 PARAMETER Experiment Name: Zm_Imbibed_Seeds_P Parameter: Organism Value: Zea mays
  misc_feature: MA Experiment 108547 PARAMETER Experiment Name: Zm_Imbibed_Seeds_P Parameter: Plant Line Value: 35A19
  misc_feature: MA Experiment 108547 PARAMETER Experiment Name: Zm_Imbibed_Seeds_P Parameter: Tissue Value: Aerial vs. Embryo
  misc_feature: MA Experiment ID: 108548 Result: Up-regulated in Transcription
  misc_feature: MA Experiment 108548 PARAMETER Experiment Name: Zm_20uM_KNO3_H-to-L_P Parameter: Age (day) Value: 11
  misc_feature: MA Experiment 108548 PARAMETER Experiment Name: Zm_20uM_KNO3_H-to-L_P Parameter: Organism Value: Zea mays
  misc_feature: MA Experiment 108548 PARAMETER Experiment Name: Zm_20uM_KNO3_H-to-L_P Parameter: Plant Line Value: 35A19
  misc_feature: MA Experiment 108548 PARAMETER Experiment Name: Zm_20uM_KNO3_H-to-L_P Parameter: Timepoint (hr) Value: 4
  misc_feature: MA Experiment 108548 PARAMETER Experiment Name: Zm_20uM_KNO3_H-to-L_P Parameter: Tissue Value: Roots
  misc_feature: MA Experiment 108548 PARAMETER Experiment Name: Zm_20uM_KNO3_H-to-L_P Parameter: Treatment Value: 20uM KNO3 vs. 60mM KNO3
  misc_feature: MA Experiment ID: 108689 Result: Down-regulated in Transcription
  misc_feature: MA Experiment 108689 PARAMETER Experiment Name: Zm_Drought_Roots_P Parameter: Age (day) Value: 9
  misc_feature: MA Experiment 108689 PARAMETER Experiment Name: Zm_Drought_Roots_P Parameter: Organism Value: Zea mays
  misc_feature: MA Experiment 108689 PARAMETER Experiment Name: Zm_Drought_Roots_P Parameter: Plant Line Value: 35A19
  misc_feature: MA Experiment 108689 PARAMETER Experiment Name: Zm_Drought_Roots_P Parameter: Timepoint (hr) Value: 24
  misc_feature: MA Experiment 108689 PARAMETER Experiment Name: Zm_Drought_Roots_P Parameter: Tissue Value: Roots
  misc_feature: MA Experiment 108689 PARAMETER Experiment Name: Zm_Drought_Roots_P Parameter: Treatment Value: Drought vs. No Drought
  misc_feature: MA Experiment ID: 20000478 Result: Up-regulated in Transcription
  misc_feature: MA Experiment 20000478 PARAMETER Experiment Name: Zm_5mM_SA_P Parameter: Age (day) Value: 11
  misc_feature: MA Experiment 20000478 PARAMETER Experiment Name: Zm_5mM_SA_P Parameter: Organism Value: Zea mays
  misc_feature: MA Experiment 20000478 PARAMETER Experiment Name: Zm_5mM_SA_P Parameter: Plant Line Value: 35A19
  misc_feature: MA Experiment 20000478 PARAMETER Experiment Name: Zm_5mM_SA_P Parameter: Timepoint (hr) Value: 72
  misc_feature: MA Experiment 20000478 PARAMETER Experiment Name: Zm_5mM_SA_P Parameter: Tissue Value: Aerial
  misc_feature: MA Experiment 20000478 PARAMETER Experiment Name: Zm_5mM_SA_P Parameter: Treatment Value: 5mM SA vs. No Treatment
  misc_feature: MA Experiment ID: 20000488 Result: Down-regulated in Transcription
  misc_feature: MA Experiment 20000488 PARAMETER Experiment Name: Zm_50mM_NH4NO3_L_to_H_P Parameter: Organism Value: Zea mays
  misc_feature: MA Experiment 20000488 PARAMETER Experiment Name: Zm_50mM_NH4NO3_L_to_H_P Parameter: Timepoint (hr) Value: 8
  misc_feature: MA Experiment 20000488 PARAMETER Experiment Name: Zm_50mM_NH4NO3_L_to_H_P Parameter: Tissue Value: Leaves
  misc_feature: MA Experiment 20000488 PARAMETER Experiment Name: Zm_50mM_NH4NO3_L_to_H_P Parameter: Treatment Value: 50mM NH4NO3 vs. 100mM Mannitol
  misc_feature: MA Experiment ID: 20000627 Result: Up-regulated in Transcription
  misc_feature: MA Experiment 20000627 PARAMETER Experiment Name: Zm_Herbicide-Treatments_P Parameter: Timepoint (hr) Value: 12
  misc_feature: MA Experiment 20000627 PARAMETER Experiment Name: Zm_Herbicide-Treatments_P Parameter: Tissue Value: Aerial
  misc_feature: MA Experiment 20000627 PARAMETER Experiment Name: Zm_Herbicide-Treatments_P Parameter: Treatment Value: Finale vs. No Treatment
  misc_feature: MA Experiment ID: 20000629 Result: Up-regulated in Transcription
  misc_feature: MA Experiment 20000629 PARAMETER Experiment Name: Zm_Herbicide-Treatments_P Parameter: Timepoint (hr) Value: 12
  misc_feature: MA Experiment 20000629 PARAMETER Experiment Name: Zm_Herbicide-Treatments_P Parameter: Tissue Value: Aerial
  misc_feature: MA Experiment 20000629 PARAMETER Experiment Name: Zm_Herbicide-Treatments_P Parameter: Treatment Value: Trimec vs. No Treatment
  misc_feature: MA Experiment ID: 20000630 Result: Up-regulated in Transcription
  misc_feature: MA Experiment 20000630 PARAMETER Experiment Name: Zm_Herbicide-Treatments_P Parameter: Timepoint (hr) Value: 4
  misc_feature: MA Experiment 20000630 PARAMETER Experiment Name: Zm_Herbicide-Treatments_P Parameter: Tissue Value: Aerial
  misc_feature: MA Experiment 20000630 PARAMETER Experiment Name: Zm_Herbicide-Treatments_P Parameter: Treatment Value: Roundup vs. No Treatment
  misc_feature: MA Experiment ID: 20000633 Result: Up-regulated in Transcription
  misc_feature: MA Experiment 20000633 PARAMETER Experiment Name: Zm_Herbicide-Treatments_P Parameter: Timepoint (hr) Value: 4
  misc_feature: MA Experiment 20000633 PARAMETER Experiment Name: Zm_Herbicide-Treatments_P Parameter: Tissue Value: Aerial
  misc_feature: MA Experiment 20000633 PARAMETER Experiment Name: Zm_Herbicide-Treatments_P Parameter: Treatment Value: Trimec vs. No Treatment
  misc_feature: MA Experiment ID: 20001613 Result: Down-regulated in Transcription
  misc_feature: MA Experiment 20001613 PARAMETER Experiment Name: Zm_50ppm_KNO3_L-to-H_P Parameter: Age (day) Value: 20
  misc_feature: MA Experiment 20001613 PARAMETER Experiment Name: Zm_50ppm_KNO3_L-to-H_P Parameter: Organism Value: Zea mays
  misc_feature: MA Experiment 20001613 PARAMETER Experiment Name: Zm_50ppm_KNO3_L-to-H_P Parameter: Plant Line Value: 35A19
  misc_feature: MA Experiment 20001613 PARAMETER Experiment Name: Zm_50ppm_KNO3_L-to-H_P Parameter: Timepoint (hr) Value: 24
  misc_feature: MA Experiment 20001613 PARAMETER Experiment Name: Zm_50ppm_KNO3_L-to-H_P Parameter: Tissue Value: Roots
  misc_feature: MA Experiment 20001613 PARAMETER Experiment Name: Zm_50ppm_KNO3_L-to-H_P Parameter: Treatment Value: 50ppm KNO3 vs. 50ppm KCl
ccggcagtctgcgatcaaaccgcacgcaagcgaaccacagcgtgctcgccatctcactgactgtgacgacggcaacaagccagtgagcagctcgccatggcagcagtgtccaccgcgccggcgctcgaaggccgcatcgcgctcgtcaccggcggctcccggggcatcggccgcgaggtgtcgtcccacctcgccgcgctcggcgcgcgtgtcgtggtcaactacgccaccaacccggccaaggccgaggagctcgtcgcggagctcgcctcgcgcggcctccgcgccgtggccgtgcgcgcggacgtctccgatccggacgccgtgcgcgcgctcttcgaccgcgccgaggaggccttcgggtccccgccccacgtagtggtcgcctgcgcgggcatcatggacgccaagtaccccgcgctggtcgacactgccgtcgaggacttcgacgccacgttcgcggtgaacacgcgcggcaagttcctggtgtgccgggaggccgcccggcgcatcccccccaacagcggtgggcgcatcgtgacgttctcgtccacgacggttgccgtgctgccgccgggctacgcggcgtacgctgcgtccaacgccgctgtggaggcgatgacgaaggtcctggccaaggaggtggcgccgaaggggatcacggccaacgtggtggcgccgggccctgtgcgcacggagctcttccttgccgggaaggatgaggcgttcctagagagggtaaagaactccatgcgtatagccgagacgacagacatagcgcccgtggtggcgttcctggcgagcgaggcctcgggctgggtgaacgggcaggttatcagggtcaatgggggcgtcgcatgagtgcggcgttgttattattacctcattatctgccatggctttccaaggatgttgttttcct

SEQ ID NO: 18521 - protein, 254 aa, Zea mays subsp. mays
  peptide (1)..(254): Ceres Seq. ID no. 12358506
  misc_feature (10)..(252): Homolog of NCBI NO: 1711355 NR Description: SHORT-CHAIN TYPE DEHYDROGENASE/REDUCTASE
  misc_feature (1)..(252): Homolog of NCBI NO: 30679011 NR Description: short-chain type dehydrogenase/reductase -related
  misc_feature (1)..(252): Homolog of NCBI NO: 18087667 NR Description: putative dehydrogenase [Oryza sativa]
  misc_feature (5)..(251): Homolog of NCBI NO: 9758903 NR Description: Brn1-like protein [Arabidopsis thaliana]
  misc_feature (2)..(252): Homolog of NCBI NO: 15229203 NR Description: putative short-chain type dehydrogenase/reductase
  misc_feature (1)..(252): Homolog of NCBI NO: 34395019 NR Description: putative short-chain dehydrogenase/reductase
  misc_feature (5)..(252): Homolog of NCBI NO: 15235621 NR Description: short-chain alcohol dehydrogenase like protein
  misc_feature (5)..(252): Homolog of NCBI NO: 34393370 NR Description: putative short-chain dehydrogenase/reductase
  misc_feature (1)..(254): Homolog of NCBI NO: 34395018 NR Description: putative short-chain dehydrogenase/reductase
  misc_feature (1)..(254): Homolog of NCBI NO: 37534988 NR Description: putative short-chain alcohol dehydrogenase
MAAVSTAPALEGRIALVTGGSRGIGREVSSHLAALGARVVVNYATNPAKAEELVAELASRGLRAVAVRADVSDPDAVRALFDRAEEAFGSPPHVVVACAGIMDAKYPALVDTAVEDFDATFAVNTRGKFLVCREAARRIPPNSGGRIVTFSSTTVAVLPPGYAAYAASNAAVEAMTKVLAKEVAPKGITANVVAPGPVRTELFLAGKDEAFLERVKNSMRIAETTDIAPVVAFLASEASGWVNGQVIRVNGGVA

SEQ ID NO: 18522 - protein, 153 aa, Zea mays subsp. mays
  peptide (1)..(153): Ceres Seq. ID no. 12358507
  misc_feature (1)..(151): Homolog of NCBI NO: 1711355 NR Description: SHORT-CHAIN TYPE DEHYDROGENASE/REDUCTASE
  misc_feature (1)..(151): Homolog of NCBI NO: 30679011 NR Description: short-chain type dehydrogenase/reductase -related
  misc_feature (1)..(151): Homolog of NCBI NO: 18087667 NR Description: putative dehydrogenase [Oryza sativa]
  misc_feature (1)..(150): Homolog of NCBI NO: 9758903 NR Description: Brn1-like protein [Arabidopsis thaliana]
  misc_feature (1)..(151): Homolog of NCBI NO: 15229203 NR Description: putative short-chain type dehydrogenase/reductase
  misc_feature (1)..(151): Homolog of NCBI NO: 34395019 NR Description: putative short-chain dehydrogenase/reductase
  misc_feature (1)..(151): Homolog of NCBI NO: 15235621 NR Description: short-chain alcohol dehydrogenase like protein
  misc_feature (1)..(151): Homolog of NCBI NO: 34393370 NR Description: putative short-chain dehydrogenase/reductase
  misc_feature (1)..(153): Homolog of NCBI NO: 34395018 NR Description: putative short-chain dehydrogenase/reductase
  misc_feature (1)..(153): Homolog of NCBI NO: 37534988 NR Description: putative short-chain alcohol dehydrogenase
MDAKYPALVDTAVEDFDATFAVNTRGKFLVCREAARRIPPNSGGRIVTFSSTTVAVLPPGYAAYAASNAAVEAMTKVLAKEVAPKGITANVVAPGPVRTELFLAGKDEAFLERVKNSMRIAETTDIAPVVAFLASEASGWVNGQVIRVNGGVA

SEQ ID NO: 18523 - DNA, 1521 bp, Zea mays subsp. mays
  misc_feature (1)..(1521): Ceres Seq. ID no. 12375567
  misc_feature: MA Experiment ID: 108529 Result: Up-regulated in Transcription
  misc_feature: MA Experiment 108529 PARAMETER Experiment Name: Zm_Imbibed_Seeds_P Parameter: Age (day) Value: 5 vs. 2
  misc_feature: MA Experiment 108529 PARAMETER Experiment Name: Zm_Imbibed_Seeds_P Parameter: Organism Value: Zea mays
  misc_feature: MA Experiment 108529 PARAMETER Experiment Name: Zm_Imbibed_Seeds_P Parameter: Plant Line Value: 35A19
  misc_feature: MA Experiment 108529 PARAMETER Experiment Name: Zm_Imbibed_Seeds_P Parameter: Tissue Value: Roots vs. Embryo
  misc_feature: MA Experiment ID: 108530 Result: Up-regulated in Transcription
  misc_feature: MA Experiment 108530 PARAMETER Experiment Name: Zm_Imbibed_Seeds_P Parameter: Age (day) Value: 6 vs. 2
  misc_feature: MA Experiment 108530 PARAMETER Experiment Name: Zm_Imbibed_Seeds_P Parameter: Organism Value: Zea mays
  misc_feature: MA Experiment 108530 PARAMETER Experiment Name: Zm_Imbibed_Seeds_P Parameter: Plant Line Value: 35A19
  misc_feature: MA Experiment 108530 PARAMETER Experiment Name: Zm_Imbibed_Seeds_P Parameter: Tissue Value: Aerial vs. Embryo
  misc_feature: MA Experiment ID: 108534 Result: Up-regulated in Transcription
  misc_feature: MA Experiment 108534 PARAMETER Experiment Name: Zm_4deg_Cold_P Parameter: Age (hr) Value: 8
  misc_feature: MA Experiment 108534 PARAMETER Experiment Name: Zm_4deg_Cold_P Parameter: Organism Value: Zea mays
  misc_feature: MA Experiment 108534 PARAMETER Experiment Name: Zm_4deg_Cold_P Parameter: Plant Line Value: 35A19
  misc_feature: MA Experiment 108534 PARAMETER Experiment Name: Zm_4deg_Cold_P Parameter: Temperature (deg C) Value: 4 vs. 22
  misc_feature: MA Experiment 108534 PARAMETER Experiment Name: Zm_4deg_Cold_P Parameter: Timepoint (hr) Value: 6
  misc_feature: MA Experiment 108534 PARAMETER Experiment Name: Zm_4deg_Cold_P Parameter: Tissue Value: Aerial
  misc_feature: MA Experiment ID: 108535 Result: Down-regulated in Transcription
  misc_feature: MA Experiment 108535 PARAMETER Experiment Name: Zm_Meristem_P Parameter: Age (day) Value: 8
  misc_feature: MA Experiment 108535 PARAMETER Experiment Name: Zm_Meristem_P Parameter: Organism Value: Zea mays
  misc_feature: MA Experiment 108535 PARAMETER Experiment Name: Zm_Meristem_P Parameter: Plant Line Value: 35A19
  misc_feature: MA Experiment 108535 PARAMETER Experiment Name: Zm_Meristem_P Parameter: Tissue Value: Root Meristem vs. Above Root Meristem
  misc_feature: MA Experiment ID: 108559 Result: Down-regulated in Transcription
  misc_feature: MA Experiment 108559 PARAMETER Experiment Name: Zm_5mM_NO_P Parameter: Age (day) Value: 8
  misc_feature: MA Experiment 108559 PARAMETER Experiment Name: Zm_5mM_NO_P Parameter: Organism Value: Zea mays
  misc_feature: MA Experiment 108559 PARAMETER Experiment Name: Zm_5mM_NO_P Parameter: Plant Line Value: 35A19
  misc_feature: MA Experiment 108559 PARAMETER Experiment Name: Zm_5mM_NO_P Parameter: Timepoint (hr) Value: 12
  misc_feature: MA Experiment 108559 PARAMETER Experiment Name: Zm_5mM_NO_P Parameter: Tissue Value: Aerial
  misc_feature: MA Experiment 108559 PARAMETER Experiment Name: Zm_5mM_NO_P Parameter: Treatment Value: 5mM NO vs. No Treatment
  misc_feature: MA Experiment ID: 20000492 Result: Down-regulated in Transcription
  misc_feature: MA Experiment 20000492 PARAMETER Experiment Name: Zm_Hybrid_Seed_Dev_P Parameter: DAP Value: 12
  misc_feature: MA Experiment 20000492 PARAMETER Experiment Name: Zm_Hybrid_Seed_Dev_P Parameter: Organism Value: Zea mays
  misc_feature: MA Experiment 20000492 PARAMETER Experiment Name: Zm_Hybrid_Seed_Dev_P Parameter: Plant Line Value: 35A19
  misc_feature: MA Experiment 20000492 PARAMETER Experiment Name: Zm_Hybrid_Seed_Dev_P Parameter: Tissue Value: Fert Kernel vs. Unfert Floret
  misc_feature: MA Experiment ID: 20000535 Result: Down-regulated in Transcription
  misc_feature: MA Experiment 20000535 PARAMETER Experiment Name: Zm_Hybrid_Seed_Dev_P Parameter: DAP Value: 30 vs. 12
  misc_feature: MA Experiment 20000535 PARAMETER Experiment Name: Zm_Hybrid_Seed_Dev_P Parameter: Organism Value: Zea mays
  misc_feature: MA Experiment 20000535 PARAMETER Experiment Name: Zm_Hybrid_Seed_Dev_P Parameter: Plant Line Value: 35A19
  misc_feature: MA Experiment 20000535 PARAMETER Experiment Name: Zm_Hybrid_Seed_Dev_P Parameter: Tissue Value: Embryo vs. Unfert Floret
  misc_feature: MA Experiment ID: 20000630 Result: Down-regulated in Transcription
  misc_feature: MA Experiment 20000630 PARAMETER Experiment Name: Zm_Herbicide-Treatments_P Parameter: Timepoint (hr) Value: 4
  misc_feature: MA Experiment 20000630 PARAMETER Experiment Name: Zm_Herbicide-Treatments_P Parameter: Tissue Value: Aerial
  misc_feature: MA Experiment 20000630 PARAMETER Experiment Name: Zm_Herbicide-Treatments_P Parameter: Treatment Value: Roundup vs. No Treatment
gcacgagaccattacctagaacatcctaatcaaaaagcgaaaccatcagcggattacataagccgacaggcaccggtcgttgcgtcttgctcatcagaacgctagctaggactaggagaagcttaacctctgcaaccaccgataagagttactactatttacataggagcggcagctgctaccgcgtgcgccggcgatggggtggtgggagaacgccaagagcgtgttcggcgacgccgggaacgtcggctgcttcccgaggatcgggaggaagcagtccaagaactcgtacgctttcccggcggatcctgggagcgagaaacggagagggtcaggcggccccgcccccgccccggaggaggtgatcacggtggaggtgccggaggtgcgcctgcgcgagctgaacgagatcacggcgtccttctcaggcgagaagctgatcgggcaagggtcctacgccaaggtctaccaggccacgacgcggaccggcaggctggccgtcgtcaagcggctggagaagccctccaagcacgcgtccaacgacgtcttcctcaagcagctcggggtggcgtccaggctcaagcacgacaacttcgtccgcctgctcgggtacaccatcagcggcgacctccgcgtgctggtctacgagttcgccaccatgggcaccctccacgacgtgcttcacggggacagggatgtgctgaggctaccgccgccggagcagctgggcagcgccgccaggccggtgctgagctggattcaccgcgtgcacatcgcgctggatgcggcgagggggctggagtacctgcacgagatggtgcagccgccggtgacgcacaaggacgtgcgctccaccaacgtcctgctgttcgacggcttcagggccaagatcgccgactacaacatgttcagccaggccgcggacatggccaggctcaaccgctccacgcacacgctcggttccttcggctaccaggcgcccgagtacgccatgacgggccagatgacggacaagagcgacgtgtacagcttcggcatcgttctcctggagctcctgacgggtaggaagccattggaccggacgctgccgccgggccagcgaagcctggtgaactgggcaactccgatgctgacggaagacagggttcaggaatgcatcgatccgcaacttggtgatcagtatcctcctgctggagctgtcaagctcgggcgaatcgcggtgcagtgcctgcagtacgaccccaccttccggccgtccatgggcaccgtcgcccgcgtcatcaactacgccgtcttgcgagaccagcagggcgtcgtctgatttgatggcatgccgaattttgctactatagctgtgaatatcatgcatgtcttgctgtgctatatgttatgtaagctgagcagcggttattatctgagaatggatactatccttggaagcagcacggaatggttgcggttacgaccatgcataaaacaatgggctagtttgtaatatcaatatatttttctctgagaatg

SEQ ID NO: 18524 - protein, 374 aa, Zea mays subsp. mays
  peptide (1)..(374): Ceres Seq. ID no. 12375568
  misc_feature (1)..(374): Homolog of NCBI NO: 38345233 NR Description: OSJNBa0084K20.11 [Oryza sativa (japonica
MGWWENAKSVFGDAGNVGCFPRIGRKQSKNSYAFPADPGSEKRRGSGGPAPAPEEVITVEVPEVRLRELNEITASFSGEKLIGQGSYAKVYQATTRTGRLAVVKRLEKPSKHASNDVFLKQLGVASRLKHDNFVRLLGYTISGDLRVLVYEFATMGTLHDVLHGDRDVLRLPPPEQLGSAARPVLSWIHRVHIALDAARGLEYLHEMVQPPVTHKDVRSTNVLLFDGFRAKIADYNMFSQAADMARLNRSTHTLGSFGYQAPEYAMTGQMTDKSDVYSFGIVLLELLTGRKPLDRTLPPGQRSLVNWATPMLTEDRVQECIDPQLGDQYPPAGAVKLGRIAVQCLQYDPTFRPSMGTVARVINYAVLRDQQGVV

SEQ ID NO: 18525 - protein, 220 aa, Zea mays subsp. mays
  peptide (1)..(220): Ceres Seq. ID no. 12375569
  misc_feature (1)..(220): Homolog of NCBI NO: 38345233 NR Description: OSJNBa0084K20.11 [Oryza sativa (japonica
MGTLHDVLHGDRDVLRLPPPEQLGSAARPVLSWIHRVHIALDAARGLEYLHEMVQPPVTHKDVRSTNVLLFDGFRAKIADYNMFSQAADMARLNRSTHTLGSFGYQAPEYAMTGQMTDKSDVYSFGIVLLELLTGRKPLDRTLPPGQRSLVNWATPMLTEDRVQECIDPQLGDQYPPAGAVKLGRIAVQCLQYDPTFRPSMGTVARVINYAVLRDQQGVV

SEQ ID NO: 18526 - DNA, 1336 bp, Zea mays subsp. mays
  misc_feature (1)..(1336): Ceres Seq. ID no. 12376632
  misc_feature: MA Experiment ID: 108529 Result: Up-regulated in Transcription
  misc_feature: MA Experiment 108529 PARAMETER Experiment Name: Zm_Imbibed_Seeds_P Parameter: Age (day) Value: 5 vs. 2
  misc_feature: MA Experiment 108529 PARAMETER Experiment Name: Zm_Imbibed_Seeds_P Parameter: Organism Value: Zea mays
  misc_feature: MA Experiment 108529 PARAMETER Experiment Name: Zm_Imbibed_Seeds_P Parameter: Plant Line Value: 35A19
  misc_feature: MA Experiment 108529 PARAMETER Experiment Name: Zm_Imbibed_Seeds_P Parameter: Tissue Value: Roots vs. Embryo
  misc_feature: MA Experiment ID: 108689 Result: Down-regulated in Transcription
  misc_feature: MA Experiment 108689 PARAMETER Experiment Name: Zm_Drought_Roots_P Parameter: Age (day) Value: 9
  misc_feature: MA Experiment 108689 PARAMETER Experiment Name: Zm_Drought_Roots_P Parameter: Organism Value: Zea mays
  misc_feature: MA Experiment 108689 PARAMETER Experiment Name: Zm_Drought_Roots_P Parameter: Plant Line Value: 35A19
  misc_feature: MA Experiment 108689 PARAMETER Experiment Name: Zm_Drought_Roots_P Parameter: Timepoint (hr) Value: 24
  misc_feature: MA Experiment 108689 PARAMETER Experiment Name: Zm_Drought_Roots_P Parameter: Tissue Value: Roots
  misc_feature: MA Experiment 108689 PARAMETER Experiment Name: Zm_Drought_Roots_P Parameter: Treatment Value: Drought vs. No Drought
gcacgagaccattacctagaacatcctaatcgaaaaatcagttcagtaagttcagccttcttgacttgtacagttgtactgaggtaggtctcgtctgagttggcaacgaccatgcctgccgtctcggccgccgcctgctgcgccgccacaacgccggcaaacgaggtggcggaggacctcctcggcttcctccgcgttctcagagacggcaccgtgctccggtcgccggcggacccagtgttctgcccggccaccttccccggcagccacccgtccgtgcagtggaaggaggccgtctacgacaagcccaagaacctccgcgtccgcgtgtacaggccgacgacgccgccggggacgaagaagaagctcccagtgctcgtccacttccacggcggcggcttctgcctggggtcgtgcacgtgggccaacgtccacgagttctgcctccgcctggccgcggaggccggcgccgtcgtgctctccgcgggataccgcctggcccccgagcaccgcctccccgcggccttcgacgacggggccgggttcatgcgctggctccgggaccagtcagcgatcggcggcgccggcgcctccgacgcctggctcgcggaggccgccgatttcggccgcgtgctcgtcaccggcgactcggcgggcgccacgatcgcgcaccacctcgccgtgcgcgccgnnctcggccgcggcggagccagagccggagccggagccgggcctcctcacggtccgcggctacgttctgctcatgccgttcttcggcggcgtccggcgcacggcctcggaggccgagtgcgcggaggaggcgttcccgaaccttgacctggtggaccggttctggaggctgtcgctgccggccggcgccaccagggaccacccggcgtccaacccgttcgggccggacagccctgacctgggcccggtggacttccggtccgtgctcgtggtggccggcggcctcgacctgatacgcgaccgcaccgtcgactacgccgagcggctggcggcgatgggcaagcccgtggagctcgccgagttcgccggcatgccccacgggttctacctgcaccagccggggtcccaggccaccggcgagctcatccagaccgtcgcccggttcgtccacgtcgttgcgccagaggctgcggcttaatttactcggcatatgcatgcatccgtgcatgtatcccgtttcttgtcgtcgtgttgtggttcactcgtatacctcatcttttttctcttatgaaattcttgtagagtaaaacccttctctctctgatgtctcggttgaatgatccaaataatggaccactggtttggg

SEQ ID NO: 18527 - protein, 241 aa, Zea mays subsp. mays
  peptide (1)..(241): Ceres Seq. ID no. 12376633
  misc_feature (74)..(131): Pfam Name: Carboxylesterase Pfam Description: Carboxylesterase
  misc_feature (19)..(193): Homolog of NCBI NO: 34393323 NR Description: putative cell death associated protein
  misc_feature (77)..(193): Homolog of NCBI NO: 15229371 NR Description: putative protein; protein id: At3g63010.1
  misc_feature (60)..(221): Homolog of NCBI NO: 34904758 NR Description: hypothetical protein~predicted by GeneMark.hmm
  misc_feature (60)..(192): Homolog of NCBI NO: 34904760 NR Description: similar to carboxylesterase
  misc_feature (18)..(196): Homolog of NCBI NO: 15240090 NR Description: putative protein; protein id: At5g06570.1
  misc_feature (1)..(197): Homolog of NCBI NO: 34895916 NR Description: P0030H07.24 [Oryza sativa (japonica
  misc_feature (15)..(197): Homolog of NCBI NO: 34895938 NR Description: P0030H07.40 [Oryza sativa (japonica
  misc_feature (11)..(198): Homolog of NCBI NO: 27819508 NR Description: putative esterase [Oryza sativa (japonica
  misc_feature (19)..(202): Homolog of NCBI NO: 34899936 NR Description: putative cell death associated protein
  misc_feature (1)..(208): Homolog of NCBI NO: 34899932 NR Description: putative cell death associated protein
  misc_feature (194)..(194): Xaa is any aa, unknown or other
MPAVSAAACCAATTPANEVAEDLLGFLRVLRDGTVLRSPADPVFCPATFPGSHPSVQWKEAVYDKPKNLRVRVYRPTTPPGTKKKLPVLVHFHGGGFCLGSCTWANVHEFCLRLAAEAGAVVLSAGYRLAPEHRLPAAFDDGAGFMRWLRDQSAIGGAGASDAWLAEAADFGRVLVTGDSAGATIAHHLAVRAXLGRGGARAGAGAGPPHGPRLRSAHAVLRRRPAHGLGGRVRGGGVPEP

SEQ ID NO: 18528 - protein, 134 aa, Zea mays subsp. mays
  peptide (1)..(134): Ceres Seq. ID no. 12376634
  misc_feature (1)..(134): Homolog of NCBI NO: 34393323 NR Description: putative cell death associated protein
  misc_feature (1)..(128): Homolog of NCBI NO: 15229371 NR Description: putative protein; protein id: At3g63010.1
  misc_feature (1)..(125): Homolog of NCBI NO: 34904758 NR Description: hypothetical protein~predicted by GeneMark.hmm
  misc_feature (1)..(125): Homolog of NCBI NO: 34904760 NR Description: similar to carboxylesterase
  misc_feature (1)..(126): Homolog of NCBI NO: 15240090 NR Description: putative protein; protein id: At5g06570.1
  misc_feature (1)..(126): Homolog of NCBI NO: 34895916 NR Description: P0030H07.24 [Oryza sativa (japonica
  misc_feature (1)..(126): Homolog of NCBI NO: 34895938 NR Description: P0030H07.40 [Oryza sativa (japonica
  misc_feature (1)..(134): Homolog of NCBI NO: 27819508 NR Description: putative esterase [Oryza sativa (japonica
  misc_feature (1)..(125): Homolog of NCBI NO: 34899936 NR Description: putative cell death associated protein
  misc_feature (1)..(130): Homolog of NCBI NO: 34899932 NR Description: putative cell death associated protein
MPFFGGVRRTASEAECAEEAFPNLDLVDRFWRLSLPAGATRDHPASNPFGPDSPDLGPVDFRSVLVVAGGLDLIRDRTVDYAERLAAMGKPVELAEFAGMPHGFYLHQPGSQATGELIQTVARFVHVVAPEAAA

SEQ ID NO: 18529 - DNA, 454 bp, Zea mays subsp. mays
  misc_feature (1)..(454): Ceres Seq. ID no. 12637897
  misc_feature: MA Experiment ID: 108535 Result: Up-regulated in Transcription
  misc_feature: MA Experiment 108535 PARAMETER Experiment Name: Zm_Meristem_P Parameter: Age (day) Value: 8
  misc_feature: MA Experiment 108535 PARAMETER Experiment Name: Zm_Meristem_P Parameter: Organism Value: Zea mays
  misc_feature: MA Experiment 108535 PARAMETER Experiment Name: Zm_Meristem_P Parameter: Plant Line Value: 35A19
  misc_feature: MA Experiment 108535 PARAMETER Experiment Name: Zm_Meristem_P Parameter: Tissue Value: Root Meristem vs. Above Root Meristem
  misc_feature: MA Experiment ID: 20000487 Result: Up-regulated in Transcription
  misc_feature: MA Experiment 20000487 PARAMETER Experiment Name: Zm_50mM_NH4NO3_L_to_H_P Parameter: Organism Value: Zea mays
  misc_feature: MA Experiment 20000487 PARAMETER Experiment Name: Zm_50mM_NH4NO3_L_to_H_P Parameter: Timepoint (hr) Value: 4
  misc_feature: MA Experiment 20000487 PARAMETER Experiment Name: Zm_50mM_NH4NO3_L_to_H_P Parameter: Tissue Value: Leaves
  misc_feature: MA Experiment 20000487 PARAMETER Experiment Name: Zm_50mM_NH4NO3_L_to_H_P Parameter: Treatment Value: 50mM NH4NO3 vs. 100mM Mannitol
  misc_feature: MA Experiment ID: 20000535 Result: Up-regulated in Transcription
  misc_feature: MA Experiment 20000535 PARAMETER Experiment Name: Zm_Hybrid_Seed_Dev_P Parameter: DAP Value: 30 vs. 12
  misc_feature: MA Experiment 20000535 PARAMETER Experiment Name: Zm_Hybrid_Seed_Dev_P Parameter: Organism Value: Zea mays
  misc_feature: MA Experiment 20000535 PARAMETER Experiment Name: Zm_Hybrid_Seed_Dev_P Parameter: Plant Line Value: 35A19
  misc_feature: MA Experiment 20000535 PARAMETER Experiment Name: Zm_Hybrid_Seed_Dev_P Parameter: Tissue Value: Embryo vs. Unfert Floret
cactcgcgtccgcccccgccgccgcctttcgtcccagcccctaaaccattctccattcctctcatcagtttagcacaatggcactggctaataagcttggtggtctgctcaagaaagccacaagttcaaatctgtctgtctaccaagcaatcagatgcatgtcatccaagctctttgttggagggatttcttatcaaactgatgatcacagtctcagggacgagtttgccaaatatgggcaagtcattgaagctaggattatcattgaccttgaatctgggaggtctagaggttttggctttgtaacttacacgtcttctgaggaggcttcagctgccattactgccttggatggaaagactctcgatggacggagcatacgtgttaatcatgctaacgagaagacaggtgcgccaagagcaaggcgagtcgcgagaggaagatgctaggaggg

SEQ ID NO: 18530 - protein, 123 aa, Zea mays subsp. mays
  peptide (1)..(123): Ceres Seq. ID no. 12637898
  misc_feature (32)..(103): Pfam Name: RNA recognition motif. (a.k.a. RRM, RBD, or RNP domain) Pfam Description: RNA recognition motif. (a.k.a. RRM, RBD, or RNP
  misc_feature (1)..(95): Homolog of NCBI NO: 19881711 NR Description: Putative RNA-binding protein [Oryza sativa]
  misc_feature (1)..(115): Homolog of NCBI NO: 7489099 NR Description: RNA-binding protein RGP-3 - wood tobacco
  misc_feature (1)..(115): Homolog of NCBI NO: 7439995 NR Description: RNA binding protein 3 - wood tobacco
  misc_feature (1)..(112): Homolog of NCBI NO: 15822703 NR Description: RNA-binding protein precursor [Nicotiana tabacum]
  misc_feature (1)..(114): Homolog of NCBI NO: 7439994 NR Description: glycine-rich RNA-binding protein - garden pea
  misc_feature (1)..(109): Homolog of NCBI NO: 1084415 NR Description: RNA-binding protein - wood tobacco
  misc_feature (1)..(115): Homolog of NCBI NO: 30682622 NR Description: glycine-rich RNA-binding protein (AtGRP2)
  misc_feature (1)..(115): Homolog of NCBI NO: 15236359 NR Description: glycine-rich RNA-binding protein AtGRP2
  misc_feature (1)..(115): Homolog of NCBI NO: 2826811 NR Description: AtGRP2 [Arabidopsis thaliana]
  misc_feature (1)..(110): Homolog of NCBI NO: 15239505 NR Description: glycine-rich RNA-binding protein
MALANKLGGLLKKATSSNLSVYQAIRCMSSKLFVGGISYQTDDHSLRDEFAKYGQVIEARIIIDLESGRSRGFGFVTYTSSEEASAAITALDGKTLDGRSIRVNHANEKTGAPRARRVARGRC

SEQ ID NO: 18531 - protein, 101 aa, Zea mays subsp. mays
  peptide (1)..(101): Ceres Seq. ID no. 12637899
HSRPPPPPPFVPAPKPFSIPLISLAQWHWLISLVVCSRKPQVQICLSTKQSDACHPSSLLEGFLIKLMITVSGTSLPNMGKSLKLGLSLTLNLGGLEVLAL

SEQ ID NO: 18532 - protein, 96 aa, Zea mays subsp. mays
  peptide (1)..(96): Ceres Seq. ID no. 12637900
  misc_feature (5)..(76): Pfam Name: RNA recognition motif. (a.k.a. RRM, RBD, or RNP domain) Pfam Description: RNA recognition motif. (a.k.a. RRM, RBD, or RNP
  misc_feature (1)..(88): Homolog of NCBI NO: 7439995 NR Description: RNA binding protein 3 - wood tobacco
  misc_feature (1)..(85): Homolog of NCBI NO: 15822703 NR Description: RNA-binding protein precursor [Nicotiana tabacum]
  misc_feature (1)..(87): Homolog of NCBI NO: 7439994 NR Description: glycine-rich RNA-binding protein - garden pea
  misc_feature (1)..(82): Homolog of NCBI NO: 1084415 NR Description: RNA-binding protein - wood tobacco
  misc_feature (1)..(68): Homolog of NCBI NO: 19881711 NR Description: Putative RNA-binding protein [Oryza sativa]
  misc_feature (1)..(88): Homolog of NCBI NO: 7489099 NR Description: RNA-binding protein RGP-3 - wood tobacco
  misc_feature (1)..(88): Homolog of NCBI NO: 30682622 NR Description: glycine-rich RNA-binding protein (AtGRP2)
  misc_feature (1)..(88): Homolog of NCBI NO: 15236359 NR Description: glycine-rich RNA-binding protein AtGRP2
  misc_feature (1)..(88): Homolog of NCBI NO: 2826811 NR Description: AtGRP2 [Arabidopsis thaliana]
  misc_feature (1)..(83): Homolog of NCBI NO: 15239505 NR Description: glycine-rich RNA-binding protein
MSSKLFVGGISYQTDDHSLRDEFAKYGQVIEARIIIDLESGRSRGFGFVTYTSSEEASAAITALDGKTLDGRSIRVNHANEKTGAPRARRVARGRC

SEQ ID NO: 18533 - DNA, 1481 bp, Zea mays subsp. mays
  misc_feature (1)..(1481): Ceres Seq. ID no. 12381705
  misc_feature: MA Experiment ID: 108523 Result: Up-regulated in Transcription
  misc_feature: MA Experiment 108523 PARAMETER Experiment Name: Zm_42deg_Heat_P Parameter: Age (day) Value: 8
  misc_feature: MA Experiment 108523 PARAMETER Experiment Name: Zm_42deg_Heat_P Parameter: Organism Value: Zea mays
  misc_feature: MA Experiment 108523 PARAMETER Experiment Name: Zm_42deg_Heat_P Parameter: Plant Line Value: 35A19
  misc_feature: MA Experiment 108523 PARAMETER Experiment Name: Zm_42deg_Heat_P Parameter: Temperature (deg C) Value: 42 vs. 22
  misc_feature: MA Experiment 108523 PARAMETER Experiment Name: Zm_42deg_Heat_P Parameter: Timepoint (hr) Value: 6
  misc_feature: MA Experiment 108523 PARAMETER Experiment Name: Zm_42deg_Heat_P Parameter: Tissue Value: Aerial
gcacgagaccattacctagaacatcctaatcgaaaaattgccatctctacccacacgccacacacgcccaccgcatcggagcagaacccaccaaaccctacgtcgccgcggcggtcggagcgggcagggaccctggactggaggatggtggcgatctcgatgtaccgcggcaacctccacattggcggccccgacagcggcgcctctgccccgcgccgatgggaggcgccccggccgaccctcgacgtgaagcggttccgccgcctcctgcgcaaccgcttccgtgctgtcgcgcgcctcgccgggacgccgctggggcaggcctccccgtcctcctcgggcatggatggcggccgtggcgccgcggaccccgagcgggaggcaccggacgaggagggaggagcgggcgacgggggagaagaggagcaggagcagttgcagcacgaccaggaccaggaccagcaacatcaggaggagcaggggaacgtggaggcggaggcggaggatccggaacagcaggaggaagaagaggagggggcggtggaggacgcggacatggaagatgcgggggaggtagtcgttgatggcgatgcggaagaaggtcagggtgaaagtgaaggtgttgacccaaagccggaggaggaggcgagttatcctgatggaattgatgacaagaacagaaaacttaatgaaaagctggacgccctaaataaaaagaagcatggccttgtgcagatgctgaagcaggtcttaaatgctgaagaagaaatccgaaggcgcaacatgcaggcttcattgcgcgctgccatgccccagccatcagaaaacgcaacagatggaagttctgtttctaggttggcccctagaatgactgttgatgtcaattttggtgatgttgctggcgattcagatgctggttccaaccagggcactcctggacgccccttgcatcacttccacagtatctctccttcaacagcctcttttgcgaggtcaccgtttggttctctacagggccacactccaaggagtccggcaacattctctacggcaagtccatcacgcttcgccacaaatatacacccaggacaacctcctgctctttattcagcatcgttgccaggaagtaactatgtagccacatcaccttccccggccgcatctggtggttcctcctcggtgttcagggaccctcggccacctaactctacataggttctatgctttgctcggagttctactcattggtaatgttgctaaattctctacccagggatttaggtaatgtcgtgcttcgggcaacactagtgttaaaacaaattcgtgtctctgtgaacggtaaataacgtgatagcactgaaattcaaaattagtatattaatttcacaattatattatattaaaaacaaggcttgtactcggtctaggggaaagatcacctccaatcgttgccccgactaattgcaaacttcccttttccc

SEQ ID NO: 18534 - protein, 404 aa, Zea mays subsp. mays
  peptide (1)..(404): Ceres Seq. ID no. 12381706
  misc_feature (140)..(231): Pfam Name: Prothymosin/parathymosin family Pfam Description: Prothymosin/parathymosin family
  misc_feature (104)..(220): Homolog of NCBI NO: 15705840 NR Description: latency associated antigen [Ovine herpesvirus 2]
  misc_feature (117)..(221): Homolog of NCBI NO: 15705840 NR Description: latency associated antigen [Ovine herpesvirus 2]
  misc_feature (106)..(271): Homolog of NCBI NO: 30526291 NR Description: latency associated nuclear antigen [Saimiriine
  misc_feature (99)..(232): Homolog of NCBI NO: 9631239 NR Description: orf 48 [Ateline herpesvirus 3]
  misc_feature (106)..(271): Homolog of NCBI NO: 30348579 NR Description: hypothetical protein [Saimiriine herpesvirus 2]
  misc_feature (125)..(314): Homolog of NCBI NO: 29828894 NR Description: hypothetical protein [Streptomyces avermitilis
  misc_feature (171)..(399): Homolog of NCBI NO: 21592503 NR Description: unknown [Arabidopsis thaliana]
  misc_feature (171)..(399): Homolog of NCBI NO: 15228266 NR Description: putative protein
ARDHYLEHPNRKIAISTHTPHTPTASEQNPPNPTSPRRSERAGTLDWRMVAISMYRGNLHIGGPDSGASAPRRWEAPRPTLDVKRFRRLLRNRFRAVARLAGTPLGQASPSSSGMDGGRGAADPEREAPDEEGGAGDGGEEEQEQLQHDQDQDQQHQEEQGNVEAEAEDPEQQEEEEEGAVEDADMEDAGEVVVDGDAEEGQGESEGVDPKPEEEASYPDGIDDKNRKLNEKLDALNKKKHGLVQMLKQVLNAEEEIRRRNMQASLRAAMPQPSENATDGSSVSRLAPRMTVDVNFGDVAGDSDAGSNQGTPGRPLHHFHSISPSTASFARSPFGSLQGHTPRSPATFSTASPSRFATNIHPGQPPALYSASLPGSNYVATSPSPAASGGSSSVFRDPRPPNST

SEQ ID NO: 18535 - protein, 356 aa, Zea mays subsp. mays
  peptide (1)..(356): Ceres Seq. ID no. 12381707
  misc_feature (92)..(183): Pfam Name: Prothymosin/parathymosin family Pfam Description: Prothymosin/parathymosin family
  misc_feature (56)..(172): Homolog of NCBI NO: 15705840 NR Description: latency associated antigen [Ovine herpesvirus 2]
  misc_feature (69)..(173): Homolog of NCBI NO: 15705840 NR Description: latency associated antigen [Ovine herpesvirus 2]
  misc_feature (58)..(223): Homolog of NCBI NO: 30526291 NR Description: latency associated nuclear antigen [Saimiriine
  misc_feature (51)..(184): Homolog of NCBI NO: 9631239 NR Description: orf 48 [Ateline herpesvirus 3]
  misc_feature (58)..(223): Homolog of NCBI NO: 30348579 NR Description: hypothetical protein [Saimiriine herpesvirus 2]
  misc_feature (77)..(266): Homolog of NCBI NO: 29828894 NR Description: hypothetical protein [Streptomyces avermitilis
  misc_feature (123)..(351): Homolog of NCBI NO: 21592503 NR Description: unknown [Arabidopsis thaliana]
  misc_feature (123)..(351): Homolog of NCBI NO: 15228266 NR Description: putative protein
MVAISMYRGNLHIGGPDSGASAPRRWEAPRPTLDVKRFRRLLRNRFRAVARLAGTPLGQASPSSSGMDGGRGAADPEREAPDEEGGAGDGGEEEQEQLQHDQDQDQQHQEEQGNVEAEAEDPEQQEEEEEGAVEDADMEDAGEVVVDGDAEEGQGESEGVDPKPEEEASYPDGIDDKNRKLNEKLDALNKKKHGLVQMLKQVLNAEEEIRRRNMQASLRAAMPQPSENATDGSSVSRLAPRMTVDVNFGDVAGDSDAGSNQGTPGRPLHHFHSISPSTASFARSPFGSLQGHTPRSPATFSTASPSRFATNIHPGQPPALYSASLPGSNYVATSPSPAASGGSSSVFRDPRPPNST

SEQ ID NO: 18536 - protein, 351 aa, Zea mays subsp. mays
  peptide (1)..(351): Ceres Seq. ID no. 12381708
  misc_feature (87)..(178): Pfam Name: Prothymosin/parathymosin family Pfam Description: Prothymosin/parathymosin family
  misc_feature (51)..(167): Homolog of NCBI NO: 15705840 NR Description: latency associated antigen [Ovine herpesvirus 2]
  misc_feature (64)..(168): Homolog of NCBI NO: 15705840 NR Description: latency associated antigen [Ovine herpesvirus 2]
  misc_feature (53)..(218): Homolog of NCBI NO: 30526291 NR Description: latency associated nuclear antigen [Saimiriine
  misc_feature (46)..(179): Homolog of NCBI NO: 9631239 NR Description: orf 48 [Ateline herpesvirus 3]
  misc_feature (53)..(218): Homolog of NCBI NO: 30348579 NR Description: hypothetical protein [Saimiriine herpesvirus 2]
  misc_feature (72)..(261): Homolog of NCBI NO: 29828894 NR Description: hypothetical protein [Streptomyces avermitilis
  misc_feature (118)..(346): Homolog of NCBI NO: 21592503 NR Description: unknown [Arabidopsis thaliana]
  misc_feature (118)..(346): Homolog of NCBI NO: 15228266 NR Description: putative protein
MYRGNLHIGGPDSGASAPRRWEAPRPTLDVKRFRRLLRNRFRAVARLAGTPLGQASPSSSGMDGGRGAADPEREAPDEEGGAGDGGEEEQEQLQHDQDQDQQHQEEQGNVEAEAEDPEQQEEEEEGAVEDADMEDAGEVVVDGDAEEGQGESEGVDPKPEEEASYPDGIDDKNRKLNEKLDALNKKKHGLVQMLKQVLNAEEEIRRRNMQASLRAAMPQPSENATDGSSVSRLAPRMTVDVNFGDVAGDSDAGSNQGTPGRPLHHFHSISPSTASFARSPFGSLQGHTPRSPATFSTASPSRFATNIHPGQPPALYSASLPGSNYVATSPSPAASGGSSSVFRDPRPPNST

SEQ ID NO: 18537 - DNA, 534 bp, Zea mays subsp. mays
  misc_feature (1)..(534): Ceres Seq. ID no. 12417822
  misc_feature: MA Experiment ID: 108535 Result: Up-regulated in Transcription
  misc_feature: MA Experiment 108535 PARAMETER Experiment Name: Zm_Meristem_P Parameter: Age (day) Value: 8
  misc_feature: MA Experiment 108535 PARAMETER Experiment Name: Zm_Meristem_P Parameter: Organism Value: Zea mays
  misc_feature: MA Experiment 108535 PARAMETER Experiment Name: Zm_Meristem_P Parameter: Plant Line Value: 35A19
  misc_feature: MA Experiment 108535 PARAMETER Experiment Name: Zm_Meristem_P Parameter: Tissue Value: Root Meristem vs. Above Root Meristem
  misc_feature: MA Experiment ID: 108544 Result: Down-regulated in Transcription
  misc_feature: MA Experiment ID: 20000488 Result: Up-regulated in Transcription
  misc_feature: MA Experiment 20000488 PARAMETER Experiment Name: Zm_50mM_NH4NO3_L_to_H_P Parameter: Organism Value: Zea mays
  misc_feature: MA Experiment 20000488 PARAMETER Experiment Name: Zm_50mM_NH4NO3_L_to_H_P Parameter: Timepoint (hr) Value: 8
  misc_feature: MA Experiment 20000488 PARAMETER Experiment Name: Zm_50mM_NH4NO3_L_to_H_P Parameter: Tissue Value: Leaves
  misc_feature: MA Experiment 20000488 PARAMETER Experiment Name: Zm_50mM_NH4NO3_L_to_H_P Parameter: Treatment Value: 50mM NH4NO3 vs. 100mM Mannitol
  misc_feature: MA Experiment ID: 20000492 Result: Up-regulated in Transcription
  misc_feature: MA Experiment 20000492 PARAMETER Experiment Name: Zm_Hybrid_Seed_Dev_P Parameter: DAP Value: 12
  misc_feature: MA Experiment 20000492 PARAMETER Experiment Name: Zm_Hybrid_Seed_Dev_P Parameter: Organism Value: Zea mays
  misc_feature: MA Experiment 20000492 PARAMETER Experiment Name: Zm_Hybrid_Seed_Dev_P Parameter: Plant Line Value: 35A19
  misc_feature: MA Experiment 20000492 PARAMETER Experiment Name: Zm_Hybrid_Seed_Dev_P Parameter: Tissue Value: Fert Kernel vs. Unfert Floret
  misc_feature: MA Experiment ID: 20001612 Result: Up-regulated in Transcription
  misc_feature: MA Experiment 20001612 PARAMETER Experiment Name: Zm_50ppm_KNO3_L-to-H_P Parameter: Age (day) Value: 19
  misc_feature: MA Experiment 20001612 PARAMETER Experiment Name: Zm_50ppm_KNO3_L-to-H_P Parameter: Organism Value: Zea mays
  misc_feature: MA Experiment 20001612 PARAMETER Experiment Name: Zm_50ppm_KNO3_L-to-H_P Parameter: Plant Line Value: 35A19
  misc_feature: MA Experiment 20001612 PARAMETER Experiment Name: Zm_50ppm_KNO3_L-to-H_P Parameter: Timepoint (hr) Value: 8
  misc_feature: MA Experiment 20001612 PARAMETER Experiment Name: Zm_50ppm_KNO3_L-to-H_P Parameter: Tissue Value: Roots
  misc_feature: MA Experiment 20001612 PARAMETER Experiment Name: Zm_50ppm_KNO3_L-to-H_P Parameter: Treatment Value: 50ppm KNO3 vs. 50ppm KCl
ccgaggcctaagatgtccaacgctgacctgggcaggatcatcaactctgacgaggtgcagtctgtggtgaagccactcaacaaggaagtgaagcgcagggagaagaggaagaacccactcaagaacatggctgctgtgctcaaactcaacccctacctcggcactgcccggaagatggccacccttgctgaggctgctcgtgtgaaggccaggaaggcgaagctcgactccaagaggaccaagcttaccccggagactgccaaggttaaggctgctggcaaggcatggtacaagaccatggtctcggacagcgactacaccgagtttgagaacttctcaaagtggctcggcgtgactcagtgagcggcaagggtagttaagttttgagtagctcagcttatgttgagaggaaagaggatccatcaaatctgttttatcctgcatcatcataacaagttgctacaagtcttgcatgttcgtgttgtttgtgcatttccgcgagaacatagtatttttatattcgaaccagttgtc

SEQ ID NO: 18538 - protein, 120 aa, Zea mays subsp. mays
  peptide (1)..(120): Ceres Seq. ID no. 12417823
  misc_feature (26)..(120): Homolog of NCBI NO: 25403525 NR Description: probable 60S ribosomal protein
  misc_feature (1)..(120): Homolog of NCBI NO: 6441068 NR Description: 60S ribosomal protein L4 [Chlamydomonas sp. HS-5]
  misc_feature (1)..(120): Homolog of NCBI NO: 26450328 NR Description: putative 60S ribosomal protein [Arabidopsis
  misc_feature (1)..(120): Homolog of NCBI NO: 15242558 NR Description: 60S ribosomal protein - like
  misc_feature (1)..(120): Homolog of NCBI NO: 13605831 NR Description: AT5g02870/F9G14_180 [Arabidopsis thaliana]
  misc_feature (1)..(120): Homolog of NCBI NO: 17367847 NR Description: 60S ribosomal protein L4 (L1)
  misc_feature (1)..(120): Homolog of NCBI NO: 21593543 NR Description: 60S ribosomal protein L4-B (L1) [Arabidopsis
  misc_feature (1)..(120): Homolog of NCBI NO: 15232723 NR Description: putative 60S ribosomal protein L1
  misc_feature (1)..(120): Homolog of NCBI NO: 34897236 NR Description: putative 60S ribosomal protein L1
  misc_feature (1)..(120): Homolog of NCBI NO: 34393487 NR Description: putative 60S ribosomal protein L4/L1
PRPKMSNADLGRIINSDEVQSVVKPLNKEVKRREKRKNPLKNMAAVLKLNPYLGTARKMATLAEAARVKARKAKLDSKRTKLTPETAKVKAAGKAWYKTMVSDSDYTEFENFSKWLGVTQ

SEQ ID NO: 18539 - protein, 116 aa, Zea mays subsp. mays
  peptide (1)..(116): Ceres Seq. ID no. 12417824
  misc_feature (22)..(116): Homolog of NCBI NO: 25403525 NR Description: probable 60S ribosomal protein
  misc_feature (1)..(116): Homolog of NCBI NO: 6441068 NR Description: 60S ribosomal protein L4 [Chlamydomonas sp. HS-5]
  misc_feature (1)..(116): Homolog of NCBI NO: 26450328 NR Description: putative 60S ribosomal protein [Arabidopsis
  misc_feature (1)..(116): Homolog of NCBI NO: 15242558 NR Description: 60S ribosomal protein - like
  misc_feature (1)..(116): Homolog of NCBI NO: 13605831 NR Description: AT5g02870/F9G14_180 [Arabidopsis thaliana]
  misc_feature (1)..(116): Homolog of NCBI NO: 17367847 NR Description: 60S ribosomal protein L4 (L1)
  misc_feature (1)..(116): Homolog of NCBI NO: 21593543 NR Description: 60S ribosomal protein L4-B (L1) [Arabidopsis
  misc_feature (1)..(116): Homolog of NCBI NO: 15232723 NR Description: putative 60S ribosomal protein L1
  misc_feature (1)..(116): Homolog of NCBI NO: 34897236 NR Description: putative 60S ribosomal protein L1
  misc_feature (1)..(116): Homolog of NCBI NO: 34393487 NR Description: putative 60S ribosomal protein L4/L1
MSNADLGRIINSDEVQSVVKPLNKEVKRREKRKNPLKNMAAVLKLNPYLGTARKMATLAEAARVKARKAKLDSKRTKLTPETAKVKAAGKAWYKTMVSDSDYTEFENFSKWLGVTQ

SEQ ID NO: 18540 - protein, 78 aa, Zea mays subsp. mays
  peptide (1)..(78): Ceres Seq. ID no. 12417825
  misc_feature (1)..(78): Homolog of NCBI NO: 25403525 NR Description: probable 60S ribosomal protein
  misc_feature (1)..(78): Homolog of NCBI NO: 6441068 NR Description: 60S ribosomal protein L4 [Chlamydomonas sp. HS-5]
  misc_feature (1)..(78): Homolog of NCBI NO: 26450328 NR Description: putative 60S ribosomal protein [Arabidopsis
  misc_feature (1)..(78): Homolog of NCBI NO: 15242558 NR Description: 60S ribosomal protein - like
  misc_feature (1)..(78): Homolog of NCBI NO: 13605831 NR Description: AT5g02870/F9G14_180 [Arabidopsis thaliana]
  misc_feature (1)..(78): Homolog of NCBI NO: 17367847 NR Description: 60S ribosomal protein L4 (L1)
  misc_feature (1)..(78): Homolog of NCBI NO: 21593543 NR Description: 60S ribosomal protein L4-B (L1) [Arabidopsis
  misc_feature (1)..(78): Homolog of NCBI NO: 15232723 NR Description: putative 60S ribosomal protein L1
  misc_feature (1)..(78): Homolog of NCBI NO: 34897236 NR Description: putative 60S ribosomal protein L1
  misc_feature (1)..(78): Homolog of NCBI NO: 34393487 NR Description: putative 60S ribosomal protein L4/L1
MAAVLKLNPYLGTARKMATLAEAARVKARKAKLDSKRTKLTPETAKVKAAGKAWYKTMVSDSDYTEFENFSKWLGVTQ

SEQ ID NO: 18541 - DNA, 1022 bp, Zea mays subsp. mays
  misc_feature (1)..(1022): Ceres Seq. ID no. 12355114
  misc_feature: MA Experiment ID: 108523 Result: Down-regulated in Transcription
  misc_feature: MA Experiment 108523 PARAMETER Experiment Name: Zm_42deg_Heat_P Parameter: Age (day) Value: 8
  misc_feature: MA Experiment 108523 PARAMETER Experiment Name: Zm_42deg_Heat_P Parameter: Organism Value: Zea mays
  misc_feature: MA Experiment 108523 PARAMETER Experiment Name: Zm_42deg_Heat_P Parameter: Plant Line Value: 35A19
  misc_feature: MA Experiment 108523 PARAMETER Experiment Name: Zm_42deg_Heat_P Parameter: Temperature (deg C) Value: 42 vs. 22
  misc_feature: MA Experiment 108523 PARAMETER Experiment Name: Zm_42deg_Heat_P Parameter: Timepoint (hr) Value: 6
  misc_feature: MA Experiment 108523 PARAMETER Experiment Name: Zm_42deg_Heat_P Parameter: Tissue Value: Aerial
  misc_feature: MA Experiment ID: 108527 Result: Down-regulated in Transcription
  misc_feature: MA Experiment 108527 PARAMETER Experiment Name: Zm_5mM_NO_P Parameter: Age (day) Value: 8
  misc_feature: MA Experiment 108527 PARAMETER Experiment Name: Zm_5mM_NO_P Parameter: Organism Value: Zea mays
  misc_feature: MA Experiment 108527 PARAMETER Experiment Name: Zm_5mM_NO_P Parameter: Plant Line Value: 35A19
  misc_feature: MA Experiment 108527 PARAMETER Experiment Name: Zm_5mM_NO_P Parameter: Timepoint (hr) Value: 6
  misc_feature: MA Experiment 108527 PARAMETER Experiment Name: Zm_5mM_NO_P Parameter: Tissue Value: Aerial
  misc_feature: MA Experiment 108527 PARAMETER Experiment Name: Zm_5mM_NO_P Parameter: Treatment Value: 5mM NO vs. No Treatment
  misc_feature: MA Experiment ID: 108528 Result: Up-regulated in Transcription
  misc_feature: MA Experiment 108528 PARAMETER Experiment Name: Zm_Imbibed_Seeds_P Parameter: Age (day) Value: 5 vs. 2
  misc_feature: MA Experiment 108528 PARAMETER Experiment Name: Zm_Imbibed_Seeds_P Parameter: Organism Value: Zea mays
  misc_feature: MA Experiment 108528 PARAMETER Experiment Name: Zm_Imbibed_Seeds_P Parameter: Plant Line Value: 35A19
  misc_feature: MA Experiment 108528 PARAMETER Experiment Name: Zm_Imbibed_Seeds_P Parameter: Tissue Value: Aerial vs. Embryo
  misc_feature: MA Experiment ID: 108530 Result: Up-regulated in Transcription
  misc_feature: MA Experiment 108530 PARAMETER Experiment Name: Zm_Imbibed_Seeds_P Parameter: Age (day) Value: 6 vs. 2
  misc_feature: MA Experiment 108530 PARAMETER Experiment Name: Zm_Imbibed_Seeds_P Parameter: Organism Value: Zea mays
  misc_feature: MA Experiment 108530 PARAMETER Experiment Name: Zm_Imbibed_Seeds_P Parameter: Plant Line Value: 35A19
  misc_feature: MA Experiment 108530 PARAMETER Experiment Name: Zm_Imbibed_Seeds_P Parameter: Tissue Value: Aerial vs. Embryo
  misc_feature: MA Experiment ID: 108534 Result: Down-regulated in Transcription
  misc_feature: MA Experiment 108534 PARAMETER Experiment Name: Zm_4deg_Cold_P Parameter: Age (hr) Value: 8
  misc_feature: MA Experiment 108534 PARAMETER Experiment Name: Zm_4deg_Cold_P Parameter: Organism Value: Zea mays
  misc_feature: MA Experiment 108534 PARAMETER Experiment Name: Zm_4deg_Cold_P Parameter: Plant Line Value: 35A19
  misc_feature: MA Experiment 108534 PARAMETER Experiment Name: Zm_4deg_Cold_P Parameter: Temperature (deg C) Value: 4 vs. 22
  misc_feature: MA Experiment 108534 PARAMETER Experiment Name: Zm_4deg_Cold_P Parameter: Timepoint (hr) Value: 6
  misc_feature: MA Experiment 108534 PARAMETER Experiment Name: Zm_4deg_Cold_P Parameter: Tissue Value: Aerial
  misc_feature: MA Experiment ID: 108543 Result: Up-regulated in Transcription
  misc_feature: MA Experiment ID: 108545 Result: Down-regulated in Transcription
  misc_feature: MA Experiment 108545 PARAMETER Experiment Name: Zm_Imbibed_Seeds_P Parameter: Age (day) Value: 3 vs. 2
  misc_feature: MA Experiment 108545 PARAMETER Experiment Name: Zm_Imbibed_Seeds_P Parameter: Organism Value: Zea mays
  misc_feature: MA Experiment 108545 PARAMETER Experiment Name: Zm_Imbibed_Seeds_P Parameter: Plant Line Value: 35A19
  misc_feature: MA Experiment 108545 PARAMETER Experiment Name: Zm_Imbibed_Seeds_P Parameter: Tissue Value: Aerial vs. Embryo
  misc_feature: MA Experiment ID: 108547 Result: Up-regulated in Transcription
  misc_feature: MA Experiment 108547 PARAMETER Experiment Name: Zm_Imbibed_Seeds_P Parameter: Age (day) Value: 4 vs. 2
  misc_feature: MA Experiment 108547 PARAMETER Experiment Name: Zm_Imbibed_Seeds_P Parameter: Organism Value: Zea mays
  misc_feature: MA Experiment 108547 PARAMETER Experiment Name: Zm_Imbibed_Seeds_P Parameter: Plant Line Value: 35A19
  misc_feature: MA Experiment 108547 PARAMETER Experiment Name: Zm_Imbibed_Seeds_P Parameter: Tissue Value: Aerial vs. Embryo
  misc_feature: MA Experiment ID: 108559 Result: Down-regulated in Transcription
  misc_feature: MA Experiment 108559 PARAMETER Experiment Name: Zm_5mM_NO_P Parameter: Age (day) Value: 8
  misc_feature: MA Experiment 108559 PARAMETER Experiment Name: Zm_5mM_NO_P Parameter: Organism Value: Zea mays
  misc_feature: MA Experiment 108559 PARAMETER Experiment Name: Zm_5mM_NO_P Parameter: Plant Line Value: 35A19
  misc_feature: MA Experiment 108559 PARAMETER Experiment Name: Zm_5mM_NO_P Parameter: Timepoint (hr) Value: 12
  misc_feature: MA Experiment 108559 PARAMETER Experiment Name: Zm_5mM_NO_P Parameter: Tissue Value: Aerial
  misc_feature: MA Experiment 108559 PARAMETER Experiment Name: Zm_5mM_NO_P Parameter: Treatment Value: 5mM NO vs. No Treatment
  misc_feature: MA Experiment ID: 108687 Result: Down-regulated in Transcription
  misc_feature: MA Experiment 108687 PARAMETER Experiment Name: Zm_Embryos-Flowers__P Parameter: Tissue Value: Embryo vs. Aerial+
  misc_feature: MA Experiment ID: 20000480 Result: Up-regulated in Transcription
  misc_feature: MA Experiment 20000480 PARAMETER Experiment Name: Zm_Drought_P Parameter: Age (day) Value: 11
  misc_feature: MA Experiment 20000480 PARAMETER Experiment Name: Zm_Drought_P Parameter: Organism Value: Zea mays
  misc_feature: MA Experiment 20000480 PARAMETER Experiment Name: Zm_Drought_P Parameter: Plant Line Value: 35A19
  misc_feature: MA Experiment 20000480 PARAMETER Experiment Name: Zm_Drought_P Parameter: Timepoint (hr) Value: 72
  misc_feature: MA Experiment 20000480 PARAMETER Experiment Name: Zm_Drought_P Parameter: Tissue Value: Aerial
  misc_feature: MA Experiment 20000480 PARAMETER Experiment Name: Zm_Drought_P Parameter: Treatment Value: Drought vs. No Drought
  misc_feature: MA Experiment ID: 20000535 Result: Down-regulated in Transcription
  misc_feature: MA Experiment 20000535 PARAMETER Experiment Name: Zm_Hybrid_Seed_Dev_P Parameter: DAP Value: 30 vs. 12
  misc_feature: MA Experiment 20000535 PARAMETER Experiment Name: Zm_Hybrid_Seed_Dev_P Parameter: Organism Value: Zea mays
  misc_feature: MA Experiment 20000535 PARAMETER Experiment Name: Zm_Hybrid_Seed_Dev_P Parameter: Plant Line Value: 35A19
  misc_feature: MA Experiment 20000535 PARAMETER Experiment Name: Zm_Hybrid_Seed_Dev_P Parameter: Tissue Value: Embryo vs. Unfert Floret
  misc_feature: MA Experiment ID: 20001608 Result: Down-regulated in Transcription
  misc_feature: MA Experiment 20001608 PARAMETER Experiment Name: Zm_50ppm_KNO3_L-to-H_P Parameter: Age (day) Value: 21
  misc_feature: MA Experiment 20001608 PARAMETER Experiment Name: Zm_50ppm_KNO3_L-to-H_P Parameter: Organism Value: Zea mays
  misc_feature: MA Experiment 20001608 PARAMETER Experiment Name: Zm_50ppm_KNO3_L-to-H_P Parameter: Plant Line Value: 35A19
  misc_feature: MA Experiment 20001608 PARAMETER Experiment Name: Zm_50ppm_KNO3_L-to-H_P Parameter: Timepoint (hr) Value: 48
  misc_feature: MA Experiment 20001608 PARAMETER Experiment Name: Zm_50ppm_KNO3_L-to-H_P Parameter: Tissue Value: Shoots
  misc_feature: MA Experiment 20001608 PARAMETER Experiment Name: Zm_50ppm_KNO3_L-to-H_P Parameter: Treatment Value: 50ppm KNO3 vs. 50ppm KCl
aataccagagcattagacgatcgtactttgtgaggcgctggtctcttgcacagactcggagcaagataggcctagctggttacaagccaagaacaagtagagcggtagagggaaaatatatctggagagggaaacaatggcgggcgaggagggtcttaaggtcctcggcctgcaggtgagcccgttcgtgctccgcgtgtgcttggcgctgaacatgaaaggagtgagttacgagtacgtcgaggaggacatatccaacaagagtgagctcctgctcaagtccaacccggtgcacaagaaggtgcccgtgctcatccacaacggtaagcccatctgcgagtcactcgtcatcatgcagtacgtcgacgagctgttcgccggccggccgatcctcccaaccgacccctacgagcgcgccactgctcgcttctgggctgcctacgccgacgacaagttgtttccagcgtggtacggcatggtgaaggcccagccggaggaggagagggcggagaaggcgaaggagacgctcgccgccatcgagcacatggaagtgaccttcgccaagtgctccggcggcaacgccttcttcggtggcgactccatcggctacgtcgacatcgtgctgacgtgctcggctccttcttgttctggttcgaggcggtgcgcagggttttcgacctggagatcattaacgctagcaagactccgctgttggctgcgtgggcggagcggtttgtagggactgtagaagcgaaggaggtggtgccgttgcccacggcggacatggcggtacagtacatcaataagcttcatgcccccctgccgccgccatgagttcacaatgagtcgtgtaagtgtaaccaagcagggaaaaaggtaaatggtgcggtgctttggtccaaattccaaccgaataatgttcaaagcttatattgataggcttgggttgttgtcatcaaatattgtggttcagtcgtctcctctgcaataaatataaatatgattattactttctttgccgt

SEQ ID NO: 18542 - protein, 200 aa, Zea mays subsp. mays
  peptide (1)..(200): Ceres Seq. ID no. 12355115
  misc_feature (86)..(163): Pfam Name: Glutathione S-transferase, C-terminal domain Pfam Description: Glutathione S-transferase, C-terminal domain
  misc_feature (1)..(163): Homolog of NCBI NO: 20067421 NR Description: glutathione transferase [Triticum aestivum]
  misc_feature (1)..(163): Homolog of NCBI NO: 11385535 NR Description: glutathione S-transferase GST 42 [Zea mays]
  misc_feature (3)..(163): Homolog of NCBI NO: 37536250 NR Description: putative glutathione S-transferase
  misc_feature (2)..(163): Homolog of NCBI NO: 37536308 NR Description: putative glutathione S-transferase
  misc_feature (3)..(163): Homolog of NCBI NO: 37536280 NR Description: putative glutathione S-transferase
  misc_feature (5)..(178): Homolog of NCBI NO: 11385503 NR Description: glutathione S-transferase GST 26 [Zea mays]
  misc_feature (1)..(178): Homolog of NCBI NO: 37536352 NR Description: putative glutathione S-transferase
  misc_feature (1)..(166): Homolog of NCBI NO: 22022398 NR Description: glutathione-S-transferase Cla47 [Triticum
  misc_feature (1)..(200): Homolog of NCBI NO: 11385529 NR Description: glutathione S-transferase GST 39 [Zea mays]
  misc_feature (1)..(163): Homolog of NCBI NO: 11385517 NR Description: glutathione S-transferase GST 33 [Zea mays]
MAGEEGLKVLGLQVSPFVLRVCLALNMKGVSYEYVEEDISNKSELLLKSNPVHKKVPVLIHNGKPICESLVIMQYVDELFAGRPILPTDPYERATARFWAAYADDKLFPAWYGMVKAQPEEERAEKAKETLAAIEHMEVTFAKCSGGNAFFGGDSIGYVDIVLTCSAPSCSGSRRCAGFSTWRSLTLARLRCWLRGRSGL

SEQ ID NO: 18543 - protein, 174 aa, Zea mays subsp. mays
  peptide (1)..(174): Ceres Seq. ID no. 12355116
  misc_feature (60)..(137): Pfam Name: Glutathione S-transferase, C-terminal domain Pfam Description: Glutathione S-transferase, C-terminal domain
  misc_feature (1)..(137): Homolog of NCBI NO: 20067421 NR Description: glutathione transferase [Triticum aestivum]
  misc_feature (1)..(137): Homolog of NCBI NO: 11385535 NR Description: glutathione S-transferase GST 42 [Zea mays]
  misc_feature (1)..(137): Homolog of NCBI NO: 37536250 NR Description: putative glutathione S-transferase
  misc_feature (1)..(137): Homolog of NCBI NO: 37536308 NR Description: putative glutathione S-transferase
  misc_feature (1)..(137): Homolog of NCBI NO: 37536280 NR Description: putative glutathione S-transferase
  misc_feature (1)..(152): Homolog of NCBI NO: 11385503 NR Description: glutathione S-transferase GST 26 [Zea mays]
  misc_feature (1)..(152): Homolog of NCBI NO: 37536352 NR Description: putative glutathione S-transferase
  misc_feature (1)..(140): Homolog of NCBI NO: 22022398 NR Description: glutathione-S-transferase Cla47 [Triticum
  misc_feature (1)..(174): Homolog of NCBI NO: 11385529 NR Description: glutathione S-transferase GST 39 [Zea mays]
  misc_feature (1)..(137): Homolog of NCBI NO: 11385517 NR Description: glutathione S-transferase GST 33 [Zea mays]
MKGVSYEYVEEDISNKSELLLKSNPVHKKVPVLIHNGKPICESLVIMQYVDELFAGRPILPTDPYERATARFWAAYADDKLFPAWYGMVKAQPEEERAEKAKETLAAIEHMEVTFAKCSGGNAFFGGDSIGYVDIVLTCSAPSCSGSRRCAGFSTWRSLTLARLRCWLRGRSGL

SEQ ID NO: 18544 - protein, 128 aa, Zea mays subsp. mays
  peptide (1)..(128): Ceres Seq. ID no. 12355117
  misc_feature (14)..(91): Pfam Name: Glutathione S-transferase, C-terminal domain Pfam Description: Glutathione S-transferase, C-terminal domain
  misc_feature (1)..(91): Homolog of NCBI NO: 20067421 NR Description: glutathione transferase [Triticum aestivum]
  misc_feature (1)..(91): Homolog of NCBI NO: 11385535 NR Description: glutathione S-transferase GST 42 [Zea mays]
  misc_feature (1)..(91): Homolog of NCBI NO: 37536250 NR Description: putative glutathione S-transferase
  misc_feature (1)..(91): Homolog of NCBI NO: 37536308 NR Description: putative glutathione S-transferase
  misc_feature (1)..(91): Homolog of NCBI NO: 37536280 NR Description: putative glutathione S-transferase
  misc_feature (1)..(106): Homolog of NCBI NO: 11385503 NR Description: glutathione S-transferase GST 26 [Zea mays]
  misc_feature (1)..(106): Homolog of NCBI NO: 37536352 NR Description: putative glutathione S-transferase
  misc_feature (1)..(94): Homolog of NCBI NO: 22022398 NR Description: glutathione-S-transferase Cla47 [Triticum
  misc_feature (1)..(128): Homolog of NCBI NO: 11385529 NR Description: glutathione S-transferase GST 39 [Zea mays]
  misc_feature (1)..(91): Homolog of NCBI NO: 11385517 NR Description: glutathione S-transferase GST 33 [Zea mays]
MQYVDELFAGRPILPTDPYERATARFWAAYADDKLFPAWYGMVKAQPEEERAEKAKETLAAIEHMEVTFAKCSGGNAFFGGDSIGYVDIVLTCSAPSCSGSRRCAGFSTWRSLTLARLRCWLRGRSGL

SEQ ID NO: 18545 - DNA, 635 bp, Zea mays subsp. mays
  misc_feature (1)..(635): Ceres Seq. ID no. 12417963
  misc_feature: MA Experiment ID: 108504 Result: Up-regulated in Transcription
  misc_feature: MA Experiment 108504 PARAMETER Experiment Name: Zm_Drought_P Parameter: Age (day) Value: 8
  misc_feature: MA Experiment 108504 PARAMETER Experiment Name: Zm_Drought_P Parameter: Organism Value: Zea mays
  misc_feature: MA Experiment 108504 PARAMETER Experiment Name: Zm_Drought_P Parameter: Plant Line Value: 35A19
  misc_feature: MA Experiment 108504 PARAMETER Experiment Name: Zm_Drought_P Parameter: Timepoint (hr) Value: 12
  misc_feature: MA Experiment 108504 PARAMETER Experiment Name: Zm_Drought_P Parameter: Tissue Value: Aerial
  misc_feature: MA Experiment 108504 PARAMETER Experiment Name: Zm_Drought_P Parameter: Treatment Value: Drought vs. No Drought
  misc_feature: MA Experiment ID: 108513 Result: Up-regulated in Transcription
  misc_feature: MA Experiment 108513 PARAMETER Experiment Name: Zm_100uM_ABA_P Parameter: Age (day) Value: 8
  misc_feature: MA Experiment 108513 PARAMETER Experiment Name: Zm_100uM_ABA_P Parameter: Organism Value: Zea mays
  misc_feature: MA Experiment 108513 PARAMETER Experiment Name: Zm_100uM_ABA_P Parameter: Plant Line Value: 35A19
  misc_feature: MA Experiment 108513 PARAMETER Experiment Name: Zm_100uM_ABA_P Parameter: Timepoint (hr) Value: 6
  misc_feature: MA Experiment 108513 PARAMETER Experiment Name: Zm_100uM_ABA_P Parameter: Tissue Value: Aerial
  misc_feature: MA Experiment 108513 PARAMETER Experiment Name: Zm_100uM_ABA_P Parameter: Treatment Value: 100uM ABA vs. No Treatment
  misc_feature: MA Experiment ID: 108528 Result: Down-regulated in Transcription
  misc_feature: MA Experiment 108528 PARAMETER Experiment Name: Zm_Imbibed_Seeds_P Parameter: Age (day) Value: 5 vs. 2
  misc_feature: MA Experiment 108528 PARAMETER Experiment Name: Zm_Imbibed_Seeds_P Parameter: Organism Value: Zea mays
  misc_feature: MA Experiment 108528 PARAMETER Experiment Name: Zm_Imbibed_Seeds_P Parameter: Plant Line Value: 35A19
  misc_feature: MA Experiment 108528 PARAMETER Experiment Name: Zm_Imbibed_Seeds_P Parameter: Tissue Value: Aerial vs. Embryo
  misc_feature: MA Experiment ID: 108530 Result: Down-regulated in Transcription
  misc_feature: MA Experiment 108530 PARAMETER Experiment Name: Zm_Imbibed_Seeds_P Parameter: Age (day) Value: 6 vs. 2
  misc_feature: MA Experiment 108530 PARAMETER Experiment Name: Zm_Imbibed_Seeds_P Parameter: Organism Value: Zea mays
  misc_feature: MA Experiment 108530 PARAMETER Experiment Name: Zm_Imbibed_Seeds_P Parameter: Plant Line Value: 35A19
  misc_feature: MA Experiment 108530 PARAMETER Experiment Name: Zm_Imbibed_Seeds_P Parameter: Tissue Value: Aerial vs. Embryo
  misc_feature: MA Experiment ID: 108535 Result: Down-regulated in Transcription
  misc_feature: MA Experiment 108535 PARAMETER Experiment Name: Zm_Meristem_P Parameter: Age (day) Value: 8
  misc_feature: MA Experiment 108535 PARAMETER Experiment Name: Zm_Meristem_P Parameter: Organism Value: Zea mays
  misc_feature: MA Experiment 108535 PARAMETER Experiment Name: Zm_Meristem_P Parameter: Plant Line Value: 35A19
  misc_feature: MA Experiment 108535 PARAMETER Experiment Name: Zm_Meristem_P Parameter: Tissue Value: Root Meristem vs. Above Root Meristem
  misc_feature: MA Experiment ID: 108536 Result: Up-regulated in Transcription
  misc_feature: MA Experiment 108536 PARAMETER Experiment Name: Zm_Meristem_P Parameter: Age (day) Value: 8
  misc_feature: MA Experiment 108536 PARAMETER Experiment Name: Zm_Meristem_P Parameter: Organism Value: Zea mays
  misc_feature: MA Experiment 108536 PARAMETER Experiment Name: Zm_Meristem_P Parameter: Plant Line Value: 35A19
  misc_feature: MA Experiment 108536 PARAMETER Experiment Name: Zm_Meristem_P Parameter: Tissue Value: Shoot Meristem vs. Above Shoot Meristem
  misc_feature: MA Experiment ID: 108540 Result: Up-regulated in Transcription
  misc_feature: MA Experiment 108540 PARAMETER Experiment Name: Zm_20percent_PEG_P Parameter: Age (day) Value: 8
  misc_feature: MA Experiment 108540 PARAMETER Experiment Name: Zm_20percent_PEG_P Parameter: Organism Value: Zea mays
  misc_feature: MA Experiment 108540 PARAMETER Experiment Name: Zm_20percent_PEG_P Parameter: Plant Line Value: 35A19
  misc_feature: MA Experiment 108540 PARAMETER Experiment Name: Zm_20percent_PEG_P Parameter: Timepoint (hr) Value: 6
  misc_feature: MA Experiment 108540 PARAMETER Experiment Name: Zm_20percent_PEG_P Parameter: Tissue Value: Aerial
  misc_feature: MA Experiment 108540 PARAMETER Experiment Name: Zm_20percent_PEG_P Parameter: Treatment Value: 20percent PEG vs. No Treatment
  misc_feature: MA Experiment ID: 108543 Result: Down-regulated in Transcription
  misc_feature: MA Experiment ID: 108545 Result: Down-regulated in Transcription
  misc_feature: MA Experiment 108545 PARAMETER Experiment Name: Zm_Imbibed_Seeds_P Parameter: Age (day) Value: 3 vs. 2
  misc_feature: MA Experiment 108545 PARAMETER Experiment Name: Zm_Imbibed_Seeds_P Parameter: Organism Value: Zea mays
  misc_feature: MA Experiment 108545 PARAMETER Experiment Name: Zm_Imbibed_Seeds_P Parameter: Plant Line Value: 35A19
  misc_feature: MA Experiment 108545 PARAMETER Experiment Name: Zm_Imbibed_Seeds_P Parameter: Tissue Value: Aerial vs. Embryo
  misc_feature: MA Experiment ID: 108556 Result: Up-regulated in Transcription
  misc_feature: MA Experiment 108556 PARAMETER Experiment Name: Zm_Drought_P Parameter: Age (day) Value: 9
  misc_feature: MA Experiment 108556 PARAMETER Experiment Name: Zm_Drought_P Parameter: Organism Value: Zea mays
  misc_feature: MA Experiment 108556 PARAMETER Experiment Name: Zm_Drought_P Parameter: Plant Line Value: 35A19
  misc_feature: MA Experiment 108556 PARAMETER Experiment Name: Zm_Drought_P Parameter: Timepoint (hr) Value: 24
  misc_feature: MA Experiment 108556 PARAMETER Experiment Name: Zm_Drought_P Parameter: Tissue Value: Aerial
  misc_feature: MA Experiment 108556 PARAMETER Experiment Name: Zm_Drought_P Parameter: Treatment Value: Drought vs. No Drought
  misc_feature: MA Experiment ID: 108597 Result: Up-regulated in Transcription
  misc_feature: MA Experiment 108597 PARAMETER Experiment Name: Zm_100uM_ABA_P Parameter: Age (day) Value: 9
  misc_feature: MA Experiment 108597 PARAMETER Experiment Name: Zm_100uM_ABA_P Parameter: Organism Value: Zea mays
  misc_feature: MA Experiment 108597 PARAMETER Experiment Name: Zm_100uM_ABA_P Parameter: Plant Line Value: 35A19
  misc_feature: MA Experiment 108597 PARAMETER Experiment Name: Zm_100uM_ABA_P Parameter: Timepoint (hr) Value: 24
  misc_feature: MA Experiment 108597 PARAMETER Experiment Name: Zm_100uM_ABA_P Parameter: Tissue Value: Aerial
  misc_feature: MA Experiment 108597 PARAMETER Experiment Name: Zm_100uM_ABA_P Parameter: Treatment Value: 100uM ABA vs. No Treatment
  misc_feature: MA Experiment ID: 108689 Result: Up-regulated in Transcription
  misc_feature: MA Experiment 108689 PARAMETER Experiment Name: Zm_Drought_Roots_P Parameter: Age (day) Value: 9
  misc_feature: MA Experiment 108689 PARAMETER Experiment Name: Zm_Drought_Roots_P Parameter: Organism Value: Zea mays
  misc_feature: MA Experiment 108689 PARAMETER Experiment Name: Zm_Drought_Roots_P Parameter: Plant Line Value: 35A19
  misc_feature: MA Experiment 108689 PARAMETER Experiment Name: Zm_Drought_Roots_P Parameter: Timepoint (hr) Value: 24
  misc_feature: MA Experiment 108689 PARAMETER Experiment Name: Zm_Drought_Roots_P Parameter: Tissue Value: Roots
  misc_feature: MA Experiment 108689 PARAMETER Experiment Name: Zm_Drought_Roots_P Parameter: Treatment Value: Drought vs. No Drought
  misc_feature: MA Experiment ID: 20000479 Result: Up-regulated in Transcription
  misc_feature: MA Experiment 20000479 PARAMETER Experiment Name: Zm_Drought_P Parameter: Age (day) Value: 10
  misc_feature: MA Experiment 20000479 PARAMETER Experiment Name: Zm_Drought_P Parameter: Organism Value: Zea mays
  misc_feature: MA Experiment 20000479 PARAMETER Experiment Name: Zm_Drought_P Parameter: Plant Line Value: 35A19
  misc_feature: MA Experiment 20000479 PARAMETER Experiment Name: Zm_Drought_P Parameter: Timepoint (hr) Value: 48
  misc_feature: MA Experiment 20000479 PARAMETER Experiment Name: Zm_Drought_P Parameter: Tissue Value: Aerial
  misc_feature: MA Experiment 20000479 PARAMETER Experiment Name: Zm_Drought_P Parameter: Treatment Value: Drought vs. No Drought
  misc_feature: MA Experiment ID: 20000480 Result: Up-regulated in Transcription
  misc_feature: MA Experiment 20000480 PARAMETER Experiment Name: Zm_Drought_P Parameter: Age (day) Value: 11
  misc_feature: MA Experiment 20000480 PARAMETER Experiment Name: Zm_Drought_P Parameter: Organism Value: Zea mays
  misc_feature: MA Experiment 20000480 PARAMETER Experiment Name: Zm_Drought_P Parameter: Plant Line Value: 35A19
  misc_feature: MA Experiment 20000480 PARAMETER Experiment Name: Zm_Drought_P Parameter: Timepoint (hr) Value: 72
  misc_feature: MA Experiment 20000480 PARAMETER Experiment Name: Zm_Drought_P Parameter: Tissue Value: Aerial
  misc_feature: MA Experiment 20000480 PARAMETER Experiment Name: Zm_Drought_P Parameter: Treatment Value: Drought vs. No Drought
  misc_feature: MA Experiment ID: 20000488 Result: Up-regulated in Transcription
  misc_feature: MA Experiment 20000488 PARAMETER Experiment Name: Zm_50mM_NH4NO3_L_to_H_P Parameter: Organism Value: Zea mays
  misc_feature: MA Experiment 20000488 PARAMETER Experiment Name: Zm_50mM_NH4NO3_L_to_H_P Parameter: Timepoint (hr) Value: 8
  misc_feature: MA Experiment 20000488 PARAMETER Experiment Name: Zm_50mM_NH4NO3_L_to_H_P Parameter: Tissue Value: Leaves
  misc_feature: MA Experiment 20000488 PARAMETER Experiment Name: Zm_50mM_NH4NO3_L_to_H_P Parameter: Treatment Value: 50mM NH4NO3 vs. 100mM Mannitol
  misc_feature: MA Experiment ID: 20000535 Result: Up-regulated in Transcription
  misc_feature: MA Experiment 20000535 PARAMETER Experiment Name: Zm_Hybrid_Seed_Dev_P Parameter: DAP Value: 30 vs. 12
  misc_feature: MA Experiment 20000535 PARAMETER Experiment Name: Zm_Hybrid_Seed_Dev_P Parameter: Organism Value: Zea mays
  misc_feature: MA Experiment 20000535 PARAMETER Experiment Name: Zm_Hybrid_Seed_Dev_P Parameter: Plant Line Value: 35A19
  misc_feature: MA Experiment 20000535 PARAMETER Experiment Name: Zm_Hybrid_Seed_Dev_P Parameter: Tissue Value: Embryo vs. Unfert Floret
ggactgcgatggctcgtgcgctcggcgcttgcgtgctgctcgccgtcctgctcggtgccctggcggcggcggccgcgcgcggcccacgacgaccagggcagcggggccggcatacggcagccgagcggcgagtaccgcgggaggaaggtgggggccaggacggaggtgcgggacgtggagggcgacggcgaggtgcaggagctcggccggttctccgtcgccgagtacaaccggcagctccgagaaggcggcggcaggctcgagttcggcagggtggtggcggcgcagcggcaggtggtgtcggggctcaagtactacctccgcgtcgtggccgtggaggagggcggcggcgcggggaacggcggcgagcgcgtgttcgacgccgtcgtcgtcgtcaagccctggctcgactcgcgcaccctgctcacgttcgcgccggcggccgccaagtaagcgcggcgctaccgccggtgtagacgtctagtgtagtatctctggtctgcccttctcggagaccatggacgctgaataaagtcttgtgtgttttgtataagcgaagcgtactagagagtgaagatggacgaactctgcgctgccgcgcgcagatcgatgttttttttttcaaaggctgttgc

SEQ ID NO: 18546 - protein, 160 aa, Zea mays subsp. mays
  peptide (1)..(160): Ceres Seq. ID no. 12417964
DCDGSCARRLRAARRPARCPGGGGRARPTTTRAAGPAYGSRAASTAGGRWGPGRRCGTWRATARCRSSAGSPSPSTTGSSEKAAAGSSSAGWWRRSGRWCRGSSTTSASWPWRRAAARGTAASACSTPSSSSSPGSTRAPCSRSRRRPPSKRGATAGVDV

SEQ ID NO: 18547 - protein, 157 aa, Zea mays subsp. mays
  peptide (1)..(157): Ceres Seq. ID no. 12417965
  misc_feature (19)..(147): Homolog of NCBI NO: 34914486 NR Description: B1080D07.24 [Oryza sativa (japonica
  misc_feature (19)..(154): Homolog of NCBI NO: 34393960 NR Description: hypothetical protein [Oryza sativa (japonica
  misc_feature (19)..(149): Homolog of NCBI NO: 37533408 NR Description: hypothetical protein [Oryza sativa (japonica
  misc_feature (27)..(156): Homolog of NCBI NO: 16127179 NR Description: hypothetical protein [Caulobacter crescentus
TAMARALGACVLLAVLLGALAAAAARGPRRPGQRGRHTAAERRVPREEGGGQDGGAGRGGRRRGAGARPVLRRRVQPAAPRRRRQARVRQGGGGAAAGGVGAQVLPPRRGRGGGRRRGERRRARVRRRRRRQALARLAHPAHVRAGGRQVSAALPPV

SEQ ID NO: 18548 - protein, 155 aa, Zea mays subsp. mays
  peptide (1)..(155): Ceres Seq. ID no. 12417966
  misc_feature (17)..(147): Homolog of NCBI NO: 37533408 NR Description: hypothetical protein [Oryza sativa (japonica
  misc_feature (25)..(154): Homolog of NCBI NO: 16127179 NR Description: hypothetical protein [Caulobacter crescentus
  misc_feature (17)..(145): Homolog of NCBI NO: 34914486 NR Description: B1080D07.24 [Oryza sativa (japonica
  misc_feature (17)..(152): Homolog of NCBI NO: 34393960 NR Description: hypothetical protein [Oryza sativa (japonica
MARALGACVLLAVLLGALAAAAARGPRRPGQRGRHTAAERRVPREEGGGQDGGAGRGGRRRGAGARPVLRRRVQPAAPRRRRQARVRQGGGGAAAGGVGAQVLPPRRGRGGGRRRGERRRARVRRRRRRQALARLAHPAHVRAGGRQVSAALPPV

SEQ ID NO: 18549 - protein, 150 aa, Zea mays subsp. mays
  peptide (1)..(150): Ceres Seq. ID no. 12417967
  misc_feature (50)..(146): Homolog of NCBI NO: 22001329 NR Description: cysteine proteinase inhibitor [Colocasia
  misc_feature (57)..(147): Homolog of NCBI NO: 18874516 NR Description: cystatin [Sandersonia aurantiaca]
  misc_feature (50)..(149): Homolog of NCBI NO: 21593036 NR Description: putative cysteine proteinase inhibitor B
  misc_feature (50)..(149): Homolog of NCBI NO: 15225164 NR Description: putative cysteine proteinase inhibitor B
  misc_feature (38)..(147): Homolog of NCBI NO: 7438233 NR Description: cysteine proteinase inhibitor, extracellular -
  misc_feature (51)..(147): Homolog of NCBI NO: 7438236 NR Description: cysteine proteinase inhibitor - common sunflower
  misc_feature (51)..(147): Homolog of NCBI NO: 1706277 NR Description: CYSTEINE PROTEINASE INHIBITOR B (CYSTATIN B)
  misc_feature (47)..(150): Homolog of NCBI NO: 27728729 NR Description: cystatin [Malus x domestica]
  misc_feature (27)..(149): Homolog of NCBI NO: 32489926 NR Description: OSJNBa0038P21.11 [Oryza sativa (japonica
  misc_feature (28)..(148): Homolog of NCBI NO: 34906946 NR Description: cysteine proteinase inhibitor Scb-like protein
GLRWLVRSALACCSPSCSVPWRRRPRAAHDDQGSGAGIRQPSGEYRGRKVGARTEVRDVEGDGEVQELGRFSVAEYNRQLREGGGRLEFGRVVAAQRQVVSGLKYYLRVVAVEEGGGAGNGGERVFDAVVVVKPWLDSRTLLTFAPAAAK

SEQ ID NO: 18550 - DNA, 456 bp, Zea mays subsp. mays; identical to SEQ ID NO: 15556
  misc_feature (1)..(456): Ceres Seq. ID no. 12595566
  misc_feature: MA Experiment ID: 108535 Result: Up-regulated in Transcription
  misc_feature: MA Experiment 108535 PARAMETER Experiment Name: Zm_Meristem_P Parameter: Age (day) Value: 8
  misc_feature: MA Experiment 108535 PARAMETER Experiment Name: Zm_Meristem_P Parameter: Organism Value: Zea mays
  misc_feature: MA Experiment 108535 PARAMETER Experiment Name: Zm_Meristem_P Parameter: Plant Line Value: 35A19
  misc_feature: MA Experiment 108535 PARAMETER Experiment Name: Zm_Meristem_P Parameter: Tissue Value: Root Meristem vs. Above Root Meristem
  misc_feature: MA Experiment ID: 108556 Result: Down-regulated in Transcription
  misc_feature: MA Experiment 108556 PARAMETER Experiment Name: Zm_Drought_P Parameter: Age (day) Value: 9
  misc_feature: MA Experiment 108556 PARAMETER Experiment Name: Zm_Drought_P Parameter: Organism Value: Zea mays
  misc_feature: MA Experiment 108556 PARAMETER Experiment Name: Zm_Drought_P Parameter: Plant Line Value: 35A19
  misc_feature: MA Experiment 108556 PARAMETER Experiment Name: Zm_Drought_P Parameter: Timepoint (hr) Value: 24
  misc_feature: MA Experiment 108556 PARAMETER Experiment Name: Zm_Drought_P Parameter: Tissue Value: Aerial
  misc_feature: MA Experiment 108556 PARAMETER Experiment Name: Zm_Drought_P Parameter: Treatment Value: Drought vs. No Drought
  misc_feature: MA Experiment ID: 20000108 Result: Up-regulated in Transcription
  misc_feature: MA Experiment 20000108 PARAMETER Experiment Name: Zm_Root-Tips_P Parameter: Age (day) Value: 12
  misc_feature: MA Experiment 20000108 PARAMETER Experiment Name: Zm_Root-Tips_P Parameter: Organism Value: Zea mays
  misc_feature: MA Experiment 20000108 PARAMETER Experiment Name: Zm_Root-Tips_P Parameter: Tissue Value: Root tips vs. Root mid region    35
  misc_feature: MA Experiment 20000108 PARAMETER Experiment Name: Zm_Root-Tips_P Parameter: Tissue Value: Root tips vs. Root mid region   Sequence Listing-Misc Features (4)
  misc_feature: MA Experiment ID: 20000478 Result: Down-regulated in Transcription
  misc_feature: MA Experiment 20000478 PARAMETER Experiment Name: Zm_5mM_SA_P Parameter: Age (day) Value: 11
  misc_feature: MA Experiment 20000478 PARAMETER Experiment Name: Zm_5mM_SA_P Parameter: Organism Value: Zea mays
  misc_feature: MA Experiment 20000478 PARAMETER Experiment Name: Zm_5mM_SA_P Parameter: Plant Line Value: 35A19
  misc_feature: MA Experiment 20000478 PARAMETER Experiment Name: Zm_5mM_SA_P Parameter: Timepoint (hr) Value: 72
  misc_feature: MA Experiment 20000478 PARAMETER Experiment Name: Zm_5mM_SA_P Parameter: Tissue Value: Aerial
  misc_feature: MA Experiment 20000478 PARAMETER Experiment Name: Zm_5mM_SA_P Parameter: Treatment Value: 5mM SA vs. No Treatment
  misc_feature: MA Experiment ID: 20000479 Result: Down-regulated in Transcription
  misc_feature: MA Experiment 20000479 PARAMETER Experiment Name: Zm_Drought_P Parameter: Age (day) Value: 10
  misc_feature: MA Experiment 20000479 PARAMETER Experiment Name: Zm_Drought_P Parameter: Organism Value: Zea mays
  misc_feature: MA Experiment 20000479 PARAMETER Experiment Name: Zm_Drought_P Parameter: Plant Line Value: 35A19
  misc_feature: MA Experiment 20000479 PARAMETER Experiment Name: Zm_Drought_P Parameter: Timepoint (hr) Value: 48
  misc_feature: MA Experiment 20000479 PARAMETER Experiment Name: Zm_Drought_P Parameter: Tissue Value: Aerial
  misc_feature: MA Experiment 20000479 PARAMETER Experiment Name: Zm_Drought_P Parameter: Treatment Value: Drought vs. No Drought
  misc_feature: MA Experiment ID: 20000487 Result: Up-regulated in Transcription
  misc_feature: MA Experiment 20000487 PARAMETER Experiment Name: Zm_50mM_NH4NO3_L_to_H_P Parameter: Organism Value: Zea mays
  misc_feature: MA Experiment 20000487 PARAMETER Experiment Name: Zm_50mM_NH4NO3_L_to_H_P Parameter: Timepoint (hr) Value: 4
  misc_feature: MA Experiment 20000487 PARAMETER Experiment Name: Zm_50mM_NH4NO3_L_to_H_P Parameter: Tissue Value: Leaves
  misc_feature: MA Experiment 20000487 PARAMETER Experiment Name: Zm_50mM_NH4NO3_L_to_H_P Parameter: Treatment Value: 50mM NH4NO3 vs. 100mM Mannitol
  misc_feature: MA Experiment ID: 20000488 Result: Up-regulated in Transcription
  misc_feature: MA Experiment 20000488 PARAMETER Experiment Name: Zm_50mM_NH4NO3_L_to_H_P Parameter: Organism Value: Zea mays
  misc_feature: MA Experiment 20000488 PARAMETER Experiment Name: Zm_50mM_NH4NO3_L_to_H_P Parameter: Timepoint (hr) Value: 8
  misc_feature: MA Experiment 20000488 PARAMETER Experiment Name: Zm_50mM_NH4NO3_L_to_H_P Parameter: Tissue Value: Leaves
  misc_feature: MA Experiment 20000488 PARAMETER Experiment Name: Zm_50mM_NH4NO3_L_to_H_P Parameter: Treatment Value: 50mM NH4NO3 vs. 100mM Mannitol
  misc_feature: MA Experiment ID: 20000492 Result: Up-regulated in Transcription
  misc_feature: MA Experiment 20000492 PARAMETER Experiment Name: Zm_Hybrid_Seed_Dev_P Parameter: DAP Value: 12
  misc_feature: MA Experiment 20000492 PARAMETER Experiment Name: Zm_Hybrid_Seed_Dev_P Parameter: Organism Value: Zea mays
  misc_feature: MA Experiment 20000492 PARAMETER Experiment Name: Zm_Hybrid_Seed_Dev_P Parameter: Plant Line Value: 35A19
  misc_feature: MA Experiment 20000492 PARAMETER Experiment Name: Zm_Hybrid_Seed_Dev_P Parameter: Tissue Value: Fert Kernel vs. Unfert Floret

SEQ ID NO: 18551 - protein, 151 aa, Zea mays subsp. mays; identical to SEQ ID NO: 15557
  peptide (1)..(151): Ceres Seq. ID no. 12595567
  misc_feature (80)..(113): Pfam Name: KOW motif Pfam Description: KOW motif
  misc_feature (32)..(150): Homolog of NCBI NO: 3747050 NR Description: ribosomal protein L26 [Zea mays]
  misc_feature (32)..(150): Homolog of NCBI NO: 34895672 NR Description: putative ribosomal protein L26 [Oryza sativa
  misc_feature (32)..(150): Homolog of NCBI NO: 15229631 NR Description: 60S RIBOSOMAL PROTEIN - like; protein id: supported by cDNA: gi_16323425 [Arabidopsis thaliana]
  misc_feature (32)..(150): Homolog of NCBI NO: 15240766 NR Description: 60S ribosomal protein L26; protein id: supported by cDNA: 2561., supported by cDNA: gi_17473655, by cDNA: gi_20148598 [Arabidopsis thaliana]
  misc_feature (32)..(150): Homolog of NCBI NO: 3914740 NR Description: 60S ribosomal protein L26
  misc_feature (32)..(150): Homolog of NCBI NO: 33585605 NR Description: Unknown (protein for MGC:66190) [Danio rerio]
  misc_feature (32)..(150): Homolog of NCBI NO: 7705813 NR Description: ribosomal protein L26-like 1; ribosomal protein
  misc_feature (32)..(150): Homolog of NCBI NO: 15293919 NR Description: ribosomal protein L26 [Ictalurus punctatus]
  misc_feature (32)..(150): Homolog of NCBI NO: 292435 NR Description: ribosomal protein L26
  misc_feature (32)..(150): Homolog of NCBI NO: 28189641 NR Description: similar to ribosomal protein L26 [Bos taurus]

SEQ ID NO: 18552 - protein, 120 aa, Zea mays subsp. mays; identical to SEQ ID NO: 15558
  peptide (1)..(120): Ceres Seq. ID no. 12595568
  misc_feature (49)..(82): Pfam Name: KOW motif Pfam Description: KOW motif
  misc_feature (1)..(119): Homolog of NCBI NO: 3747050 NR Description: ribosomal protein L26 [Zea mays]
  misc_feature (1)..(119): Homolog of NCBI NO: 34895672 NR Description: putative ribosomal protein L26 [Oryza sativa
  misc_feature (1)..(119): Homolog of NCBI NO: 15229631 NR Description: 60S RIBOSOMAL PROTEIN - like; protein id: supported by cDNA: gi_16323425 [Arabidopsis thaliana]
  misc_feature (1)..(119): Homolog of NCBI NO: 15240766 NR Description: 60S ribosomal protein L26; protein id: supported by cDNA: 2561., supported by cDNA: gi_17473655, by cDNA: gi_20148598 [Arabidopsis thaliana]
  misc_feature (1)..(119): Homolog of NCBI NO: 3914740 NR Description: 60S ribosomal protein L26
  misc_feature (1)..(119): Homolog of NCBI NO: 33585605 NR Description: Unknown (protein for MGC:66190) [Danio rerio]
  misc_feature (1)..(119): Homolog of NCBI NO: 7705813 NR Description: ribosomal protein L26-like 1; ribosomal protein
  misc_feature (1)..(119): Homolog of NCBI NO: 15293919 NR Description: ribosomal protein L26 [Ictalurus punctatus]
  misc_feature (1)..(119): Homolog of NCBI NO: 292435 NR Description: ribosomal protein L26
  misc_feature (1)..(119): Homolog of NCBI NO: 28189641 NR Description: similar to ribosomal protein L26 [Bos taurus]

SEQ ID NO: 18553 - protein, 96 aa, Zea mays subsp. mays; identical to SEQ ID NO: 15559
  peptide (1)..(96): Ceres Seq. ID no. 12595569

SEQ ID NO: 18554 - DNA, 992 bp, Zea mays subsp. mays
  misc_feature (1)..(992): Ceres Seq. ID no. 12391473
  misc_feature: MA Experiment ID: 108515 Result: Up-regulated in Transcription
  misc_feature: MA Experiment 108515 PARAMETER Experiment Name: Zm_2mM_SA_P Parameter: Age (day) Value: 8
  misc_feature: MA Experiment 108515 PARAMETER Experiment Name: Zm_2mM_SA_P Parameter: Organism Value: Zea mays
  misc_feature: MA Experiment 108515 PARAMETER Experiment Name: Zm_2mM_SA_P Parameter: Plant Line Value: 35A19
  misc_feature: MA Experiment 108515 PARAMETER Experiment Name: Zm_2mM_SA_P Parameter: Timepoint (hr) Value: 12
  misc_feature: MA Experiment 108515 PARAMETER Experiment Name: Zm_2mM_SA_P Parameter: Tissue Value: Aerial
  misc_feature: MA Experiment 108515 PARAMETER Experiment Name: Zm_2mM_SA_P Parameter: Treatment Value: 2mM SA vs. No Treatment
  misc_feature: MA Experiment ID: 108528 Result: Down-regulated in Transcription
  misc_feature: MA Experiment 108528 PARAMETER Experiment Name: Zm_Imbibed_Seeds_P Parameter: Age (day) Value: 5 vs. 2
  misc_feature: MA Experiment 108528 PARAMETER Experiment Name: Zm_Imbibed_Seeds_P Parameter: Organism Value: Zea mays
  misc_feature: MA Experiment 108528 PARAMETER Experiment Name: Zm_Imbibed_Seeds_P Parameter: Plant Line Value: 35A19
  misc_feature: MA Experiment 108528 PARAMETER Experiment Name: Zm_Imbibed_Seeds_P Parameter: Tissue Value: Aerial vs. Embryo
  misc_feature: MA Experiment ID: 108530 Result: Down-regulated in Transcription
  misc_feature: MA Experiment 108530 PARAMETER Experiment Name: Zm_Imbibed_Seeds_P Parameter: Age (day) Value: 6 vs. 2
  misc_feature: MA Experiment 108530 PARAMETER Experiment Name: Zm_Imbibed_Seeds_P Parameter: Organism Value: Zea mays
  misc_feature: MA Experiment 108530 PARAMETER Experiment Name: Zm_Imbibed_Seeds_P Parameter: Plant Line Value: 35A19
  misc_feature: MA Experiment 108530 PARAMETER Experiment Name: Zm_Imbibed_Seeds_P Parameter: Tissue Value: Aerial vs. Embryo
  misc_feature: MA Experiment ID: 108534 Result: Down-regulated in Transcription
  misc_feature: MA Experiment 108534 PARAMETER Experiment Name: Zm_4deg_Cold_P Parameter: Age (hr) Value: 8
  misc_feature: MA Experiment 108534 PARAMETER Experiment Name: Zm_4deg_Cold_P Parameter: Organism Value: Zea mays
  misc_feature: MA Experiment 108534 PARAMETER Experiment Name: Zm_4deg_Cold_P Parameter: Plant Line Value: 35A19
  misc_feature: MA Experiment 108534 PARAMETER Experiment Name: Zm_4deg_Cold_P Parameter: Temperature (deg C) Value: 4 vs. 22
  misc_feature: MA Experiment 108534 PARAMETER Experiment Name: Zm_4deg_Cold_P Parameter: Timepoint (hr) Value: 6
  misc_feature: MA Experiment 108534 PARAMETER Experiment Name: Zm_4deg_Cold_P Parameter: Tissue Value: Aerial
  misc_feature: MA Experiment ID: 108535 Result: Down-regulated in Transcription
  misc_feature: MA Experiment 108535 PARAMETER Experiment Name: Zm_Meristem_P Parameter: Age (day) Value: 8
  misc_feature: MA Experiment 108535 PARAMETER Experiment Name: Zm_Meristem_P Parameter: Organism Value: Zea mays
  misc_feature: MA Experiment 108535 PARAMETER Experiment Name: Zm_Meristem_P Parameter: Plant Line Value: 35A19
  misc_feature: MA Experiment 108535 PARAMETER Experiment Name: Zm_Meristem_P Parameter: Tissue Value: Root Meristem vs. Above Root Meristem
  misc_feature: MA Experiment ID: 20000108 Result: Down-regulated in Transcription
  misc_feature: MA Experiment 20000108 PARAMETER Experiment Name: Zm_Root-Tips_P Parameter: Age (day) Value: 12
  misc_feature: MA Experiment 20000108 PARAMETER Experiment Name: Zm_Root-Tips_P Parameter: Organism Value: Zea mays
  misc_feature: MA Experiment 20000108 PARAMETER Experiment Name: Zm_Root-Tips_P Parameter: Tissue Value: Root tips vs. Root mid region    35
  misc_feature: MA Experiment 20000108 PARAMETER Experiment Name: Zm_Root-Tips_P Parameter: Tissue Value: Root tips vs. Root mid region   Sequence Listing-Misc Features (4)
  misc_feature: MA Experiment ID: 20000477 Result: Up-regulated in Transcription
  misc_feature: MA Experiment 20000477 PARAMETER Experiment Name: Zm_5mM_SA_P Parameter: Age (day) Value: 10
  misc_feature: MA Experiment 20000477 PARAMETER Experiment Name: Zm_5mM_SA_P Parameter: Organism Value: Zea mays
  misc_feature: MA Experiment 20000477 PARAMETER Experiment Name: Zm_5mM_SA_P Parameter: Plant Line Value: 35A19
  misc_feature: MA Experiment 20000477 PARAMETER Experiment Name: Zm_5mM_SA_P Parameter: Timepoint (hr) Value: 48
  misc_feature: MA Experiment 20000477 PARAMETER Experiment Name: Zm_5mM_SA_P Parameter: Tissue Value: Aerial
  misc_feature: MA Experiment 20000477 PARAMETER Experiment Name: Zm_5mM_SA_P Parameter: Treatment Value: 5mM SA vs. No Treatment
  misc_feature: MA Experiment ID: 20000478 Result: Up-regulated in Transcription
  misc_feature: MA Experiment 20000478 PARAMETER Experiment Name: Zm_5mM_SA_P Parameter: Age (day) Value: 11
  misc_feature: MA Experiment 20000478 PARAMETER Experiment Name: Zm_5mM_SA_P Parameter: Organism Value: Zea mays
  misc_feature: MA Experiment 20000478 PARAMETER Experiment Name: Zm_5mM_SA_P Parameter: Plant Line Value: 35A19
  misc_feature: MA Experiment 20000478 PARAMETER Experiment Name: Zm_5mM_SA_P Parameter: Timepoint (hr) Value: 72
  misc_feature: MA Experiment 20000478 PARAMETER Experiment Name: Zm_5mM_SA_P Parameter: Tissue Value: Aerial
  misc_feature: MA Experiment 20000478 PARAMETER Experiment Name: Zm_5mM_SA_P Parameter: Treatment Value: 5mM SA vs. No Treatment
  misc_feature: MA Experiment ID: 20000479 Result: Up-regulated in Transcription
  misc_feature: MA Experiment 20000479 PARAMETER Experiment Name: Zm_Drought_P Parameter: Age (day) Value: 10
  misc_feature: MA Experiment 20000479 PARAMETER Experiment Name: Zm_Drought_P Parameter: Organism Value: Zea mays
  misc_feature: MA Experiment 20000479 PARAMETER Experiment Name: Zm_Drought_P Parameter: Plant Line Value: 35A19
  misc_feature: MA Experiment 20000479 PARAMETER Experiment Name: Zm_Drought_P Parameter: Timepoint (hr) Value: 48
  misc_feature: MA Experiment 20000479 PARAMETER Experiment Name: Zm_Drought_P Parameter: Tissue Value: Aerial
  misc_feature: MA Experiment 20000479 PARAMETER Experiment Name: Zm_Drought_P Parameter: Treatment Value: Drought vs. No Drought
  misc_feature: MA Experiment ID: 20000488 Result: Down-regulated in Transcription
  misc_feature: MA Experiment 20000488 PARAMETER Experiment Name: Zm_50mM_NH4NO3_L_to_H_P Parameter: Organism Value: Zea mays
  misc_feature: MA Experiment 20000488 PARAMETER Experiment Name: Zm_50mM_NH4NO3_L_to_H_P Parameter: Timepoint (hr) Value: 8
  misc_feature: MA Experiment 20000488 PARAMETER Experiment Name: Zm_50mM_NH4NO3_L_to_H_P Parameter: Tissue Value: Leaves
  misc_feature: MA Experiment 20000488 PARAMETER Experiment Name: Zm_50mM_NH4NO3_L_to_H_P Parameter: Treatment Value: 50mM NH4NO3 vs. 100mM Mannitol
gcacgagaccattacctagaacatcctaatcgaaaagatcgaagtgtgcttgcgtcctgatcccaccaaccgcagaggacagaggaccatggagagcggcacggagcggcggcggcaccacttcgtgctggtgcacggcacctgccacggcgcgtggtgctggtacaaggtggccaccctcctgtcatccgcgggccaccgcgtgacggcgctggacatggccgcgtgcggcgccagccccgggcgcgccgaggaggtgccgtcctttgaggagtacagccgcccgctcctggccacggtggccggcctggcgcccgaggagaaggtggtcctcgtcggccacagcttcggcggggtcagcctcgcgctggccatggagcagtacccggacagggtcgccgtcgccgtcttcgtcgcgaccggcatgccctccgctgggaagccgatggcgttcgtcttcgagcagtttttgcaagaagagtacccagcggaccgctacatggactgcgaattcgaaaccagcggcgacccccagcgtcccgtggagacatttcggttcgggccacagtacctgaagcagagactgtaccagctcagccccccagaggatttgaccctggcaatggcgatgttgaggccgtcacagcggttccgagacgacgcgacgatgaaggggggcgtcctgacggcggagcggtacggcggcgtgaggcgggtgtgcgtcgtcgccgaggacgacgcgtcagtgccggcaggcttcctgcggcggatggcgtcgtggaaccccggcacggaggtgagggggttgcagggagccgatcatatgtccatgctctcgaaaccaggggagctgtcagaacttctcatggaggttgccaacaagtacagctgaaacttgtatcatgtaaatggctatcagcaaaatggttgttcaggtacgcttgtttcagatgaacaaatggagacggaagtttgaagtaacacgatgaaat

SEQ ID NO: 18555 - protein, 267 aa, Zea mays subsp. mays
  peptide (1)..(267): Ceres Seq. ID no. 12391474
  misc_feature (37)..(261): Pfam Name: alpha/beta hydrolase fold Pfam Description: alpha/beta hydrolase fold
  misc_feature (6)..(266): Homolog of NCBI NO: 27754457 NR Description: putative acetone-cyanohydrin lyase [Arabidopsis
  misc_feature (6)..(266): Homolog of NCBI NO: 15227867 NR Description: putative acetone-cyanohydrin lyase; protein id:
  misc_feature (7)..(264): Homolog of NCBI NO: 6651393 NR Description: polyneuridine aldehyde esterase [Rauvolfia
  misc_feature (172)..(266): Homolog of NCBI NO: 34907174 NR Description: putative pir7b (Pseudomonas inducible protein)
  misc_feature (1)..(118): Homolog of NCBI NO: 34907174 NR Description: putative pir7b (Pseudomonas inducible protein)
  misc_feature (11)..(267): Homolog of NCBI NO: 40549303 NR Description: salicylic acid-binding protein 2 [Nicotiana
  misc_feature (11)..(266): Homolog of NCBI NO: 2498778 NR Description: PIR7A PROTEIN
  misc_feature (11)..(266): Homolog of NCBI NO: 34907178 NR Description: pir7a protein (Pseudomonas inducible protein)
  misc_feature (9)..(266): Homolog of NCBI NO: 498747 NR Description: Pir7b [Oryza sativa]
  misc_feature (1)..(266): Homolog of NCBI NO: 34907176 NR Description: pir7b protein (Pseudomonas inducible protein)
MESGTERRRHHFVLVHGTCHGAWCWYKVATLLSSAGHRVTALDMAACGASPGRAEEVPSFEEYSRPLLATVAGLAPEEKVVLVGHSFGGVSLALAMEQYPDRVAVAVFVATGMPSAGKPMAFVFEQFLQEEYPADRYMDCEFETSGDPQRPVETFRFGPQYLKQRLYQLSPPEDLTLAMAMLRPSQRFRDDATMKGGVLTAERYGGVRRVCVVAEDDASVPAGFLRRMASWNPGTEVRGLQGADHMSMLSKPGELSELLMEVANKYS

SEQ ID NO: 18556 - protein, 224 aa, Zea mays subsp. mays
  peptide (1)..(224): Ceres Seq. ID no. 12391475
  misc_feature (1)..(218): Pfam Name: alpha/beta hydrolase fold Pfam Description: alpha/beta hydrolase fold
  misc_feature (1)..(223): Homolog of NCBI NO: 27754457 NR Description: putative acetone-cyanohydrin lyase [Arabidopsis
  misc_feature (1)..(223): Homolog of NCBI NO: 15227867 NR Description: putative acetone-cyanohydrin lyase; protein id:
  misc_feature (1)..(221): Homolog of NCBI NO: 6651393 NR Description: polyneuridine aldehyde esterase [Rauvolfia
  misc_feature (129)..(223): Homolog of NCBI NO: 34907174 NR Description: putative pir7b (Pseudomonas inducible protein)
  misc_feature (1)..(75): Homolog of NCBI NO: 34907174 NR Description: putative pir7b (Pseudomonas inducible protein)
  misc_feature (1)..(224): Homolog of NCBI NO: 40549303 NR Description: salicylic acid-binding protein 2 [Nicotiana
  misc_feature (1)..(223): Homolog of NCBI NO: 2498778 NR Description: PIR7A PROTEIN
  misc_feature (1)..(223): Homolog of NCBI NO: 34907178 NR Description: pir7a protein (Pseudomonas inducible protein)
  misc_feature (1)..(223): Homolog of NCBI NO: 498747 NR Description: Pir7b [Oryza sativa]
  misc_feature (1)..(223): Homolog of NCBI NO: 34907176 NR Description: pir7b protein (Pseudomonas inducible protein)
MAACGASPGRAEEVPSFEEYSRPLLATVAGLAPEEKVVLVGHSFGGVSLALAMEQYPDRVAVAVFVATGMPSAGKPMAFVFEQFLQEEYPADRYMDCEFETSGDPQRPVETFRFGPQYLKQRLYQLSPPEDLTLAMAMLRPSQRFRDDATMKGGVLTAERYGGVRRVCVVAEDDASVPAGFLRRMASWNPGTEVRGLQGADHMSMLSKPGELSELLMEVANKYS

SEQ ID NO: 18557 - protein, 172 aa, Zea mays subsp. mays
  peptide (1)..(172): Ceres Seq. ID no. 12391476
  misc_feature (1)..(166): Pfam Name: alpha/beta hydrolase fold Pfam Description: alpha/beta hydrolase fold
  misc_feature (1)..(171): Homolog of NCBI NO: 27754457 NR Description: putative acetone-cyanohydrin lyase [Arabidopsis
  misc_feature (1)..(171): Homolog of NCBI NO: 15227867 NR Description: putative acetone-cyanohydrin lyase; protein id:
  misc_feature (1)..(169): Homolog of NCBI NO: 6651393 NR Description: polyneuridine aldehyde esterase [Rauvolfia
  misc_feature (77)..(171): Homolog of NCBI NO: 34907174 NR Description: putative pir7b (Pseudomonas inducible protein)
  misc_feature (1)..(23): Homolog of NCBI NO: 34907174 NR Description: putative pir7b (Pseudomonas inducible protein)
  misc_feature (1)..(172): Homolog of NCBI NO: 40549303 NR Description: salicylic acid-binding protein 2 [Nicotiana
  misc_feature (1)..(171): Homolog of NCBI NO: 2498778 NR Description: PIR7A PROTEIN
  misc_feature (1)..(171): Homolog of NCBI NO: 34907178 NR Description: pir7a protein (Pseudomonas inducible protein)
  misc_feature (1)..(171): Homolog of NCBI NO: 498747 NR Description: Pir7b [Oryza sativa]
  misc_feature (1)..(171): Homolog of NCBI NO: 34907176 NR Description: pir7b protein (Pseudomonas inducible protein)
MEQYPDRVAVAVFVATGMPSAGKPMAFVFEQFLQEEYPADRYMDCEFETSGDPQRPVETFRFGPQYLKQRLYQLSPPEDLTLAMAMLRPSQRFRDDATMKGGVLTAERYGGVRRVCVVAEDDASVPAGFLRRMASWNPGTEVRGLQGADHMSMLSKPGELSELLMEVANKYS

SEQ ID NO: 18558 - DNA, 717 bp, Zea mays subsp. mays
  misc_feature (1)..(717): Ceres Seq. ID no. 12384292
  misc_feature: MA Experiment ID: 108515 Result: Down-regulated in Transcription
  misc_feature: MA Experiment 108515 PARAMETER Experiment Name: Zm_2mM_SA_P Parameter: Age (day) Value: 8
  misc_feature: MA Experiment 108515 PARAMETER Experiment Name: Zm_2mM_SA_P Parameter: Organism Value: Zea mays
  misc_feature: MA Experiment 108515 PARAMETER Experiment Name: Zm_2mM_SA_P Parameter: Plant Line Value: 35A19
  misc_feature: MA Experiment 108515 PARAMETER Experiment Name: Zm_2mM_SA_P Parameter: Timepoint (hr) Value: 12
  misc_feature: MA Experiment 108515 PARAMETER Experiment Name: Zm_2mM_SA_P Parameter: Tissue Value: Aerial
  misc_feature: MA Experiment 108515 PARAMETER Experiment Name: Zm_2mM_SA_P Parameter: Treatment Value: 2mM SA vs. No Treatment
  misc_feature: MA Experiment ID: 108535 Result: Down-regulated in Transcription
  misc_feature: MA Experiment 108535 PARAMETER Experiment Name: Zm_Meristem_P Parameter: Age (day) Value: 8
  misc_feature: MA Experiment 108535 PARAMETER Experiment Name: Zm_Meristem_P Parameter: Organism Value: Zea mays
  misc_feature: MA Experiment 108535 PARAMETER Experiment Name: Zm_Meristem_P Parameter: Plant Line Value: 35A19
  misc_feature: MA Experiment 108535 PARAMETER Experiment Name: Zm_Meristem_P Parameter: Tissue Value: Root Meristem vs. Above Root Meristem
  misc_feature: MA Experiment ID: 108543 Result: Up-regulated in Transcription
  misc_feature: MA Experiment ID: 108597 Result: Down-regulated in Transcription
  misc_feature: MA Experiment 108597 PARAMETER Experiment Name: Zm_100uM_ABA_P Parameter: Age (day) Value: 9
  misc_feature: MA Experiment 108597 PARAMETER Experiment Name: Zm_100uM_ABA_P Parameter: Organism Value: Zea mays
  misc_feature: MA Experiment 108597 PARAMETER Experiment Name: Zm_100uM_ABA_P Parameter: Plant Line Value: 35A19
  misc_feature: MA Experiment 108597 PARAMETER Experiment Name: Zm_100uM_ABA_P Parameter: Timepoint (hr) Value: 24
  misc_feature: MA Experiment 108597 PARAMETER Experiment Name: Zm_100uM_ABA_P Parameter: Tissue Value: Aerial
  misc_feature: MA Experiment 108597 PARAMETER Experiment Name: Zm_100uM_ABA_P Parameter: Treatment Value: 100uM ABA vs. No Treatment
  misc_feature: MA Experiment ID: 108689 Result: Down-regulated in Transcription
  misc_feature: MA Experiment 108689 PARAMETER Experiment Name: Zm_Drought_Roots_P Parameter: Age (day) Value: 9
  misc_feature: MA Experiment 108689 PARAMETER Experiment Name: Zm_Drought_Roots_P Parameter: Organism Value: Zea mays
  misc_feature: MA Experiment 108689 PARAMETER Experiment Name: Zm_Drought_Roots_P Parameter: Plant Line Value: 35A19
  misc_feature: MA Experiment 108689 PARAMETER Experiment Name: Zm_Drought_Roots_P Parameter: Timepoint (hr) Value: 24
  misc_feature: MA Experiment 108689 PARAMETER Experiment Name: Zm_Drought_Roots_P Parameter: Tissue Value: Roots
  misc_feature: MA Experiment 108689 PARAMETER Experiment Name: Zm_Drought_Roots_P Parameter: Treatment Value: Drought vs. No Drought
  misc_feature: MA Experiment ID: 20000478 Result: Down-regulated in Transcription
  misc_feature: MA Experiment 20000478 PARAMETER Experiment Name: Zm_5mM_SA_P Parameter: Age (day) Value: 11
  misc_feature: MA Experiment 20000478 PARAMETER Experiment Name: Zm_5mM_SA_P Parameter: Organism Value: Zea mays
  misc_feature: MA Experiment 20000478 PARAMETER Experiment Name: Zm_5mM_SA_P Parameter: Plant Line Value: 35A19
  misc_feature: MA Experiment 20000478 PARAMETER Experiment Name: Zm_5mM_SA_P Parameter: Timepoint (hr) Value: 72
  misc_feature: MA Experiment 20000478 PARAMETER Experiment Name: Zm_5mM_SA_P Parameter: Tissue Value: Aerial
  misc_feature: MA Experiment 20000478 PARAMETER Experiment Name: Zm_5mM_SA_P Parameter: Treatment Value: 5mM SA vs. No Treatment
  misc_feature: MA Experiment ID: 20000479 Result: Down-regulated in Transcription
  misc_feature: MA Experiment 20000479 PARAMETER Experiment Name: Zm_Drought_P Parameter: Age (day) Value: 10
  misc_feature: MA Experiment 20000479 PARAMETER Experiment Name: Zm_Drought_P Parameter: Organism Value: Zea mays
  misc_feature: MA Experiment 20000479 PARAMETER Experiment Name: Zm_Drought_P Parameter: Plant Line Value: 35A19
  misc_feature: MA Experiment 20000479 PARAMETER Experiment Name: Zm_Drought_P Parameter: Timepoint (hr) Value: 48
  misc_feature: MA Experiment 20000479 PARAMETER Experiment Name: Zm_Drought_P Parameter: Tissue Value: Aerial
  misc_feature: MA Experiment 20000479 PARAMETER Experiment Name: Zm_Drought_P Parameter: Treatment Value: Drought vs. No Drought
  misc_feature: MA Experiment ID: 20000480 Result: Down-regulated in Transcription
  misc_feature: MA Experiment 20000480 PARAMETER Experiment Name: Zm_Drought_P Parameter: Age (day) Value: 11
  misc_feature: MA Experiment 20000480 PARAMETER Experiment Name: Zm_Drought_P Parameter: Organism Value: Zea mays
  misc_feature: MA Experiment 20000480 PARAMETER Experiment Name: Zm_Drought_P Parameter: Plant Line Value: 35A19
  misc_feature: MA Experiment 20000480 PARAMETER Experiment Name: Zm_Drought_P Parameter: Timepoint (hr) Value: 72
  misc_feature: MA Experiment 20000480 PARAMETER Experiment Name: Zm_Drought_P Parameter: Tissue Value: Aerial
  misc_feature: MA Experiment 20000480 PARAMETER Experiment Name: Zm_Drought_P Parameter: Treatment Value: Drought vs. No Drought
gcacgagaccattacctagaacatcctaatcaaaaacagaagtgtgctcgaaggtcgggctctgcacgttcgatgggacacgcggagtaagtgctgctggcatcgagagtgtaccgggatccgtagacggcatggcggaagctctatgcaacgcgtgcgagatagtagtgttctggacgcaaagcgagctgagcccgaacaggagcaacgagggcacgctggagtacgtggacaggctctgcgaaagcatgcccgatccggtggggtcgcgcgtggactgcggacgcgtgggttccctgcagaccgttgcgttcagcatcggtggaagggcgttcgagctccggcctgaccagtacgtcctcaaggtcggcgaggggttcgccgcgcactgcatcagcgggttcacggctctggacgtgccccctccggtaggccctctgtggatactgggtgacgtcttcatggagcctaccataccatctttgactacggcaagatgaggatcgggttcgcagattccgcgtgagacacgggcgttcttccactaatgaccgcgaccactatagctgcagtatgttcctcagagaagccctgcgtggtgtagtgctggattttcactactacgccctgcagagcttttctcgagcttctgtagagcacatacactacgcgcaggacaaatgtgtatcgctgcatcgagaaagaaataaaggaaac

SEQ ID NO: 18559 - protein, 122 aa, Zea mays subsp. mays
  peptide (1)..(122): Ceres Seq. ID no. 12384293
  misc_feature (1)..(111): Pfam Name: Eukaryotic aspartyl protease Pfam Description: Eukaryotic aspartyl protease
  misc_feature (1)..(111): Homolog of NCBI NO: 34912092 NR Description: putative aspartic protease
  misc_feature (1)..(111): Homolog of NCBI NO: 12231174 NR Description: aspartic proteinase 2 [Nepenthes alata]
  misc_feature (1)..(111): Homolog of NCBI NO: 12231176 NR Description: aspartic proteinase 3 [Nepenthes alata]
  misc_feature (1)..(111): Homolog of NCBI NO: 2499819 NR Description: Aspartic proteinase oryzasin 1 precursor
  misc_feature (1)..(113): Homolog of NCBI NO: 5822248 NR Description: Chain A, Crystal Structure Of Prophytepsin, A
  misc_feature (1)..(113): Homolog of NCBI NO: 1168536 NR Description: Phytepsin precursor (Aspartic proteinase)
  misc_feature (1)..(111): Homolog of NCBI NO: 34912970 NR Description: putative aspartic protease
MAEALCNACEIVVFWTQSELSPNRSNEGTLEYVDRLCESMPDPVGSRVDCGRVGSLQTVAFSIGGRAFELRPDQYVLKVGEGFAAHCISGFTALDVPPPVGPLWILGDVFMEPTIPSLTTAR

SEQ ID NO: 18560 - protein, 83 aa, Zea mays subsp. mays
  peptide (1)..(83): Ceres Seq. ID no. 12384294
  misc_feature (1)..(72): Pfam Name: Eukaryotic aspartyl protease Pfam Description: Eukaryotic aspartyl protease
  misc_feature (1)..(72): Homolog of NCBI NO: 34912092 NR Description: putative aspartic protease
  misc_feature (1)..(72): Homolog of NCBI NO: 12231174 NR Description: aspartic proteinase 2 [Nepenthes alata]
  misc_feature (1)..(72): Homolog of NCBI NO: 12231176 NR Description: aspartic proteinase 3 [Nepenthes alata]
  misc_feature (1)..(72): Homolog of NCBI NO: 2499819 NR Description: Aspartic proteinase oryzasin 1 precursor
  misc_feature (1)..(74): Homolog of NCBI NO: 5822248 NR Description: Chain A, Crystal Structure Of Prophytepsin, A
  misc_feature (1)..(74): Homolog of NCBI NO: 1168536 NR Description: Phytepsin precursor (Aspartic proteinase)
  misc_feature (1)..(72): Homolog of NCBI NO: 34912970 NR Description: putative aspartic protease
MPDPVGSRVDCGRVGSLQTVAFSIGGRAFELRPDQYVLKVGEGFAAHCISGFTALDVPPPVGPLWILGDVFMEPTIPSLTTAR

SEQ ID NO: 18561 - protein, 67 aa, Zea mays subsp. mays
  peptide (1)..(67): Ceres Seq. ID no. 12384295
MQRVRDSSVLDAKRAEPEQEQRGHAGVRGQALRKHARSGGVARGLRTRGFPADRCVQHRWKGVRAPA

SEQ ID NO: 18562 - DNA, 1047 bp, Zea mays subsp. mays; identical to SEQ ID NO: 5732
  misc_feature (1)..(1047): Ceres Seq. ID no. 12565996
  misc_feature: MA Experiment ID: 20000492 Result: Down-regulated in Transcription
  misc_feature: MA Experiment 20000492 PARAMETER Experiment Name: Zm_Hybrid_Seed_Dev_P Parameter: DAP Value: 12
  misc_feature: MA Experiment 20000492 PARAMETER Experiment Name: Zm_Hybrid_Seed_Dev_P Parameter: Organism Value: Zea mays
  misc_feature: MA Experiment 20000492 PARAMETER Experiment Name: Zm_Hybrid_Seed_Dev_P Parameter: Plant Line Value: 35A19
  misc_feature: MA Experiment 20000492 PARAMETER Experiment Name: Zm_Hybrid_Seed_Dev_P Parameter: Tissue Value: Fert Kernel vs. Unfert Floret
  misc_feature: MA Experiment ID: 20000534 Result: Down-regulated in Transcription
  misc_feature: MA Experiment 20000534 PARAMETER Experiment Name: Zm_Hybrid_Pollen_P Parameter: Age (day) Value: 8
  misc_feature: MA Experiment 20000534 PARAMETER Experiment Name: Zm_Hybrid_Pollen_P Parameter: Organism Value: Zea mays
  misc_feature: MA Experiment 20000534 PARAMETER Experiment Name: Zm_Hybrid_Pollen_P Parameter: Plant Line Value: 35A19
  misc_feature: MA Experiment 20000534 PARAMETER Experiment Name: Zm_Hybrid_Pollen_P Parameter: Tissue Value: Pollen vs. Aerial

SEQ ID NO: 18563 - protein, 282 aa, Zea mays subsp. mays; identical to SEQ ID NO: 5733
  peptide (1)..(282): Ceres Seq. ID no. 12565997
  misc_feature (96)..(259): Pfam Name: Protein of unknown function (DUF985) Pfam Description: Protein of unknown function (DUF985)
  misc_feature (89)..(277): Homolog of NCBI NO: 26449699 NR Description: unknown protein [Arabidopsis thaliana]
  misc_feature (89)..(277): Homolog of NCBI NO: 25402881 NR Description: protein F14D16.29 [imported] - Arabidopsis >gi|8778289|gb|AAF79298.1|AC068602_21 F14D16.29 [Arabidopsis
  misc_feature (89)..(175): Homolog of NCBI NO: 18394699 NR Description: expressed protein; protein id: At1g19130.1, by cDNA: 17545. [Arabidopsis thaliana]
  misc_feature (96)..(216): Homolog of NCBI NO: 39995284 NR Description: conserved hypothetical protein [Geobacter PCA] >gi|39982046|gb|AAR33508.1| conserved hypothetical protein
  misc_feature (239)..(263): Homolog of NCBI NO: 39995284 NR Description: conserved hypothetical protein [Geobacter PCA] >gi|39982046|gb|AAR33508.1| conserved hypothetical protein
  misc_feature (103)..(211): Homolog of NCBI NO: 16329452 NR Description: hypothetical protein [Synechocystis sp. PCC 6803]
  misc_feature (239)..(277): Homolog of NCBI NO: 16329452 NR Description: hypothetical protein [Synechocystis sp. PCC 6803]
  misc_feature (98)..(224): Homolog of NCBI NO: 22986010 NR Description: hypothetical protein [Burkholderia fungorum]
  misc_feature (234)..(280): Homolog of NCBI NO: 22986010 NR Description: hypothetical protein [Burkholderia fungorum]
  misc_feature (103)..(227): Homolog of NCBI NO: 18310898 NR Description: conserved hypothetical protein [Clostridium >gi|18145580|dbj|BAB81622.1| conserved hypothetical protein

SEQ ID NO: 18564 - protein, 194 aa, Zea mays subsp. mays; identical to SEQ ID NO: 5734
  peptide (1)..(194): Ceres Seq. ID no. 12565998
  misc_feature (8)..(171): Pfam Name: Protein of unknown function (DUF985) Pfam Description: Protein of unknown function (DUF985)
  misc_feature (10)..(136): Homolog of NCBI NO: 22986010 NR Description: hypothetical protein [Burkholderia fungorum]
  misc_feature (146)..(192): Homolog of NCBI NO: 22986010 NR Description: hypothetical protein [Burkholderia fungorum]
  misc_feature (1)..(189): Homolog of NCBI NO: 25402881 NR Description: protein F14D16.29 [imported] - Arabidopsis >gi|8778289|gb|AAF79298.1|AC068602_21 F14D16.29 [Arabidopsis
  misc_feature (8)..(128): Homolog of NCBI NO: 39995284 NR Description: conserved hypothetical protein [Geobacter PCA] >gi|39982046|gb|AAR33508.1| conserved hypothetical protein
  misc_feature (15)..(123): Homolog of NCBI NO: 16329452 NR Description: hypothetical protein [Synechocystis sp. PCC 6803]
  misc_feature (151)..(189): Homolog of NCBI NO: 16329452 NR Description: hypothetical protein [Synechocystis sp. PCC 6803]
  misc_feature (151)..(175): Homolog of NCBI NO: 39995284 NR Description: conserved hypothetical protein [Geobacter PCA] >gi|39982046|gb|AAR33508.1| conserved hypothetical protein
  misc_feature (1)..(87): Homolog of NCBI NO: 18394699 NR Description: expressed protein; protein id: At1g19130.1, by cDNA: 17545. [Arabidopsis thaliana]
  misc_feature (1)..(189): Homolog of NCBI NO: 26449699 NR Description: unknown protein [Arabidopsis thaliana]
  misc_feature (15)..(139): Homolog of NCBI NO: 18310898 NR Description: conserved hypothetical protein [Clostridium >gi|18145580|dbj|BAB81622.1| conserved hypothetical protein

SEQ ID NO: 18565 - protein, 189 aa, Zea mays subsp. mays; identical to SEQ ID NO: 5735
  peptide (1)..(189): Ceres Seq. ID no. 12565999
  misc_feature (3)..(166): Pfam Name: Protein of unknown function (DUF985) Pfam Description: Protein of unknown function (DUF985)
  misc_feature (1)..(184): Homolog of NCBI NO: 26449699 NR Description: unknown protein [Arabidopsis thaliana]
  misc_feature (1)..(184): Homolog of NCBI NO: 25402881 NR Description: protein F14D16.29 [imported] - Arabidopsis >gi|8778289|gb|AAF79298.1|AC068602_21 F14D16.29 [Arabidopsis
  misc_feature (1)..(82): Homolog of NCBI NO: 18394699 NR Description: expressed protein; protein id: At1g19130.1, by cDNA: 17545. [Arabidopsis thaliana]
  misc_feature (3)..(123): Homolog of NCBI NO: 39995284 NR Description: conserved hypothetical protein [Geobacter PCA] >gi|39982046|gb|AAR33508.1| conserved hypothetical protein
  misc_feature (146)..(170): Homolog of NCBI NO: 39995284 NR Description: conserved hypothetical protein [Geobacter PCA] >gi|39982046|gb|AAR33508.1| conserved hypothetical protein
  misc_feature (10)..(118): Homolog of NCBI NO: 16329452 NR Description: hypothetical protein [Synechocystis sp. PCC 6803]
  misc_feature (146)..(184): Homolog of NCBI NO: 16329452 NR Description: hypothetical protein [Synechocystis sp. PCC 6803]
  misc_feature (5)..(131): Homolog of NCBI NO: 22986010 NR Description: hypothetical protein [Burkholderia fungorum]
  misc_feature (141)..(187): Homolog of NCBI NO: 22986010 NR Description: hypothetical protein [Burkholderia fungorum]
  misc_feature (10)..(134): Homolog of NCBI NO: 18310898 NR Description: conserved hypothetical protein [Clostridium >gi|18145580|dbj|BAB81622.1| conserved hypothetical protein

SEQ ID NO: 18566 - DNA, 651 bp, Zea mays subsp. mays
  misc_feature (1)..(651): Ceres Seq. ID no. 12381563
  misc_feature: MA Experiment ID: 108535 Result: Down-regulated in Transcription
  misc_feature: MA Experiment 108535 PARAMETER Experiment Name: Zm_Meristem_P Parameter: Age (day) Value: 8
  misc_feature: MA Experiment 108535 PARAMETER Experiment Name: Zm_Meristem_P Parameter: Organism Value: Zea mays
  misc_feature: MA Experiment 108535 PARAMETER Experiment Name: Zm_Meristem_P Parameter: Plant Line Value: 35A19
  misc_feature: MA Experiment 108535 PARAMETER Experiment Name: Zm_Meristem_P Parameter: Tissue Value: Root Meristem vs. Above Root Meristem
  misc_feature: MA Experiment ID: 20000535 Result: Down-regulated in Transcription
  misc_feature: MA Experiment 20000535 PARAMETER Experiment Name: Zm_Hybrid_Seed_Dev_P Parameter: DAP Value: 30 vs. 12
  misc_feature: MA Experiment 20000535 PARAMETER Experiment Name: Zm_Hybrid_Seed_Dev_P Parameter: Organism Value: Zea mays
  misc_feature: MA Experiment 20000535 PARAMETER Experiment Name: Zm_Hybrid_Seed_Dev_P Parameter: Plant Line Value: 35A19
  misc_feature: MA Experiment 20000535 PARAMETER Experiment Name: Zm_Hybrid_Seed_Dev_P Parameter: Tissue Value: Embryo vs. Unfert Floret
acacaactgatgagaatgagccgttacaggcaatgatgaaagaccagttcgcaaactatgtggtgcagaaggttctggagatatgtgatgaccagaaccgtgaattgattctttcccgtatcaaggtccacttgaatgcactgaaaagatacacctatgggaagcatatcgtggcacgtgttgagaagcttattgctgcaggagaacgggcgcattggtgccccatcctcttgctgagatggcaataaagctatatacaggtcgcagaataacacctgtacagacagacagggatagcgaggcctagctttttaccattactagtagtcggtaatattgagcgacggagaggttaaaaaaggctcccaaatcctttgatgtaaataaaggatagccgctggaaataaataaaaagaatgagaaaagatgaagagattttgcttgtccttgagggaagagttgtatatttgtgtggtttattttcccctcttgaagcagatggataaatgttttaggatcatagatgatgggaagcaagggcagctgtagattatcctttctttttttccttgggtttcattagtcaatgtataatgtattaatgttcatggtgatgctaatctctgtaaagcctgccttgagtttnctgac

SEQ ID NO: 18567 - protein, 81 aa, Zea mays subsp. mays
  peptide (1)..(81): Ceres Seq. ID no. 12381564
  misc_feature (3)..(37): Pfam Name: Pumilio-family RNA binding repeat Pfam Description: Pumilio-family RNA binding repeat
  misc_feature (1)..(69): Homolog of NCBI NO: 14719326 NR Description: putative pumilio/Mpt5 family RNA-binding protein
  misc_feature (2)..(67): Homolog of NCBI NO: 6056191 NR Description: putative RNA binding protein [Arabidopsis
  misc_feature (1)..(69): Homolog of NCBI NO: 20513851 NR Description: BPM [Hordeum vulgare]
  misc_feature (2)..(69): Homolog of NCBI NO: 22330960 NR Description: pumilio-family RNA-binding protein, putative
  misc_feature (2)..(69): Homolog of NCBI NO: 26450884 NR Description: putative RNA binding protein [Arabidopsis
  misc_feature (1)..(69): Homolog of NCBI NO: 34908236 NR Description: putative pumilio/Mpt5 family RNA-binding protein
  misc_feature (1)..(69): Homolog of NCBI NO: 15227052 NR Description: pumilio-family RNA-binding protein, putative
  misc_feature (1)..(69): Homolog of NCBI NO: 20465637 NR Description: putative pumilio/Mpt5 family RNA-binding protein
  misc_feature (1)..(69): Homolog of NCBI NO: 15227051 NR Description: pumilio-family RNA-binding protein, putative
  misc_feature (1)..(69): Homolog of NCBI NO: 15227038 NR Description: pumilio-family RNA-binding protein, putative
TTDENEPLQAMMKDQFANYVVQKVLEICDDQNRELILSRIKVHLNALKRYTYGKHIVARVEKLIAAGERAHWCPILLLRWQ

SEQ ID NO: 18568 - protein, 71 aa, Zea mays subsp. mays
  peptide (1)..(71): Ceres Seq. ID no. 12381565
  misc_feature (1)..(27): Pfam Name: Pumilio-family RNA binding repeat Pfam Description: Pumilio-family RNA binding repeat
  misc_feature (1)..(59): Homolog of NCBI NO: 14719326 NR Description: putative pumilio/Mpt5 family RNA-binding protein
  misc_feature (1)..(57): Homolog of NCBI NO: 6056191 NR Description: putative RNA binding protein [Arabidopsis
  misc_feature (1)..(59): Homolog of NCBI NO: 20513851 NR Description: BPM [Hordeum vulgare]
  misc_feature (1)..(59): Homolog of NCBI NO: 22330960 NR Description: pumilio-family RNA-binding protein, putative
  misc_feature (1)..(59): Homolog of NCBI NO: 26450884 NR Description: putative RNA binding protein [Arabidopsis
  misc_feature (1)..(59): Homolog of NCBI NO: 34908236 NR Description: putative pumilio/Mpt5 family RNA-binding protein
  misc_feature (1)..(59): Homolog of NCBI NO: 15227052 NR Description: pumilio-family RNA-binding protein, putative
  misc_feature (1)..(59): Homolog of NCBI NO: 20465637 NR Description: putative pumilio/Mpt5 family RNA-binding protein
  misc_feature (1)..(59): Homolog of NCBI NO: 15227051 NR Description: pumilio-family RNA-binding protein, putative
  misc_feature (1)..(59): Homolog of NCBI NO: 15227038 NR Description: pumilio-family RNA-binding protein, putative
MMKDQFANYVVQKVLEICDDQNRELILSRIKVHLNALKRYTYGKHIVARVEKLIAAGERAHWCPILLLRWQ

SEQ ID NO: 18569 - protein, 70 aa, Zea mays subsp. mays
  peptide (1)..(70): Ceres Seq. ID no. 12381566
  misc_feature (1)..(26): Pfam Name: Pumilio-family RNA binding repeat Pfam Description: Pumilio-family RNA binding repeat
  misc_feature (1)..(58): Homolog of NCBI NO: 14719326 NR Description: putative pumilio/Mpt5 family RNA-binding protein
  misc_feature (1)..(56): Homolog of NCBI NO: 6056191 NR Description: putative RNA binding protein [Arabidopsis
  misc_feature (1)..(58): Homolog of NCBI NO: 20513851 NR Description: BPM [Hordeum vulgare]
  misc_feature (1)..(58): Homolog of NCBI NO: 22330960 NR Description: pumilio-family RNA-binding protein, putative
  misc_feature (1)..(58): Homolog of NCBI NO: 26450884 NR Description: putative RNA binding protein [Arabidopsis
  misc_feature (1)..(58): Homolog of NCBI NO: 34908236 NR Description: putative pumilio/Mpt5 family RNA-binding protein
  misc_feature (1)..(58): Homolog of NCBI NO: 15227052 NR Description: pumilio-family RNA-binding protein, putative
  misc_feature (1)..(58): Homolog of NCBI NO: 20465637 NR Description: putative pumilio/Mpt5 family RNA-binding protein
  misc_feature (1)..(58): Homolog of NCBI NO: 15227051 NR Description: pumilio-family RNA-binding protein, putative
  misc_feature (1)..(58): Homolog of NCBI NO: 15227038 NR Description: pumilio-family RNA-binding protein, putative
MKDQFANYVVQKVLEICDDQNRELILSRIKVHLNALKRYTYGKHIVARVEKLIAAGERAHWCPILLLRWQ

SEQ ID NO: 18570 - DNA, 929 bp, Zea mays subsp. mays
  misc_feature (1)..(929): Ceres Seq. ID no. 12418011
  misc_feature: MA Experiment ID: 108535 Result: Up-regulated in Transcription
  misc_feature: MA Experiment 108535 PARAMETER Experiment Name: Zm_Meristem_P Parameter: Age (day) Value: 8
  misc_feature: MA Experiment 108535 PARAMETER Experiment Name: Zm_Meristem_P Parameter: Organism Value: Zea mays
  misc_feature: MA Experiment 108535 PARAMETER Experiment Name: Zm_Meristem_P Parameter: Plant Line Value: 35A19
  misc_feature: MA Experiment 108535 PARAMETER Experiment Name: Zm_Meristem_P Parameter: Tissue Value: Root Meristem vs. Above Root Meristem
  misc_feature: MA Experiment ID: 20000532 Result: Up-regulated in Transcription
  misc_feature: MA Experiment 20000532 PARAMETER Experiment Name: Zm_0.001percent_MeJA_P Parameter: Age (day) Value: 10
  misc_feature: MA Experiment 20000532 PARAMETER Experiment Name: Zm_0.001percent_MeJA_P Parameter: Organism Value: Zea mays
  misc_feature: MA Experiment 20000532 PARAMETER Experiment Name: Zm_0.001percent_MeJA_P Parameter: Plant Line Value: 35A19
  misc_feature: MA Experiment 20000532 PARAMETER Experiment Name: Zm_0.001percent_MeJA_P Parameter: Timepoint (hr) Value: 48
  misc_feature: MA Experiment 20000532 PARAMETER Experiment Name: Zm_0.001percent_MeJA_P Parameter: Tissue Value: Aerial
  misc_feature: MA Experiment 20000532 PARAMETER Experiment Name: Zm_0.001percent_MeJA_P Parameter: Treatment Value: 0.001percent MeJA vs. No Treatment
  misc_feature: MA Experiment ID: 20000533 Result: Up-regulated in Transcription
  misc_feature: MA Experiment 20000533 PARAMETER Experiment Name: Zm_0.001percent_MeJA_P Parameter: Age (day) Value: 11
  misc_feature: MA Experiment 20000533 PARAMETER Experiment Name: Zm_0.001percent_MeJA_P Parameter: Organism Value: Zea mays
  misc_feature: MA Experiment 20000533 PARAMETER Experiment Name: Zm_0.001percent_MeJA_P Parameter: Plant Line Value: 35A19
  misc_feature: MA Experiment 20000533 PARAMETER Experiment Name: Zm_0.001percent_MeJA_P Parameter: Timepoint (hr) Value: 72
  misc_feature: MA Experiment 20000533 PARAMETER Experiment Name: Zm_0.001percent_MeJA_P Parameter: Tissue Value: Aerial
  misc_feature: MA Experiment 20000533 PARAMETER Experiment Name: Zm_0.001percent_MeJA_P Parameter: Treatment Value: 0.001percent MeJA vs. No Treatment
tgttctgatgctacagttgttcttggtgctgttggtaaggtagtaaaagtggagcattgtgaaagagtgcatatcattgcagctgcaaaacggatttgtattgccaactgccgggaatgcatcttctacataggagtaaatcaccaacctcttgtgttgggggacaaccataaattacaagttgctccattcaatacgtgctacccacaactgcatgaacatatgatacaagtggctgtcgatcccagtgtcaacaaatgggaccaaccttttgtgttgggagttgttgatccacatgattcattatcccatcctgctggagtttcagatgttaaagctgaatcagcaacatgtctggatcctgatctattcaccaattttttgattcctagttggtttggggatgaaaatcaagggcctacaaactgcaatcctttcccactgcctgaaatttatgggacatcccaaagcaaaaagcgttctgctctggaagatatccaaaaaggatgattcgggagctgcagcttgatgagaaccggaaaagggaattggcaactgcccttcacgttcagttcaaggattggttatacgcttcaggcaatatccgccagctctactgtctacagggcgattaacgatgggatttgcaagactgactatccttttgccgactccaaaacattcgacaattgtcgaaagctgaccttccttccctgggagagaggattcccacccgcgcagaaggatgtgaagatgtactgttacctacttttttacagattcatttgggtattccctttgctgcgagttggaggtactaattaggatgtaatctccaagcctactcatttttttggcccttgataacgtccacgagtatgtaatagggggactgatggatcatacgttgttgaataaacatttcttct

SEQ ID NO: 18571 - protein, 169 aa, Zea mays subsp. mays
  peptide (1)..(169): Ceres Seq. ID no. 12418012
  misc_feature (1)..(94): Homolog of NCBI NO: 34869310 NR Description: similar to hypothetical protein FLJ10560 [Rattus
  misc_feature (1)..(93): Homolog of NCBI NO: 8922517 NR Description: hypothetical protein FLJ10560 [Homo sapiens]
  misc_feature (1)..(168): Homolog of NCBI NO: 7452467 NR Description: hypothetical protein At2g42230 [imported] -
  misc_feature (1)..(168): Homolog of NCBI NO: 11280529 NR Description: hypothetical protein T10K17.100 - Arabidopsis
  misc_feature (1)..(168): Homolog of NCBI NO: 30688947 NR Description: expressed protein [Arabidopsis thaliana]
  misc_feature (1)..(168): Homolog of NCBI NO: 18410836 NR Description: putative protein
CSDATVVLGAVGKVVKVEHCERVHIIAAAKRICIANCRECIFYIGVNHQPLVLGDNHKLQVAPFNTCYPQLHEHMIQVAVDPSVNKWDQPFVLGVVDPHDSLSHPAGVSDVKAESATCLDPDLFTNFLIPSWFGDENQGPTNCNPFPLPEIYGTSQSKKRSALEDIQKG

SEQ ID NO: 18572 - protein, 98 aa, Zea mays subsp. mays
  peptide (1)..(98): Ceres Seq. ID no. 12418013
MRTGKGNWQLPFTFSSRIGYTLQAISASSTVYRAINDGICKTDYPFADSKTFDNCRKLTFLPWERGFPPAQKDVKMYCYLLFYRFIWVFPLLRVGGTN

SEQ ID NO: 18573 - protein, 95 aa, Zea mays subsp. mays
  peptide (1)..(95): Ceres Seq. ID no. 12418014
  misc_feature (1)..(20): Homolog of NCBI NO: 34869310 NR Description: similar to hypothetical protein FLJ10560 [Rattus
  misc_feature (1)..(19): Homolog of NCBI NO: 8922517 NR Description: hypothetical protein FLJ10560 [Homo sapiens]
  misc_feature (1)..(94): Homolog of NCBI NO: 7452467 NR Description: hypothetical protein At2g42230 [imported] -
  misc_feature (1)..(94): Homolog of NCBI NO: 11280529 NR Description: hypothetical protein T10K17.100 - Arabidopsis
  misc_feature (1)..(94): Homolog of NCBI NO: 30688947 NR Description: expressed protein [Arabidopsis thaliana]
  misc_feature (1)..(94): Homolog of NCBI NO: 18410836 NR Description: putative protein
MIQVAVDPSVNKWDQPFVLGVVDPHDSLSHPAGVSDVKAESATCLDPDLFTNFLIPSWFGDENQGPTNCNPFPLPEIYGTSQSKKRSALEDIQKG

SEQ ID NO: 18574 - DNA, 783 bp, Zea mays subsp. mays
  misc_feature (1)..(783): Ceres Seq. ID no. 12379672
  misc_feature: MA Experiment ID: 108528 Result: Down-regulated in Transcription
  misc_feature: MA Experiment 108528 PARAMETER Experiment Name: Zm_Imbibed_Seeds_P Parameter: Age (day) Value: 5 vs. 2
  misc_feature: MA Experiment 108528 PARAMETER Experiment Name: Zm_Imbibed_Seeds_P Parameter: Organism Value: Zea mays
  misc_feature: MA Experiment 108528 PARAMETER Experiment Name: Zm_Imbibed_Seeds_P Parameter: Plant Line Value: 35A19
  misc_feature: MA Experiment 108528 PARAMETER Experiment Name: Zm_Imbibed_Seeds_P Parameter: Tissue Value: Aerial vs. Embryo
  misc_feature: MA Experiment ID: 108530 Result: Down-regulated in Transcription
  misc_feature: MA Experiment 108530 PARAMETER Experiment Name: Zm_Imbibed_Seeds_P Parameter: Age (day) Value: 6 vs. 2
  misc_feature: MA Experiment 108530 PARAMETER Experiment Name: Zm_Imbibed_Seeds_P Parameter: Organism Value: Zea mays
  misc_feature: MA Experiment 108530 PARAMETER Experiment Name: Zm_Imbibed_Seeds_P Parameter: Plant Line Value: 35A19
  misc_feature: MA Experiment 108530 PARAMETER Experiment Name: Zm_Imbibed_Seeds_P Parameter: Tissue Value: Aerial vs. Embryo
  misc_feature: MA Experiment ID: 108535 Result: Up-regulated in Transcription
  misc_feature: MA Experiment 108535 PARAMETER Experiment Name: Zm_Meristem_P Parameter: Age (day) Value: 8
  misc_feature: MA Experiment 108535 PARAMETER Experiment Name: Zm_Meristem_P Parameter: Organism Value: Zea mays
  misc_feature: MA Experiment 108535 PARAMETER Experiment Name: Zm_Meristem_P Parameter: Plant Line Value: 35A19
  misc_feature: MA Experiment 108535 PARAMETER Experiment Name: Zm_Meristem_P Parameter: Tissue Value: Root Meristem vs. Above Root Meristem
  misc_feature: MA Experiment ID: 108544 Result: Down-regulated in Transcription
  misc_feature: MA Experiment ID: 108547 Result: Down-regulated in Transcription
  misc_feature: MA Experiment 108547 PARAMETER Experiment Name: Zm_Imbibed_Seeds_P Parameter: Age (day) Value: 4 vs. 2
  misc_feature: MA Experiment 108547 PARAMETER Experiment Name: Zm_Imbibed_Seeds_P Parameter: Organism Value: Zea mays
  misc_feature: MA Experiment 108547 PARAMETER Experiment Name: Zm_Imbibed_Seeds_P Parameter: Plant Line Value: 35A19
  misc_feature: MA Experiment 108547 PARAMETER Experiment Name: Zm_Imbibed_Seeds_P Parameter: Tissue Value: Aerial vs. Embryo
  misc_feature: MA Experiment ID: 20000488 Result: Up-regulated in Transcription
  misc_feature: MA Experiment 20000488 PARAMETER Experiment Name: Zm_50mM_NH4NO3_L_to_H_P Parameter: Organism Value: Zea mays
  misc_feature: MA Experiment 20000488 PARAMETER Experiment Name: Zm_50mM_NH4NO3_L_to_H_P Parameter: Timepoint (hr) Value: 8
  misc_feature: MA Experiment 20000488 PARAMETER Experiment Name: Zm_50mM_NH4NO3_L_to_H_P Parameter: Tissue Value: Leaves
  misc_feature: MA Experiment 20000488 PARAMETER Experiment Name: Zm_50mM_NH4NO3_L_to_H_P Parameter: Treatment Value: 50mM NH4NO3 vs. 100mM Mannitol
  misc_feature: MA Experiment ID: 20001613 Result: Up-regulated in Transcription
  misc_feature: MA Experiment 20001613 PARAMETER Experiment Name: Zm_50ppm_KNO3_L-to-H_P Parameter: Age (day) Value: 20
  misc_feature: MA Experiment 20001613 PARAMETER Experiment Name: Zm_50ppm_KNO3_L-to-H_P Parameter: Organism Value: Zea mays
  misc_feature: MA Experiment 20001613 PARAMETER Experiment Name: Zm_50ppm_KNO3_L-to-H_P Parameter: Plant Line Value: 35A19
  misc_feature: MA Experiment 20001613 PARAMETER Experiment Name: Zm_50ppm_KNO3_L-to-H_P Parameter: Timepoint (hr) Value: 24
  misc_feature: MA Experiment 20001613 PARAMETER Experiment Name: Zm_50ppm_KNO3_L-to-H_P Parameter: Tissue Value: Roots
  misc_feature: MA Experiment 20001613 PARAMETER Experiment Name: Zm_50ppm_KNO3_L-to-H_P Parameter: Treatment Value: 50ppm KNO3 vs. 50ppm KCl
agattccaactctgcgagaaaagctaaaataatcggacccatctcttggaccgtgcgatcgcccccctccgccgccgcccacggatcaacgccacgccaccacgccggaagaccgggatcgtgacggccacatggacatggctacggcggccgccgcgttgccatggggaggcggttccccggcgtggatcgacgtgcctgagcggagcaagagcgcgttcatggagctgaagcggaggaaggtccaccggtatgtgatcttcaagatcgacgacagtagagaggaggtcgtcgtcgacaagatcggcgcgcccggggagagctacgacgacttcacggcgtcgctaccgaccgatgattgccggtacgccgtctacgatctggatttcgtaagcgacgacaactgccggaaaagcaagattttcttcatctcctggtctccttcagattctcgcatccgtgccaagaccatatatgccgtgtcaaggaaccaattccgtcatgagcttgacggagtgcacttcgagatccaagccaccgatcccgatgacatgaatctagaagttctcagggggcgtgctaacagaacctgattcactagcgagcaacccaaaatgcagctcggaggtcgctgatctgatgaggcatgacgtagaagtataggctgccgatcacacccgggcatgcattgtttctttttacttcttcctttccttttggagttatacttccgtgatgtttgcctaactacataggttccctctaatatgatgtggactgtgg

SEQ ID NO: 18575 - protein, 153 aa, Zea mays subsp. mays
  peptide (1)..(153): Ceres Seq. ID no. 12379673
  misc_feature (24)..(151): Pfam Name: Cofilin/tropomyosin-type actin-binding protein Pfam Description: Cofilin/tropomyosin-type actin-binding protein
  misc_feature (16)..(151): Homolog of NCBI NO: 15223471 NR Description: actin depolymerizing factor, putative
  misc_feature (16)..(151): Homolog of NCBI NO: 18411410 NR Description: putative actin-depolymerizing factor
  misc_feature (22)..(151): Homolog of NCBI NO: 25295741 NR Description: actin depolymerizing factor 6 [imported] -
  misc_feature (22)..(151): Homolog of NCBI NO: 18402587 NR Description: actin depolymerizing factor 6
  misc_feature (22)..(151): Homolog of NCBI NO: 21554405 NR Description: Actin-depolymerizing factor ADF-6 [Arabidopsis
  misc_feature (13)..(150): Homolog of NCBI NO: 24745620 NR Description: actin depolymerizing factor 6 [Solanum tuberosum]
  misc_feature (22)..(151): Homolog of NCBI NO: 4566614 NR Description: actin depolymerizing factor [Populus x canescens]
  misc_feature (22)..(150): Homolog of NCBI NO: 7330254 NR Description: actin depolymerizing factor [Elaeis guineensis]
  misc_feature (13)..(153): Homolog of NCBI NO: 34394310 NR Description: putative actin depolymerizing factor
  misc_feature (3)..(153): Homolog of NCBI NO: 37536154 NR Description: putative actin depolymerizing factor
MDMATAAAALPWGGGSPAWIDVPERSKSAFMELKRRKVHRYVIFKIDDSREEVVVDKIGAPGESYDDFTASLPTDDCRYAVYDLDFVSDDNCRKSKIFFISWSPSDSRIRAKTIYAVSRNQFRHELDGVHFEIQATDPDDMNLEVLRGRANRT

SEQ ID NO: 18576 - protein, 151 aa, Zea mays subsp. mays
  peptide (1)..(151): Ceres Seq. ID no. 12379674
  misc_feature (22)..(149): Pfam Name: Cofilin/tropomyosin-type actin-binding protein Pfam Description: Cofilin/tropomyosin-type actin-binding protein
  misc_feature (20)..(148): Homolog of NCBI NO: 7330254 NR Description: actin depolymerizing factor [Elaeis guineensis]
  misc_feature (11)..(151): Homolog of NCBI NO: 34394310 NR Description: putative actin depolymerizing factor
  misc_feature (14)..(149): Homolog of NCBI NO: 18411410 NR Description: putative actin-depolymerizing factor
  misc_feature (20)..(149): Homolog of NCBI NO: 18402587 NR Description: actin depolymerizing factor 6
  misc_feature (11)..(148): Homolog of NCBI NO: 24745620 NR Description: actin depolymerizing factor 6 [Solanum tuberosum]
  misc_feature (20)..(149): Homolog of NCBI NO: 4566614 NR Description: actin depolymerizing factor [Populus x canescens]
  misc_feature (20)..(149): Homolog of NCBI NO: 21554405 NR Description: Actin-depolymerizing factor ADF-6 [Arabidopsis
  misc_feature (20)..(149): Homolog of NCBI NO: 25295741 NR Description: actin depolymerizing factor 6 [imported] -
  misc_feature (14)..(149): Homolog of NCBI NO: 15223471 NR Description: actin depolymerizing factor, putative
  misc_feature (1)..(151): Homolog of NCBI NO: 37536154 NR Description: putative actin depolymerizing factor
MATAAAALPWGGGSPAWIDVPERSKSAFMELKRRKVHRYVIFKIDDSREEVVVDKIGAPGESYDDFTASLPTDDCRYAVYDLDFVSDDNCRKSKIFFISWSPSDSRIRAKTIYAVSRNQFRHELDGVHFEIQATDPDDMNLEVLRGRANRT

SEQ ID NO: 18577 - protein, 123 aa, Zea mays subsp. mays
  peptide (1)..(123): Ceres Seq. ID no. 12379675
  misc_feature (1)..(121): Pfam Name: Cofilin/tropomyosin-type actin-binding protein Pfam Description: Cofilin/tropomyosin-type actin-binding protein
  misc_feature (1)..(121): Homolog of NCBI NO: 15223471 NR Description: actin depolymerizing factor, putative
  misc_feature (1)..(121): Homolog of NCBI NO: 18411410 NR Description: putative actin-depolymerizing factor
  misc_feature (1)..(121): Homolog of NCBI NO: 25295741 NR Description: actin depolymerizing factor 6 [imported] -
  misc_feature (1)..(121): Homolog of NCBI NO: 18402587 NR Description: actin depolymerizing factor 6
  misc_feature (1)..(121): Homolog of NCBI NO: 21554405 NR Description: Actin-depolymerizing factor ADF-6 [Arabidopsis
  misc_feature (1)..(120): Homolog of NCBI NO: 24745620 NR Description: actin depolymerizing factor 6 [Solanum tuberosum]
  misc_feature (1)..(121): Homolog of NCBI NO: 4566614 NR Description: actin depolymerizing factor [Populus x canescens]
  misc_feature (1)..(120): Homolog of NCBI NO: 7330254 NR Description: actin depolymerizing factor [Elaeis guineensis]
  misc_feature (1)..(123): Homolog of NCBI NO: 34394310 NR Description: putative actin depolymerizing factor
  misc_feature (1)..(123): Homolog of NCBI NO: 37536154 NR Description: putative actin depolymerizing factor
MELKRRKVHRYVIFKIDDSREEVVVDKIGAPGESYDDFTASLPTDDCRYAVYDLDFVSDDNCRKSKIFFISWSPSDSRIRAKTIYAVSRNQFRHELDGVHFEIQATDPDDMNLEVLRGRANRT

SEQ ID NO: 18578 - DNA, 464 bp, Zea mays subsp. mays
  misc_feature (1)..(464): Ceres Seq. ID no. 2789088
  misc_feature: MA Experiment ID: 108527 Result: Up-regulated in Transcription
  misc_feature: MA Experiment 108527 PARAMETER Experiment Name: Zm_5mM_NO_P Parameter: Age (day) Value: 8
  misc_feature: MA Experiment 108527 PARAMETER Experiment Name: Zm_5mM_NO_P Parameter: Organism Value: Zea mays
  misc_feature: MA Experiment 108527 PARAMETER Experiment Name: Zm_5mM_NO_P Parameter: Plant Line Value: 35A19
  misc_feature: MA Experiment 108527 PARAMETER Experiment Name: Zm_5mM_NO_P Parameter: Timepoint (hr) Value: 6
  misc_feature: MA Experiment 108527 PARAMETER Experiment Name: Zm_5mM_NO_P Parameter: Tissue Value: Aerial
  misc_feature: MA Experiment 108527 PARAMETER Experiment Name: Zm_5mM_NO_P Parameter: Treatment Value: 5mM NO vs. No Treatment
  misc_feature: MA Experiment ID: 108528 Result: Up-regulated in Transcription
  misc_feature: MA Experiment 108528 PARAMETER Experiment Name: Zm_Imbibed_Seeds_P Parameter: Age (day) Value: 5 vs. 2
  misc_feature: MA Experiment 108528 PARAMETER Experiment Name: Zm_Imbibed_Seeds_P Parameter: Organism Value: Zea mays
  misc_feature: MA Experiment 108528 PARAMETER Experiment Name: Zm_Imbibed_Seeds_P Parameter: Plant Line Value: 35A19
  misc_feature: MA Experiment 108528 PARAMETER Experiment Name: Zm_Imbibed_Seeds_P Parameter: Tissue Value: Aerial vs. Embryo
  misc_feature: MA Experiment ID: 108534 Result: Up-regulated in Transcription
  misc_feature: MA Experiment 108534 PARAMETER Experiment Name: Zm_4deg_Cold_P Parameter: Age (hr) Value: 8
  misc_feature: MA Experiment 108534 PARAMETER Experiment Name: Zm_4deg_Cold_P Parameter: Organism Value: Zea mays
  misc_feature: MA Experiment 108534 PARAMETER Experiment Name: Zm_4deg_Cold_P Parameter: Plant Line Value: 35A19
  misc_feature: MA Experiment 108534 PARAMETER Experiment Name: Zm_4deg_Cold_P Parameter: Temperature (deg C) Value: 4 vs. 22
  misc_feature: MA Experiment 108534 PARAMETER Experiment Name: Zm_4deg_Cold_P Parameter: Timepoint (hr) Value: 6
  misc_feature: MA Experiment 108534 PARAMETER Experiment Name: Zm_4deg_Cold_P Parameter: Tissue Value: Aerial
  misc_feature: MA Experiment ID: 108535 Result: Down-regulated in Transcription
  misc_feature: MA Experiment 108535 PARAMETER Experiment Name: Zm_Meristem_P Parameter: Age (day) Value: 8
  misc_feature: MA Experiment 108535 PARAMETER Experiment Name: Zm_Meristem_P Parameter: Organism Value: Zea mays
  misc_feature: MA Experiment 108535 PARAMETER Experiment Name: Zm_Meristem_P Parameter: Plant Line Value: 35A19
  misc_feature: MA Experiment 108535 PARAMETER Experiment Name: Zm_Meristem_P Parameter: Tissue Value: Root Meristem vs. Above Root Meristem
  misc_feature: MA Experiment ID: 108543 Result: Down-regulated in Transcription
  misc_feature: MA Experiment ID: 108547 Result: Up-regulated in Transcription
  misc_feature: MA Experiment 108547 PARAMETER Experiment Name: Zm_Imbibed_Seeds_P Parameter: Age (day) Value: 4 vs. 2
  misc_feature: MA Experiment 108547 PARAMETER Experiment Name: Zm_Imbibed_Seeds_P Parameter: Organism Value: Zea mays
  misc_feature: MA Experiment 108547 PARAMETER Experiment Name: Zm_Imbibed_Seeds_P Parameter: Plant Line Value: 35A19
  misc_feature: MA Experiment 108547 PARAMETER Experiment Name: Zm_Imbibed_Seeds_P Parameter: Tissue Value: Aerial vs. Embryo
  misc_feature: MA Experiment ID: 108689 Result: Up-regulated in Transcription
  misc_feature: MA Experiment 108689 PARAMETER Experiment Name: Zm_Drought_Roots_P Parameter: Age (day) Value: 9
  misc_feature: MA Experiment 108689 PARAMETER Experiment Name: Zm_Drought_Roots_P Parameter: Organism Value: Zea mays
  misc_feature: MA Experiment 108689 PARAMETER Experiment Name: Zm_Drought_Roots_P Parameter: Plant Line Value: 35A19
  misc_feature: MA Experiment 108689 PARAMETER Experiment Name: Zm_Drought_Roots_P Parameter: Timepoint (hr) Value: 24
  misc_feature: MA Experiment 108689 PARAMETER Experiment Name: Zm_Drought_Roots_P Parameter: Tissue Value: Roots
  misc_feature: MA Experiment 108689 PARAMETER Experiment Name: Zm_Drought_Roots_P Parameter: Treatment Value: Drought vs. No Drought
  misc_feature: MA Experiment ID: 20000477 Result: Up-regulated in Transcription
  misc_feature: MA Experiment 20000477 PARAMETER Experiment Name: Zm_5mM_SA_P Parameter: Age (day) Value: 10
  misc_feature: MA Experiment 20000477 PARAMETER Experiment Name: Zm_5mM_SA_P Parameter: Organism Value: Zea mays
  misc_feature: MA Experiment 20000477 PARAMETER Experiment Name: Zm_5mM_SA_P Parameter: Plant Line Value: 35A19
  misc_feature: MA Experiment 20000477 PARAMETER Experiment Name: Zm_5mM_SA_P Parameter: Timepoint (hr) Value: 48
  misc_feature: MA Experiment 20000477 PARAMETER Experiment Name: Zm_5mM_SA_P Parameter: Tissue Value: Aerial
  misc_feature: MA Experiment 20000477 PARAMETER Experiment Name: Zm_5mM_SA_P Parameter: Treatment Value: 5mM SA vs. No Treatment
  misc_feature: MA Experiment ID: 20000478 Result: Up-regulated in Transcription
  misc_feature: MA Experiment 20000478 PARAMETER Experiment Name: Zm_5mM_SA_P Parameter: Age (day) Value: 11
  misc_feature: MA Experiment 20000478 PARAMETER Experiment Name: Zm_5mM_SA_P Parameter: Organism Value: Zea mays
  misc_feature: MA Experiment 20000478 PARAMETER Experiment Name: Zm_5mM_SA_P Parameter: Plant Line Value: 35A19
  misc_feature: MA Experiment 20000478 PARAMETER Experiment Name: Zm_5mM_SA_P Parameter: Timepoint (hr) Value: 72
  misc_feature: MA Experiment 20000478 PARAMETER Experiment Name: Zm_5mM_SA_P Parameter: Tissue Value: Aerial
  misc_feature: MA Experiment 20000478 PARAMETER Experiment Name: Zm_5mM_SA_P Parameter: Treatment Value: 5mM SA vs. No Treatment
  misc_feature: MA Experiment ID: 20000479 Result: Up-regulated in Transcription
  misc_feature: MA Experiment 20000479 PARAMETER Experiment Name: Zm_Drought_P Parameter: Age (day) Value: 10
  misc_feature: MA Experiment 20000479 PARAMETER Experiment Name: Zm_Drought_P Parameter: Organism Value: Zea mays
  misc_feature: MA Experiment 20000479 PARAMETER Experiment Name: Zm_Drought_P Parameter: Plant Line Value: 35A19
  misc_feature: MA Experiment 20000479 PARAMETER Experiment Name: Zm_Drought_P Parameter: Timepoint (hr) Value: 48
  misc_feature: MA Experiment 20000479 PARAMETER Experiment Name: Zm_Drought_P Parameter: Tissue Value: Aerial
  misc_feature: MA Experiment 20000479 PARAMETER Experiment Name: Zm_Drought_P Parameter: Treatment Value: Drought vs. No Drought
  misc_feature: MA Experiment ID: 20000480 Result: Up-regulated in Transcription
  misc_feature: MA Experiment 20000480 PARAMETER Experiment Name: Zm_Drought_P Parameter: Age (day) Value: 11
  misc_feature: MA Experiment 20000480 PARAMETER Experiment Name: Zm_Drought_P Parameter: Organism Value: Zea mays
  misc_feature: MA Experiment 20000480 PARAMETER Experiment Name: Zm_Drought_P Parameter: Plant Line Value: 35A19
  misc_feature: MA Experiment 20000480 PARAMETER Experiment Name: Zm_Drought_P Parameter: Timepoint (hr) Value: 72
  misc_feature: MA Experiment 20000480 PARAMETER Experiment Name: Zm_Drought_P Parameter: Tissue Value: Aerial
  misc_feature: MA Experiment 20000480 PARAMETER Experiment Name: Zm_Drought_P Parameter: Treatment Value: Drought vs. No Drought
  misc_feature: MA Experiment ID: 20000487 Result: Up-regulated in Transcription
  misc_feature: MA Experiment 20000487 PARAMETER Experiment Name: Zm_50mM_NH4NO3_L_to_H_P Parameter: Organism Value: Zea mays
  misc_feature: MA Experiment 20000487 PARAMETER Experiment Name: Zm_50mM_NH4NO3_L_to_H_P Parameter: Timepoint (hr) Value: 4
  misc_feature: MA Experiment 20000487 PARAMETER Experiment Name: Zm_50mM_NH4NO3_L_to_H_P Parameter: Tissue Value: Leaves
  misc_feature: MA Experiment 20000487 PARAMETER Experiment Name: Zm_50mM_NH4NO3_L_to_H_P Parameter: Treatment Value: 50mM NH4NO3 vs. 100mM Mannitol
  misc_feature: MA Experiment ID: 20000488 Result: Up-regulated in Transcription
  misc_feature: MA Experiment 20000488 PARAMETER Experiment Name: Zm_50mM_NH4NO3_L_to_H_P Parameter: Organism Value: Zea mays
  misc_feature: MA Experiment 20000488 PARAMETER Experiment Name: Zm_50mM_NH4NO3_L_to_H_P Parameter: Timepoint (hr) Value: 8
  misc_feature: MA Experiment 20000488 PARAMETER Experiment Name: Zm_50mM_NH4NO3_L_to_H_P Parameter: Tissue Value: Leaves
  misc_feature: MA Experiment 20000488 PARAMETER Experiment Name: Zm_50mM_NH4NO3_L_to_H_P Parameter: Treatment Value: 50mM NH4NO3 vs. 100mM Mannitol
  misc_feature: MA Experiment ID: 20000492 Result: Up-regulated in Transcription
  misc_feature: MA Experiment 20000492 PARAMETER Experiment Name: Zm_Hybrid_Seed_Dev_P Parameter: DAP Value: 12
  misc_feature: MA Experiment 20000492 PARAMETER Experiment Name: Zm_Hybrid_Seed_Dev_P Parameter: Organism Value: Zea mays
  misc_feature: MA Experiment 20000492 PARAMETER Experiment Name: Zm_Hybrid_Seed_Dev_P Parameter: Plant Line Value: 35A19
  misc_feature: MA Experiment 20000492 PARAMETER Experiment Name: Zm_Hybrid_Seed_Dev_P Parameter: Tissue Value: Fert Kernel vs. Unfert Floret
gacttccctgggcgcgtccgtgcaggtcgggatggagttctgggcgcggtgggcgcaccgggcgctatggcacgcctccctgtggcacatgcacgagtcgcaccaccggtcgtgcgagggcccattcgagctcaacgacgtgttcgccatcgtcaacgccgtgccggccatctccctcctcggtgacgtcgcgagcagatacaccatatggacaattttgagggcgtcccgtatgggctcttcctgggaccaaaggagctggaggaggtcggtggcctggacgagctggaaaaggagctcgcgcgaatcggccagaccatctgatggatttgtccggattccggcgcggcgatctccgctccgctccgtgattccggcgcagcctcatggttggggagccgacgaccagaacctccagaagggatttggtttggatgcgcgagcgtagatcttgacctgcattt

SEQ ID NO: 18579 - protein, 148 aa, Zea mays subsp. mays
  peptide (1)..(148): Ceres Seq. ID no. 2789089
  misc_feature (2)..(60): Pfam Name: Carotene hydroxylase Pfam Description: Carotene hydroxylase
  misc_feature (2)..(60): Homolog of NCBI NO: 9968545 NR Description: beta-carotene hydroxylase [Narcissus
  misc_feature (2)..(60): Homolog of NCBI NO: 1575296 NR Description: beta-carotene hydroxylase [Arabidopsis thaliana]
  misc_feature (2)..(60): Homolog of NCBI NO: 2956717 NR Description: beta-carotene hydroxylase 2 [Capsicum annuum]
  misc_feature (2)..(60): Homolog of NCBI NO: 37536402 NR Description: putative beta-carotene hydroxylase
  misc_feature (2)..(60): Homolog of NCBI NO: 5870600 NR Description: beta-carotene hydroxylase [Lycopersicon
  misc_feature (2)..(60): Homolog of NCBI NO: 21734857 NR Description: beta-carotene hydroxylase [Vitis vinifera]
  misc_feature (2)..(60): Homolog of NCBI NO: 11245486 NR Description: beta-carotene hydroxylase [Citrus unshiu]
  misc_feature (2)..(60): Homolog of NCBI NO: 9988836 NR Description: beta-carotene hydroxylase [Citrus unshiu]
  misc_feature (2)..(60): Homolog of NCBI NO: 33145986 NR Description: beta-carotene hydroxylase [Crocus sativus]
  misc_feature (2)..(60): Homolog of NCBI NO: 32488500 NR Description: OSJNBa0011J08.7 [Oryza sativa (japonica
TSLGASVQVGMEFWARWAHRALWHASLWHMHESHHRSCEGPFELNDVFAIVNAVPAISLLGDVASRYTIWTILRASRMGSSWDQRSWRRSVAWTSWKRSSRESARPSDGFVRIPARRSPLRSVIPAQPHGWGADDQNLQKGFGLDARA

SEQ ID NO: 18580 - protein, 138 aa, Zea mays subsp. mays
  peptide (1)..(138): Ceres Seq. ID no. 2789090
  misc_feature (1)..(50): Homolog of NCBI NO: 15235959 NR Description: beta-carotene hydroxylase
  misc_feature (1)..(50): Homolog of NCBI NO: 1575296 NR Description: beta-carotene hydroxylase [Arabidopsis thaliana]
  misc_feature (1)..(50): Homolog of NCBI NO: 2956717 NR Description: beta-carotene hydroxylase 2 [Capsicum annuum]
  misc_feature (1)..(50): Homolog of NCBI NO: 37536402 NR Description: putative beta-carotene hydroxylase
  misc_feature (1)..(50): Homolog of NCBI NO: 5870600 NR Description: beta-carotene hydroxylase [Lycopersicon
  misc_feature (1)..(50): Homolog of NCBI NO: 21734857 NR Description: beta-carotene hydroxylase [Vitis vinifera]
  misc_feature (1)..(50): Homolog of NCBI NO: 11245486 NR Description: beta-carotene hydroxylase [Citrus unshiu]
  misc_feature (1)..(50): Homolog of NCBI NO: 9988836 NR Description: beta-carotene hydroxylase [Citrus unshiu]
  misc_feature (1)..(50): Homolog of NCBI NO: 33145986 NR Description: beta-carotene hydroxylase [Crocus sativus]
  misc_feature (1)..(50): Homolog of NCBI NO: 32488500 NR Description: OSJNBa0011J08.7 [Oryza sativa (japonica
MEFWARWAHRALWHASLWHMHESHHRSCEGPFELNDVFAIVNAVPAISLLGDVASRYTIWTILRASRMGSSWDQRSWRRSVAWTSWKRSSRESARPSDGFVRIPARRSPLRSVIPAQPHGWGADDQNLQKGFGLDARA

SEQ ID NO: 18581 - protein, 119 aa, Zea mays subsp. mays
  peptide (1)..(119): Ceres Seq. ID no. 2789091
  misc_feature (1)..(31): Homolog of NCBI NO: 15235959 NR Description: beta-carotene hydroxylase
  misc_feature (1)..(31): Homolog of NCBI NO: 1575296 NR Description: beta-carotene hydroxylase [Arabidopsis thaliana]
  misc_feature (1)..(31): Homolog of NCBI NO: 2956717 NR Description: beta-carotene hydroxylase 2 [Capsicum annuum]
  misc_feature (1)..(31): Homolog of NCBI NO: 37536402 NR Description: putative beta-carotene hydroxylase
  misc_feature (1)..(31): Homolog of NCBI NO: 5870600 NR Description: beta-carotene hydroxylase [Lycopersicon
  misc_feature (1)..(31): Homolog of NCBI NO: 21734857 NR Description: beta-carotene hydroxylase [Vitis vinifera]
  misc_feature (1)..(31): Homolog of NCBI NO: 11245486 NR Description: beta-carotene hydroxylase [Citrus unshiu]
  misc_feature (1)..(31): Homolog of NCBI NO: 9988836 NR Description: beta-carotene hydroxylase [Citrus unshiu]
  misc_feature (1)..(31): Homolog of NCBI NO: 33145986 NR Description: beta-carotene hydroxylase [Crocus sativus]
  misc_feature (1)..(31): Homolog of NCBI NO: 32488500 NR Description: OSJNBa0011J08.7 [Oryza sativa (japonica
MHESHHRSCEGPFELNDVFAIVNAVPAISLLGDVASRYTIWTILRASRMGSSWDQRSWRRSVAWTSWKRSSRESARPSDGFVRIPARRSPLRSVIPAQPHGWGADDQNLQKGFGLDARA

SEQ ID NO: 18582 - DNA, 1036 bp, Zea mays subsp. mays
  misc_feature (1)..(1036): Ceres Seq. ID no. 12350771
  misc_feature: MA Experiment ID: 108527 Result: Up-regulated in Transcription
  misc_feature: MA Experiment 108527 PARAMETER Experiment Name: Zm_5mM_NO_P Parameter: Age (day) Value: 8
  misc_feature: MA Experiment 108527 PARAMETER Experiment Name: Zm_5mM_NO_P Parameter: Organism Value: Zea mays
  misc_feature: MA Experiment 108527 PARAMETER Experiment Name: Zm_5mM_NO_P Parameter: Plant Line Value: 35A19
  misc_feature: MA Experiment 108527 PARAMETER Experiment Name: Zm_5mM_NO_P Parameter: Timepoint (hr) Value: 6
  misc_feature: MA Experiment 108527 PARAMETER Experiment Name: Zm_5mM_NO_P Parameter: Tissue Value: Aerial
  misc_feature: MA Experiment 108527 PARAMETER Experiment Name: Zm_5mM_NO_P Parameter: Treatment Value: 5mM NO vs. No Treatment
  misc_feature: MA Experiment ID: 108529 Result: Up-regulated in Transcription
  misc_feature: MA Experiment 108529 PARAMETER Experiment Name: Zm_Imbibed_Seeds_P Parameter: Age (day) Value: 5 vs. 2
  misc_feature: MA Experiment 108529 PARAMETER Experiment Name: Zm_Imbibed_Seeds_P Parameter: Organism Value: Zea mays
  misc_feature: MA Experiment 108529 PARAMETER Experiment Name: Zm_Imbibed_Seeds_P Parameter: Plant Line Value: 35A19
  misc_feature: MA Experiment 108529 PARAMETER Experiment Name: Zm_Imbibed_Seeds_P Parameter: Tissue Value: Roots vs. Embryo
  misc_feature: MA Experiment ID: 108543 Result: Down-regulated in Transcription
  misc_feature: MA Experiment ID: 108545 Result: Down-regulated in Transcription
  misc_feature: MA Experiment 108545 PARAMETER Experiment Name: Zm_Imbibed_Seeds_P Parameter: Age (day) Value: 3 vs. 2
  misc_feature: MA Experiment 108545 PARAMETER Experiment Name: Zm_Imbibed_Seeds_P Parameter: Organism Value: Zea mays
  misc_feature: MA Experiment 108545 PARAMETER Experiment Name: Zm_Imbibed_Seeds_P Parameter: Plant Line Value: 35A19
  misc_feature: MA Experiment 108545 PARAMETER Experiment Name: Zm_Imbibed_Seeds_P Parameter: Tissue Value: Aerial vs. Embryo
  misc_feature: MA Experiment ID: 20000108 Result: Down-regulated in Transcription
  misc_feature: MA Experiment 20000108 PARAMETER Experiment Name: Zm_Root-Tips_P Parameter: Age (day) Value: 12
  misc_feature: MA Experiment 20000108 PARAMETER Experiment Name: Zm_Root-Tips_P Parameter: Organism Value: Zea mays
  misc_feature: MA Experiment 20000108 PARAMETER Experiment Name: Zm_Root-Tips_P Parameter: Tissue Value: Root tips vs. Root mid region    35
  misc_feature: MA Experiment 20000108 PARAMETER Experiment Name: Zm_Root-Tips_P Parameter: Tissue Value: Root tips vs. Root mid region   Sequence Listing-Misc Features (4)
  misc_feature: MA Experiment ID: 20000627 Result: Up-regulated in Transcription
  misc_feature: MA Experiment 20000627 PARAMETER Experiment Name: Zm_Herbicide-Treatments_P Parameter: Timepoint (hr) Value: 12
  misc_feature: MA Experiment 20000627 PARAMETER Experiment Name: Zm_Herbicide-Treatments_P Parameter: Tissue Value: Aerial
  misc_feature: MA Experiment 20000627 PARAMETER Experiment Name: Zm_Herbicide-Treatments_P Parameter: Treatment Value: Finale vs. No Treatment
ctaaacccaatcccccttccaccccaccgacaaggagatcttccgcggcagtagtccccgccgcgtgctcgtcggcatgaagaagacgctcgtcttctacacgggccgcgcgccgcgcggaggcaagacgccgtgggtcatgcacgagtaccgcctcgagggcagcctgccgcccaacctccaccgcggggccaaggacgaatgggctgtgtgtaaggtgatcaacaaagacttggcgggcaaggctgggcagcaacaaatggcgccgccgcacgccgtgtccgtgggcatggagcgcagcgactcgctggccttcctcgacgacctggtgctcgacaacgccgacgacctgcccccgctcatcgactcgacaacgtacgccgcggcggggacgaccacgacgacgaacgacgacagcggcgggtaccaacaagccaccaaggcggagccgcagccgcatctgcccgcgccgagcaacagcccgtaccagcagcaggccatacggaggcactgcaaggcggaggcgccggcgccggcgatggttctgagcccgtcgcgcgagacgccgggcgcggacatgttccagctccagcatgtggacgagctgctccagctggacggcggcttcatggaggactactacaacatgaacatgtggaaggtctagttaggccgctcggatcgtcggttgcctggcggatgatggattgattagttggttgattggattaacctgttattagacgaagaggagtggaaaggccggccgcgccgattggcatggacgaggtctgtctgacgaagatgtgtcgagacctcgccggcggtgtggtttgtgataattggttagttagctaatcttcattagctagctagctagctagctactgattagaacagctagcagtagtgtgtaaccgcgcgcgtgtcgttgcctctgctggtcgagaggattgaagcacgcatgtgtacataataataggtaggagtcgtcgtcgttgagtgatgagaaaaatgaatgaaacatactatntgt

SEQ ID NO: 18583 - protein, 196 aa, Zea mays subsp. mays
  peptide (1)..(196): Ceres Seq. ID no. 12350772
  misc_feature (1)..(66): Homolog of NCBI NO: 21536866 NR Description: NAM / CUC2-like protein [Arabidopsis thaliana]
  misc_feature (1)..(66): Homolog of NCBI NO: 15241819 NR Description: NAM / CUC2 - like protein
  misc_feature (1)..(56): Homolog of NCBI NO: 30682054 NR Description: NAM (no apical meristem)-related protein
  misc_feature (1)..(97): Homolog of NCBI NO: 30686737 NR Description: NAM (no apical meristem)-related protein
  misc_feature (1)..(97): Homolog of NCBI NO: 9758909 NR Description: NAM (no apical meristem)-like protein
  misc_feature (1)..(137): Homolog of NCBI NO: 15229219 NR Description: NAM-like protein (no apical meristem)
  misc_feature (1)..(196): Homolog of NCBI NO: 27529808 NR Description: OsNAC1 protein [Oryza sativa]
  misc_feature (1)..(166): Homolog of NCBI NO: 34902148 NR Description: Putative NAM (no apical meristem) protein
  misc_feature (1)..(195): Homolog of NCBI NO: 34394523 NR Description: putative GRAB2 protein(Geminivirus Rep A-binding)
  misc_feature (1)..(141): Homolog of NCBI NO: 4218537 NR Description: GRAB2 protein [Triticum sp.]
MKKTLVFYTGRAPRGGKTPWVMHEYRLEGSLPPNLHRGAKDEWAVCKVINKDLAGKAGQQQMAPPHAVSVGMERSDSLAFLDDLVLDNADDLPPLIDSTTYAAAGTTTTTNDDSGGYQQATKAEPQPHLPAPSNSPYQQQAIRRHCKAEAPAPAMVLSPSRETPGADMFQLQHVDELLQLDGGFMEDYYNMNMWKV

SEQ ID NO: 18584 - protein, 175 aa, Zea mays subsp. mays
  peptide (1)..(175): Ceres Seq. ID no. 12350773
  misc_feature (1)..(45): Homolog of NCBI NO: 21536866 NR Description: NAM / CUC2-like protein [Arabidopsis thaliana]
  misc_feature (1)..(45): Homolog of NCBI NO: 15241819 NR Description: NAM / CUC2 - like protein
  misc_feature (1)..(35): Homolog of NCBI NO: 30682054 NR Description: NAM (no apical meristem)-related protein
  misc_feature (1)..(76): Homolog of NCBI NO: 30686737 NR Description: NAM (no apical meristem)-related protein
  misc_feature (1)..(76): Homolog of NCBI NO: 9758909 NR Description: NAM (no apical meristem)-like protein
  misc_feature (1)..(116): Homolog of NCBI NO: 15229219 NR Description: NAM-like protein (no apical meristem)
  misc_feature (1)..(175): Homolog of NCBI NO: 27529808 NR Description: OsNAC1 protein [Oryza sativa]
  misc_feature (1)..(145): Homolog of NCBI NO: 34902148 NR Description: Putative NAM (no apical meristem) protein
  misc_feature (1)..(174): Homolog of NCBI NO: 34394523 NR Description: putative GRAB2 protein(Geminivirus Rep A-binding)
  misc_feature (1)..(120): Homolog of NCBI NO: 4218537 NR Description: GRAB2 protein [Triticum sp.]
MHEYRLEGSLPPNLHRGAKDEWAVCKVINKDLAGKAGQQQMAPPHAVSVGMERSDSLAFLDDLVLDNADDLPPLIDSTTYAAAGTTTTTNDDSGGYQQATKAEPQPHLPAPSNSPYQQQAIRRHCKAEAPAPAMVLSPSRETPGADMFQLQHVDELLQLDGGFMEDYYNMNMWKV

SEQ ID NO: 18585 - protein, 135 aa, Zea mays subsp. mays
  peptide (1)..(135): Ceres Seq. ID no. 12350774
  misc_feature (1)..(36): Homolog of NCBI NO: 21389172 NR Description: nam-like protein 17 [Petunia x hybrida]
  misc_feature (1)..(44): Homolog of NCBI NO: 27529810 NR Description: OsNAC2 protein [Oryza sativa]
  misc_feature (1)..(60): Homolog of NCBI NO: 21105757 NR Description: nam-like protein 14 [Petunia x hybrida]
  misc_feature (1)..(36): Homolog of NCBI NO: 30686737 NR Description: NAM (no apical meristem)-related protein
  misc_feature (1)..(36): Homolog of NCBI NO: 9758909 NR Description: NAM (no apical meristem)-like protein
  misc_feature (1)..(76): Homolog of NCBI NO: 15229219 NR Description: NAM-like protein (no apical meristem)
  misc_feature (1)..(135): Homolog of NCBI NO: 27529808 NR Description: OsNAC1 protein [Oryza sativa]
  misc_feature (1)..(105): Homolog of NCBI NO: 34902148 NR Description: Putative NAM (no apical meristem) protein
  misc_feature (1)..(134): Homolog of NCBI NO: 34394523 NR Description: putative GRAB2 protein(Geminivirus Rep A-binding)
  misc_feature (1)..(80): Homolog of NCBI NO: 4218537 NR Description: GRAB2 protein [Triticum sp.]
MAPPHAVSVGMERSDSLAFLDDLVLDNADDLPPLIDSTTYAAAGTTTTTNDDSGGYQQATKAEPQPHLPAPSNSPYQQQAIRRHCKAEAPAPAMVLSPSRETPGADMFQLQHVDELLQLDGGFMEDYYNMNMWKV

SEQ ID NO: 18586 - DNA, 699 bp, Zea mays subsp. mays
  misc_feature (1)..(699): Ceres Seq. ID no. 12381542
  misc_feature: MA Experiment ID: 108504 Result: Down-regulated in Transcription
  misc_feature: MA Experiment 108504 PARAMETER Experiment Name: Zm_Drought_P Parameter: Age (day) Value: 8
  misc_feature: MA Experiment 108504 PARAMETER Experiment Name: Zm_Drought_P Parameter: Organism Value: Zea mays
  misc_feature: MA Experiment 108504 PARAMETER Experiment Name: Zm_Drought_P Parameter: Plant Line Value: 35A19
  misc_feature: MA Experiment 108504 PARAMETER Experiment Name: Zm_Drought_P Parameter: Timepoint (hr) Value: 12
  misc_feature: MA Experiment 108504 PARAMETER Experiment Name: Zm_Drought_P Parameter: Tissue Value: Aerial
  misc_feature: MA Experiment 108504 PARAMETER Experiment Name: Zm_Drought_P Parameter: Treatment Value: Drought vs. No Drought
  misc_feature: MA Experiment ID: 108522 Result: Down-regulated in Transcription
  misc_feature: MA Experiment 108522 PARAMETER Experiment Name: Zm_42deg_Heat_P Parameter: Age (day) Value: 8
  misc_feature: MA Experiment 108522 PARAMETER Experiment Name: Zm_42deg_Heat_P Parameter: Organism Value: Zea mays
  misc_feature: MA Experiment 108522 PARAMETER Experiment Name: Zm_42deg_Heat_P Parameter: Plant Line Value: 35A19
  misc_feature: MA Experiment 108522 PARAMETER Experiment Name: Zm_42deg_Heat_P Parameter: Temperature (deg C) Value: 42 vs. 22
  misc_feature: MA Experiment 108522 PARAMETER Experiment Name: Zm_42deg_Heat_P Parameter: Timepoint (hr) Value: 1
  misc_feature: MA Experiment 108522 PARAMETER Experiment Name: Zm_42deg_Heat_P Parameter: Tissue Value: Aerial
  misc_feature: MA Experiment ID: 108528 Result: Up-regulated in Transcription
  misc_feature: MA Experiment 108528 PARAMETER Experiment Name: Zm_Imbibed_Seeds_P Parameter: Age (day) Value: 5 vs. 2
  misc_feature: MA Experiment 108528 PARAMETER Experiment Name: Zm_Imbibed_Seeds_P Parameter: Organism Value: Zea mays
  misc_feature: MA Experiment 108528 PARAMETER Experiment Name: Zm_Imbibed_Seeds_P Parameter: Plant Line Value: 35A19
  misc_feature: MA Experiment 108528 PARAMETER Experiment Name: Zm_Imbibed_Seeds_P Parameter: Tissue Value: Aerial vs. Embryo
  misc_feature: MA Experiment ID: 108530 Result: Up-regulated in Transcription
  misc_feature: MA Experiment 108530 PARAMETER Experiment Name: Zm_Imbibed_Seeds_P Parameter: Age (day) Value: 6 vs. 2
  misc_feature: MA Experiment 108530 PARAMETER Experiment Name: Zm_Imbibed_Seeds_P Parameter: Organism Value: Zea mays
  misc_feature: MA Experiment 108530 PARAMETER Experiment Name: Zm_Imbibed_Seeds_P Parameter: Plant Line Value: 35A19
  misc_feature: MA Experiment 108530 PARAMETER Experiment Name: Zm_Imbibed_Seeds_P Parameter: Tissue Value: Aerial vs. Embryo
  misc_feature: MA Experiment ID: 108547 Result: Up-regulated in Transcription
  misc_feature: MA Experiment 108547 PARAMETER Experiment Name: Zm_Imbibed_Seeds_P Parameter: Age (day) Value: 4 vs. 2
  misc_feature: MA Experiment 108547 PARAMETER Experiment Name: Zm_Imbibed_Seeds_P Parameter: Organism Value: Zea mays
  misc_feature: MA Experiment 108547 PARAMETER Experiment Name: Zm_Imbibed_Seeds_P Parameter: Plant Line Value: 35A19
  misc_feature: MA Experiment 108547 PARAMETER Experiment Name: Zm_Imbibed_Seeds_P Parameter: Tissue Value: Aerial vs. Embryo
  misc_feature: MA Experiment ID: 108556 Result: Down-regulated in Transcription
  misc_feature: MA Experiment 108556 PARAMETER Experiment Name: Zm_Drought_P Parameter: Age (day) Value: 9
  misc_feature: MA Experiment 108556 PARAMETER Experiment Name: Zm_Drought_P Parameter: Organism Value: Zea mays
  misc_feature: MA Experiment 108556 PARAMETER Experiment Name: Zm_Drought_P Parameter: Plant Line Value: 35A19
  misc_feature: MA Experiment 108556 PARAMETER Experiment Name: Zm_Drought_P Parameter: Timepoint (hr) Value: 24
  misc_feature: MA Experiment 108556 PARAMETER Experiment Name: Zm_Drought_P Parameter: Tissue Value: Aerial
  misc_feature: MA Experiment 108556 PARAMETER Experiment Name: Zm_Drought_P Parameter: Treatment Value: Drought vs. No Drought
  misc_feature: MA Experiment ID: 108689 Result: Down-regulated in Transcription
  misc_feature: MA Experiment 108689 PARAMETER Experiment Name: Zm_Drought_Roots_P Parameter: Age (day) Value: 9
  misc_feature: MA Experiment 108689 PARAMETER Experiment Name: Zm_Drought_Roots_P Parameter: Organism Value: Zea mays
  misc_feature: MA Experiment 108689 PARAMETER Experiment Name: Zm_Drought_Roots_P Parameter: Plant Line Value: 35A19
  misc_feature: MA Experiment 108689 PARAMETER Experiment Name: Zm_Drought_Roots_P Parameter: Timepoint (hr) Value: 24
  misc_feature: MA Experiment 108689 PARAMETER Experiment Name: Zm_Drought_Roots_P Parameter: Tissue Value: Roots
  misc_feature: MA Experiment 108689 PARAMETER Experiment Name: Zm_Drought_Roots_P Parameter: Treatment Value: Drought vs. No Drought
  misc_feature: MA Experiment ID: 20000479 Result: Down-regulated in Transcription
  misc_feature: MA Experiment 20000479 PARAMETER Experiment Name: Zm_Drought_P Parameter: Age (day) Value: 10
  misc_feature: MA Experiment 20000479 PARAMETER Experiment Name: Zm_Drought_P Parameter: Organism Value: Zea mays
  misc_feature: MA Experiment 20000479 PARAMETER Experiment Name: Zm_Drought_P Parameter: Plant Line Value: 35A19
  misc_feature: MA Experiment 20000479 PARAMETER Experiment Name: Zm_Drought_P Parameter: Timepoint (hr) Value: 48
  misc_feature: MA Experiment 20000479 PARAMETER Experiment Name: Zm_Drought_P Parameter: Tissue Value: Aerial
  misc_feature: MA Experiment 20000479 PARAMETER Experiment Name: Zm_Drought_P Parameter: Treatment Value: Drought vs. No Drought
  misc_feature: MA Experiment ID: 20000480 Result: Down-regulated in Transcription
  misc_feature: MA Experiment 20000480 PARAMETER Experiment Name: Zm_Drought_P Parameter: Age (day) Value: 11
  misc_feature: MA Experiment 20000480 PARAMETER Experiment Name: Zm_Drought_P Parameter: Organism Value: Zea mays
  misc_feature: MA Experiment 20000480 PARAMETER Experiment Name: Zm_Drought_P Parameter: Plant Line Value: 35A19
  misc_feature: MA Experiment 20000480 PARAMETER Experiment Name: Zm_Drought_P Parameter: Timepoint (hr) Value: 72
  misc_feature: MA Experiment 20000480 PARAMETER Experiment Name: Zm_Drought_P Parameter: Tissue Value: Aerial
  misc_feature: MA Experiment 20000480 PARAMETER Experiment Name: Zm_Drought_P Parameter: Treatment Value: Drought vs. No Drought
  misc_feature: MA Experiment ID: 20000626 Result: Down-regulated in Transcription
  misc_feature: MA Experiment 20000626 PARAMETER Experiment Name: Zm_Herbicide-Treatments_P Parameter: Timepoint (hr) Value: 12
  misc_feature: MA Experiment 20000626 PARAMETER Experiment Name: Zm_Herbicide-Treatments_P Parameter: Tissue Value: Aerial
  misc_feature: MA Experiment 20000626 PARAMETER Experiment Name: Zm_Herbicide-Treatments_P Parameter: Treatment Value: Roundup vs. No Treatment
  misc_feature: MA Experiment ID: 20000630 Result: Down-regulated in Transcription
  misc_feature: MA Experiment 20000630 PARAMETER Experiment Name: Zm_Herbicide-Treatments_P Parameter: Timepoint (hr) Value: 4
  misc_feature: MA Experiment 20000630 PARAMETER Experiment Name: Zm_Herbicide-Treatments_P Parameter: Tissue Value: Aerial
  misc_feature: MA Experiment 20000630 PARAMETER Experiment Name: Zm_Herbicide-Treatments_P Parameter: Treatment Value: Roundup vs. No Treatment
agaggaaaacgcactgccaacggagtcaggtgcggcgggaggtagcatgagggagcagcaggattccggcgacgtgacggggcgccggggcggggtcatcaggtcgctgctgggcgtcgagcgccggcttgcggagggcgacgcggacgccgagggggcgctcggagcctcctcggagaagcagcatttggccgcggacagcggcgaggagaggaaggcggtggtgagggtggtggcggctgacatgccgcccgcgctgcagcgccgcgcgttccgctgcgcccgcgacgagctcgcggcgatgccgcacttcccgcgccggctcgagcccaagcgcctcgcgctggcgctcaagaaggagtttgatactgcttacgggccagcttggcactgcatcgtggggacgagtttcggttcgtatgtcacgcacgcccggggtggtttcttgtatttttccgtcgataaggtctacatcctgctnttcaggacagccgtggagccctcgaatcattgacggccaccggcctgccagcaatggaccaatggctcataaaaacgcgcagttcttgggacagcttgcaccaaattcagttgttcagtcagctaggccgagcccttgtaacttgtaaatcgcattgtttcttggtaggcaaatgtaaactactccttatgcttctgataaaatttaacatttcagtc

SEQ ID NO: 18587 - protein, 170 aa, Zea mays subsp. mays
  peptide (1)..(170): Ceres Seq. ID no. 12381543
  misc_feature (75)..(164): Pfam Name: Dynein light chain type 1 Pfam Description: Dynein light chain type 1
  misc_feature (72)..(162): Homolog of NCBI NO: 28829295 NR Description: similar to Anthocidaris crassispina (Sea urchin).
  misc_feature (70)..(163): Homolog of NCBI NO: 18087731 NR Description: dynein light chain 2; RIKEN cDNA 1700064A15 gene
  misc_feature (41)..(163): Homolog of NCBI NO: 34902908 NR Description: unnamed protein product [Oryza sativa (japonica
  misc_feature (70)..(163): Homolog of NCBI NO: 30961847 NR Description: neuronal nitric oxidse synthase protein inhibitor
  misc_feature (70)..(163): Homolog of NCBI NO: 34785679 NR Description: Unknown (protein for MGC:68763) [Xenopus laevis]
  misc_feature (70)..(163): Homolog of NCBI NO: 2811014 NR Description: DYNEIN LIGHT CHAIN LC6, FLAGELLAR OUTER ARM
  misc_feature (75)..(165): Homolog of NCBI NO: 34913978 NR Description: dynein light chain - like protein
  misc_feature (40)..(169): Homolog of NCBI NO: 15241269 NR Description: dynein light chain - like protein; protein id:
  misc_feature (54)..(167): Homolog of NCBI NO: 15220678 NR Description: dynein light subunit lc6, flagellar outer arm
  misc_feature (67)..(170): Homolog of NCBI NO: 38567715 NR Description: B1358B12.13 [Oryza sativa (japonica
  misc_feature (160)..(160): Xaa is any aa, unknown or other
EENALPTESGAAGGSMREQQDSGDVTGRRGGVIRSLLGVERRLAEGDADAEGALGASSEKQHLAADSGEERKAVVRVVAADMPPALQRRAFRCARDELAAMPHFPRRLEPKRLALALKKEFDTAYGPAWHCIVGTSFGSYVTHARGGFLYFSVDKVYILXFRTAVEPSNH

SEQ ID NO: 18588 - protein, 155 aa, Zea mays subsp. mays
  peptide (1)..(155): Ceres Seq. ID no. 12381544
  misc_feature (60)..(149): Pfam Name: Dynein light chain type 1 Pfam Description: Dynein light chain type 1
  misc_feature (26)..(148): Homolog of NCBI NO: 34902908 NR Description: unnamed protein product [Oryza sativa (japonica
  misc_feature (55)..(148): Homolog of NCBI NO: 30961847 NR Description: neuronal nitric oxidse synthase protein inhibitor
  misc_feature (55)..(148): Homolog of NCBI NO: 34785679 NR Description: Unknown (protein for MGC:68763) [Xenopus laevis]
  misc_feature (55)..(148): Homolog of NCBI NO: 2811014 NR Description: DYNEIN LIGHT CHAIN LC6, FLAGELLAR OUTER ARM
  misc_feature (57)..(147): Homolog of NCBI NO: 28829295 NR Description: similar to Anthocidaris crassispina (Sea urchin).
  misc_feature (55)..(148): Homolog of NCBI NO: 18087731 NR Description: dynein light chain 2; RIKEN cDNA 1700064A15 gene
  misc_feature (60)..(150): Homolog of NCBI NO: 34913978 NR Description: dynein light chain - like protein
  misc_feature (25)..(154): Homolog of NCBI NO: 15241269 NR Description: dynein light chain - like protein; protein id:
  misc_feature (39)..(152): Homolog of NCBI NO: 15220678 NR Description: dynein light subunit lc6, flagellar outer arm
  misc_feature (52)..(155): Homolog of NCBI NO: 38567715 NR Description: B1358B12.13 [Oryza sativa (japonica
  misc_feature (145)..(145): Xaa is any aa, unknown or other
MREQQDSGDVTGRRGGVIRSLLGVERRLAEGDADAEGALGASSEKQHLAADSGEERKAVVRVVAADMPPALQRRAFRCARDELAAMPHFPRRLEPKRLALALKKEFDTAYGPAWHCIVGTSFGSYVTHARGGFLYFSVDKVYILXFRTAVEPSNH

SEQ ID NO: 18589 - protein, 89 aa, Zea mays subsp. mays
  peptide (1)..(89): Ceres Seq. ID no. 12381545
  misc_feature (1)..(83): Pfam Name: Dynein light chain type 1 Pfam Description: Dynein light chain type 1
  misc_feature (1)..(81): Homolog of NCBI NO: 28829295 NR Description: similar to Anthocidaris crassispina (Sea urchin).
  misc_feature (1)..(82): Homolog of NCBI NO: 18087731 NR Description: dynein light chain 2; RIKEN cDNA 1700064A15 gene
  misc_feature (1)..(82): Homolog of NCBI NO: 34902908 NR Description: unnamed protein product [Oryza sativa (japonica
  misc_feature (1)..(82): Homolog of NCBI NO: 30961847 NR Description: neuronal nitric oxidse synthase protein inhibitor
  misc_feature (1)..(82): Homolog of NCBI NO: 34785679 NR Description: Unknown (protein for MGC:68763) [Xenopus laevis]
  misc_feature (1)..(82): Homolog of NCBI NO: 2811014 NR Description: DYNEIN LIGHT CHAIN LC6, FLAGELLAR OUTER ARM
  misc_feature (1)..(84): Homolog of NCBI NO: 34913978 NR Description: dynein light chain - like protein
  misc_feature (1)..(88): Homolog of NCBI NO: 15241269 NR Description: dynein light chain - like protein; protein id:
  misc_feature (1)..(86): Homolog of NCBI NO: 15220678 NR Description: dynein light subunit lc6, flagellar outer arm
  misc_feature (1)..(89): Homolog of NCBI NO: 38567715 NR Description: B1358B12.13 [Oryza sativa (japonica
  misc_feature (79)..(79): Xaa is any aa, unknown or other
MPPALQRRAFRCARDELAAMPHFPRRLEPKRLALALKKEFDTAYGPAWHCIVGTSFGSYVTHARGGFLYFSVDKVYILXFRTAVEPSNH

SEQ ID NO: 18590 - DNA, 941 bp, Zea mays subsp. mays
  misc_feature (1)..(941): Ceres Seq. ID no. 12369394
  misc_feature: MA Experiment ID: 108527 Result: Down-regulated in Transcription
  misc_feature: MA Experiment 108527 PARAMETER Experiment Name: Zm_5mM_NO_P Parameter: Age (day) Value: 8
  misc_feature: MA Experiment 108527 PARAMETER Experiment Name: Zm_5mM_NO_P Parameter: Organism Value: Zea mays
  misc_feature: MA Experiment 108527 PARAMETER Experiment Name: Zm_5mM_NO_P Parameter: Plant Line Value: 35A19
  misc_feature: MA Experiment 108527 PARAMETER Experiment Name: Zm_5mM_NO_P Parameter: Timepoint (hr) Value: 6
  misc_feature: MA Experiment 108527 PARAMETER Experiment Name: Zm_5mM_NO_P Parameter: Tissue Value: Aerial
  misc_feature: MA Experiment 108527 PARAMETER Experiment Name: Zm_5mM_NO_P Parameter: Treatment Value: 5mM NO vs. No Treatment
  misc_feature: MA Experiment ID: 108528 Result: Up-regulated in Transcription
  misc_feature: MA Experiment 108528 PARAMETER Experiment Name: Zm_Imbibed_Seeds_P Parameter: Age (day) Value: 5 vs. 2
  misc_feature: MA Experiment 108528 PARAMETER Experiment Name: Zm_Imbibed_Seeds_P Parameter: Organism Value: Zea mays
  misc_feature: MA Experiment 108528 PARAMETER Experiment Name: Zm_Imbibed_Seeds_P Parameter: Plant Line Value: 35A19
  misc_feature: MA Experiment 108528 PARAMETER Experiment Name: Zm_Imbibed_Seeds_P Parameter: Tissue Value: Aerial vs. Embryo
  misc_feature: MA Experiment ID: 108530 Result: Up-regulated in Transcription
  misc_feature: MA Experiment 108530 PARAMETER Experiment Name: Zm_Imbibed_Seeds_P Parameter: Age (day) Value: 6 vs. 2
  misc_feature: MA Experiment 108530 PARAMETER Experiment Name: Zm_Imbibed_Seeds_P Parameter: Organism Value: Zea mays
  misc_feature: MA Experiment 108530 PARAMETER Experiment Name: Zm_Imbibed_Seeds_P Parameter: Plant Line Value: 35A19
  misc_feature: MA Experiment 108530 PARAMETER Experiment Name: Zm_Imbibed_Seeds_P Parameter: Tissue Value: Aerial vs. Embryo
  misc_feature: MA Experiment ID: 108545 Result: Up-regulated in Transcription
  misc_feature: MA Experiment 108545 PARAMETER Experiment Name: Zm_Imbibed_Seeds_P Parameter: Age (day) Value: 3 vs. 2
  misc_feature: MA Experiment 108545 PARAMETER Experiment Name: Zm_Imbibed_Seeds_P Parameter: Organism Value: Zea mays
  misc_feature: MA Experiment 108545 PARAMETER Experiment Name: Zm_Imbibed_Seeds_P Parameter: Plant Line Value: 35A19
  misc_feature: MA Experiment 108545 PARAMETER Experiment Name: Zm_Imbibed_Seeds_P Parameter: Tissue Value: Aerial vs. Embryo
  misc_feature: MA Experiment ID: 108547 Result: Up-regulated in Transcription
  misc_feature: MA Experiment 108547 PARAMETER Experiment Name: Zm_Imbibed_Seeds_P Parameter: Age (day) Value: 4 vs. 2
  misc_feature: MA Experiment 108547 PARAMETER Experiment Name: Zm_Imbibed_Seeds_P Parameter: Organism Value: Zea mays
  misc_feature: MA Experiment 108547 PARAMETER Experiment Name: Zm_Imbibed_Seeds_P Parameter: Plant Line Value: 35A19
  misc_feature: MA Experiment 108547 PARAMETER Experiment Name: Zm_Imbibed_Seeds_P Parameter: Tissue Value: Aerial vs. Embryo
  misc_feature: MA Experiment ID: 108556 Result: Down-regulated in Transcription
  misc_feature: MA Experiment 108556 PARAMETER Experiment Name: Zm_Drought_P Parameter: Age (day) Value: 9
  misc_feature: MA Experiment 108556 PARAMETER Experiment Name: Zm_Drought_P Parameter: Organism Value: Zea mays
  misc_feature: MA Experiment 108556 PARAMETER Experiment Name: Zm_Drought_P Parameter: Plant Line Value: 35A19
  misc_feature: MA Experiment 108556 PARAMETER Experiment Name: Zm_Drought_P Parameter: Timepoint (hr) Value: 24
  misc_feature: MA Experiment 108556 PARAMETER Experiment Name: Zm_Drought_P Parameter: Tissue Value: Aerial
  misc_feature: MA Experiment 108556 PARAMETER Experiment Name: Zm_Drought_P Parameter: Treatment Value: Drought vs. No Drought
  misc_feature: MA Experiment ID: 108559 Result: Down-regulated in Transcription
  misc_feature: MA Experiment 108559 PARAMETER Experiment Name: Zm_5mM_NO_P Parameter: Age (day) Value: 8
  misc_feature: MA Experiment 108559 PARAMETER Experiment Name: Zm_5mM_NO_P Parameter: Organism Value: Zea mays
  misc_feature: MA Experiment 108559 PARAMETER Experiment Name: Zm_5mM_NO_P Parameter: Plant Line Value: 35A19
  misc_feature: MA Experiment 108559 PARAMETER Experiment Name: Zm_5mM_NO_P Parameter: Timepoint (hr) Value: 12
  misc_feature: MA Experiment 108559 PARAMETER Experiment Name: Zm_5mM_NO_P Parameter: Tissue Value: Aerial
  misc_feature: MA Experiment 108559 PARAMETER Experiment Name: Zm_5mM_NO_P Parameter: Treatment Value: 5mM NO vs. No Treatment
  misc_feature: MA Experiment ID: 108688 Result: Down-regulated in Transcription
  misc_feature: MA Experiment 108688 PARAMETER Experiment Name: Zm_Embryos-Flowers__P Parameter: Tissue Value: Immature Flowers vs. Aerial+
gttaacacgcaaacgcaagctcccaagcagctaccaaccagccgggagagggagcgcacgcactgcgagaatggccacggccggcggaggggccgggcatctgaagctgctgggcgcgtggccgagccccttcgtgaaccgtgtacgcatggcgctgcacctcaaggggctggagtacgagaacgtggaggaggacctcaccaacaagagcgacctgctcctcgcctccaaccccgtccacaagctcgttcccgtcctcctccacggcgacaagcccatctccgagtcactcgtcatcgtggagtacctcgacgacgccttccccggcgctggccaggccgtcctccccgccgacccctatgaacgcgccgtcgctcgcttctgggccaaatacgtcgacggcaagttgcacggcatgatggtgaaggcgctcatgggggcaacggaggaggagagggcgacggcgacggtggacgcgctggccgctatggacacgctggagggcgcgttcgccgagtgctccggcgggaaaaagttcttcgccggcgacgcgcccgggtacctggacgtcgcgctgggaggcttcatcggctggctgcgcgcctgggacaaggtggggggcgtcaagctgctggacgccggccgggtcccgcgcctggccacgtgggcggagcgcttcgccgcgctcgacgtagccaaggaggtcatcccggaccccgaccacatcgccgagtttgccaaggtgctgcaggcacgctccgcggcagctgccaccagcaactgagctcgcaagtgaatgctgctgctctgccttcctgataaaatcatatcatggtacccggtttgttcgtttaatctggcgcggaaaaaacatggtttgttgtcgtaccaaactaagagtatgcatgcatgcttgttcttaattatatgtacattcgttc

SEQ ID NO: 18591 - protein, 260 aa, Zea mays subsp. mays
  peptide (1)..(260): Ceres Seq. ID no. 12369395
  misc_feature (27)..(260): Homolog of NCBI NO: 11385531 NR Description: glutathione S-transferase GST 40 [Zea mays]
  misc_feature (24)..(259): Homolog of NCBI NO: 15430711 NR Description: putative glutathione S-transferase OsGSTU7
  misc_feature (27)..(256): Homolog of NCBI NO: 37536306 NR Description: putative glutathione S-transferase
  misc_feature (27)..(259): Homolog of NCBI NO: 33304612 NR Description: tau class GST protein 3 [Oryza sativa (indica
  misc_feature (27)..(259): Homolog of NCBI NO: 33304610 NR Description: tau class GST protein 4 [Oryza sativa (indica
  misc_feature (24)..(259): Homolog of NCBI NO: 37536328 NR Description: putative glutathione S-transferase
  misc_feature (27)..(259): Homolog of NCBI NO: 37536312 NR Description: putative glutathione S-transferase
  misc_feature (27)..(259): Homolog of NCBI NO: 37536310 NR Description: putative glutathione S-transferase
  misc_feature (30)..(260): Homolog of NCBI NO: 37536308 NR Description: putative glutathione S-transferase
  misc_feature (24)..(260): Homolog of NCBI NO: 11385505 NR Description: glutathione S-transferase GST 27 [Zea mays]
LTRKRKLPSSYQPAGRGSARTARMATAGGGAGHLKLLGAWPSPFVNRVRMALHLKGLEYENVEEDLTNKSDLLLASNPVHKLVPVLLHGDKPISESLVIVEYLDDAFPGAGQAVLPADPYERAVARFWAKYVDGKLHGMMVKALMGATEEERATATVDALAAMDTLEGAFAECSGGKKFFAGDAPGYLDVALGGFIGWLRAWDKVGGVKLLDAGRVPRLATWAERFAALDVAKEVIPDPDHIAEFAKVLQARSAAAATSN

SEQ ID NO: 18592 - protein, 237 aa, Zea mays subsp. mays
  peptide (1)..(237): Ceres Seq. ID no. 12369396
  misc_feature (4)..(237): Homolog of NCBI NO: 11385531 NR Description: glutathione S-transferase GST 40 [Zea mays]
  misc_feature (1)..(236): Homolog of NCBI NO: 15430711 NR Description: putative glutathione S-transferase OsGSTU7
  misc_feature (4)..(233): Homolog of NCBI NO: 37536306 NR Description: putative glutathione S-transferase
  misc_feature (4)..(236): Homolog of NCBI NO: 33304612 NR Description: tau class GST protein 3 [Oryza sativa (indica
  misc_feature (4)..(236): Homolog of NCBI NO: 33304610 NR Description: tau class GST protein 4 [Oryza sativa (indica
  misc_feature (1)..(236): Homolog of NCBI NO: 37536328 NR Description: putative glutathione S-transferase
  misc_feature (4)..(236): Homolog of NCBI NO: 37536312 NR Description: putative glutathione S-transferase
  misc_feature (4)..(236): Homolog of NCBI NO: 37536310 NR Description: putative glutathione S-transferase
  misc_feature (7)..(237): Homolog of NCBI NO: 37536308 NR Description: putative glutathione S-transferase
  misc_feature (1)..(237): Homolog of NCBI NO: 11385505 NR Description: glutathione S-transferase GST 27 [Zea mays]
MATAGGGAGHLKLLGAWPSPFVNRVRMALHLKGLEYENVEEDLTNKSDLLLASNPVHKLVPVLLHGDKPISESLVIVEYLDDAFPGAGQAVLPADPYERAVARFWAKYVDGKLHGMMVKALMGATEEERATATVDALAAMDTLEGAFAECSGGKKFFAGDAPGYLDVALGGFIGWLRAWDKVGGVKLLDAGRVPRLATWAERFAALDVAKEVIPDPDHIAEFAKVLQARSAAAATSN

SEQ ID NO: 18593 - protein, 211 aa, Zea mays subsp. mays
  peptide (1)..(211): Ceres Seq. ID no. 12369397
  misc_feature (1)..(211): Homolog of NCBI NO: 11385531 NR Description: glutathione S-transferase GST 40 [Zea mays]
  misc_feature (1)..(210): Homolog of NCBI NO: 15430711 NR Description: putative glutathione S-transferase OsGSTU7
  misc_feature (1)..(207): Homolog of NCBI NO: 37536306 NR Description: putative glutathione S-transferase
  misc_feature (1)..(210): Homolog of NCBI NO: 33304612 NR Description: tau class GST protein 3 [Oryza sativa (indica
  misc_feature (1)..(210): Homolog of NCBI NO: 33304610 NR Description: tau class GST protein 4 [Oryza sativa (indica
  misc_feature (1)..(210): Homolog of NCBI NO: 37536328 NR Description: putative glutathione S-transferase
  misc_feature (1)..(210): Homolog of NCBI NO: 37536312 NR Description: putative glutathione S-transferase
  misc_feature (1)..(210): Homolog of NCBI NO: 37536310 NR Description: putative glutathione S-transferase
  misc_feature (1)..(211): Homolog of NCBI NO: 37536308 NR Description: putative glutathione S-transferase
  misc_feature (1)..(211): Homolog of NCBI NO: 11385505 NR Description: glutathione S-transferase GST 27 [Zea mays]
MALHLKGLEYENVEEDLTNKSDLLLASNPVHKLVPVLLHGDKPISESLVIVEYLDDAFPGAGQAVLPADPYERAVARFWAKYVDGKLHGMMVKALMGATEEERATATVDALAAMDTLEGAFAECSGGKKFFAGDAPGYLDVALGGFIGWLRAWDKVGGVKLLDAGRVPRLATWAERFAALDVAKEVIPDPDHIAEFAKVLQARSAAAATSN

SEQ ID NO: 18594 - DNA, 1288 bp, Zea mays subsp. mays
  misc_feature (1)..(1288): Ceres Seq. ID no. 12360617
  misc_feature: MA Experiment ID: 108522 Result: Up-regulated in Transcription
  misc_feature: MA Experiment 108522 PARAMETER Experiment Name: Zm_42deg_Heat_P Parameter: Age (day) Value: 8
  misc_feature: MA Experiment 108522 PARAMETER Experiment Name: Zm_42deg_Heat_P Parameter: Organism Value: Zea mays
  misc_feature: MA Experiment 108522 PARAMETER Experiment Name: Zm_42deg_Heat_P Parameter: Plant Line Value: 35A19
  misc_feature: MA Experiment 108522 PARAMETER Experiment Name: Zm_42deg_Heat_P Parameter: Temperature (deg C) Value: 42 vs. 22
  misc_feature: MA Experiment 108522 PARAMETER Experiment Name: Zm_42deg_Heat_P Parameter: Timepoint (hr) Value: 1
  misc_feature: MA Experiment 108522 PARAMETER Experiment Name: Zm_42deg_Heat_P Parameter: Tissue Value: Aerial
  misc_feature: MA Experiment ID: 20000492 Result: Up-regulated in Transcription
  misc_feature: MA Experiment 20000492 PARAMETER Experiment Name: Zm_Hybrid_Seed_Dev_P Parameter: DAP Value: 12
  misc_feature: MA Experiment 20000492 PARAMETER Experiment Name: Zm_Hybrid_Seed_Dev_P Parameter: Organism Value: Zea mays
  misc_feature: MA Experiment 20000492 PARAMETER Experiment Name: Zm_Hybrid_Seed_Dev_P Parameter: Plant Line Value: 35A19
  misc_feature: MA Experiment 20000492 PARAMETER Experiment Name: Zm_Hybrid_Seed_Dev_P Parameter: Tissue Value: Fert Kernel vs. Unfert Floret
  misc_feature: MA Experiment ID: 20000535 Result: Down-regulated in Transcription
  misc_feature: MA Experiment 20000535 PARAMETER Experiment Name: Zm_Hybrid_Seed_Dev_P Parameter: DAP Value: 30 vs. 12
  misc_feature: MA Experiment 20000535 PARAMETER Experiment Name: Zm_Hybrid_Seed_Dev_P Parameter: Organism Value: Zea mays
  misc_feature: MA Experiment 20000535 PARAMETER Experiment Name: Zm_Hybrid_Seed_Dev_P Parameter: Plant Line Value: 35A19
  misc_feature: MA Experiment 20000535 PARAMETER Experiment Name: Zm_Hybrid_Seed_Dev_P Parameter: Tissue Value: Embryo vs. Unfert Floret
gcacgagaccattacctagaacatcctaatcgaaaaaagctctctcatccagctaactaatggaagtagctagcaaacgtacgtattcttcttcaccatctgtttcttggggaaattaaaccccagtacgcgtacgtcacaatcgcgcgcaatggagaaggagaaggagaagtccagggccaggccgtcgaggggccactggcggcccggcgaggacgacaagctgcggcagctcgtcgacaagtacggcccgcggaactggaactccattgctgagagtctggaggggagatcaggcaagagctgccggctacgatggttcaaccagcttgacccgcggatcaaccggcggcccttcacggtggcggaggaggagctgctcctgcgggcgcaccgcgcccacggcaaccgctgggcgatcatctcccgcctcttcccgggccgcaccgacaacgccgtcaagaaccactggcacgtcgtcatggcgcgccgccgccgccgtaccctcgtcggcgaggccgcagccatcggctctgtcgttgtaccgcctcgtcatcagtacttccattttggaagctgctcgccgccgccgccgacccgctcgctgtgcttcgcggtgcctgcaggtttcggtccgctcggactcagcagaccagctgcaagttgcggtgtcaggaactgcaatgtgcccactgccgtcgcattactggacgacggccatcgtcatgacatgagcaaagaccttggtggcgacgatgacaatggcggtgatgcgcttgcaaagaggaaggacgtgcaattcttcgacttcttgggcgtcgggatctaaagcaaaataatgatgctactaatggtacattaattagtacactacatttcaacgatacactattggggtcttcttttccgtcgaagattcttttaaaaaacatcttcgacaaaatgatacaaaggatcaccgaagccaccttcagtctcgatttatctcctcaagacgaagactctgtatagagccgacagtgcaagatgccgaagctcaatggcctcagcccacatcaagcaaggaaggaaaaaggactagataggccttattggttttaattacttgtaaacaagtgttcaagggcatggatgtaattttaccgggctgcgtcccgtgactataaatagatgaacagtaccccgaccgtactattcacgctggattgtaatcactctcgcatcatcctcgttctctcaccttttggcaagccgaaagtaccaatataatatgaatattgttgatgtt

SEQ ID NO: 18595 - protein, 225 aa, Zea mays subsp. mays
  peptide (1)..(225): Ceres Seq. ID no. 12360618
  misc_feature (14)..(60): Pfam Name: Myb-like DNA-binding domain Pfam Description: Myb-like DNA-binding domain
  misc_feature (13)..(116): Homolog of NCBI NO: 34903242 NR Description: unnamed protein product [Oryza sativa (japonica
  misc_feature (13)..(116): Homolog of NCBI NO: 11358541 NR Description: myb-related transcription factor MYB52
  misc_feature (13)..(116): Homolog of NCBI NO: 25513679 NR Description: F2H15.17 protein - Arabidopsis thaliana
  misc_feature (13)..(116): Homolog of NCBI NO: 21554916 NR Description: myb-like protein, putative [Arabidopsis thaliana]
  misc_feature (13)..(116): Homolog of NCBI NO: 15220910 NR Description: myb family trnscription factor
  misc_feature (13)..(118): Homolog of NCBI NO: 15219462 NR Description: myb family transcription factor(MYB54)
  misc_feature (13)..(118): Homolog of NCBI NO: 11358543 NR Description: myb-related transcription factor MYB54
  misc_feature (13)..(116): Homolog of NCBI NO: 31980093 NR Description: MYB transcription factor R2R3 type
  misc_feature (13)..(223): Homolog of NCBI NO: 21321780 NR Description: putative Myb/Myb-related protein
  misc_feature (1)..(171): Homolog of NCBI NO: 6979341 NR Description: myb-like protein [Oryza sativa]
MEKEKEKSRARPSRGHWRPGEDDKLRQLVDKYGPRNWNSIAESLEGRSGKSCRLRWFNQLDPRINRRPFTVAEEELLLRAHRAHGNRWAIISRLFPGRTDNAVKNHWHVVMARRRRRTLVGEAAAIGSVVVPPRHQYFHFGSCSPPPPTRSLCFAVPAGFGPLGLSRPAASCGVRNCNVPTAVALLDDGHRHDMSKDLGGDDDNGGDALAKRKDVQFFDFLGVGI

SEQ ID NO: 18596 - protein, 115 aa, Zea mays subsp. mays
  peptide (1)..(115): Ceres Seq. ID no. 12360619
  misc_feature (1)..(42): Homolog of NCBI NO: 1872204 NR Description: alternatively spliced product using exon 9A
  misc_feature (1)..(42): Homolog of NCBI NO: 180658 NR Description: c-myb protein
  misc_feature (1)..(42): Homolog of NCBI NO: 107957 NR Description: transforming protein myb (clone Mbm-2) - human
  misc_feature (1)..(21): Homolog of NCBI NO: 15232609 NR Description: myb family transcription factor; protein id:
  misc_feature (1)..(17): Homolog of NCBI NO: 15235484 NR Description: myb DNA-binding protein (AtMYB73)
  misc_feature (1)..(35): Homolog of NCBI NO: 9954112 NR Description: tuber-specific and sucrose-responsive element
  misc_feature (1)..(19): Homolog of NCBI NO: 18421897 NR Description: myb family transcription factor (MYB89)
  misc_feature (1)..(15): Homolog of NCBI NO: 15234199 NR Description: myb family transcription factor; protein id:
  misc_feature (1)..(113): Homolog of NCBI NO: 21321780 NR Description: putative Myb/Myb-related protein
  misc_feature (1)..(61): Homolog of NCBI NO: 6979341 NR Description: myb-like protein [Oryza sativa]
MARRRRRTLVGEAAAIGSVVVPPRHQYFHFGSCSPPPPTRSLCFAVPAGFGPLGLSRPAASCGVRNCNVPTAVALLDDGHRHDMSKDLGGDDDNGGDALAKRKDVQFFDFLGVGI

SEQ ID NO: 18597 - DNA, 1260 bp, Zea mays subsp. mays
  misc_feature (1)..(1260): Ceres Seq. ID no. 12368126
  misc_feature: MA Experiment ID: 108504 Result: Up-regulated in Transcription
  misc_feature: MA Experiment 108504 PARAMETER Experiment Name: Zm_Drought_P Parameter: Age (day) Value: 8
  misc_feature: MA Experiment 108504 PARAMETER Experiment Name: Zm_Drought_P Parameter: Organism Value: Zea mays
  misc_feature: MA Experiment 108504 PARAMETER Experiment Name: Zm_Drought_P Parameter: Plant Line Value: 35A19
  misc_feature: MA Experiment 108504 PARAMETER Experiment Name: Zm_Drought_P Parameter: Timepoint (hr) Value: 12
  misc_feature: MA Experiment 108504 PARAMETER Experiment Name: Zm_Drought_P Parameter: Tissue Value: Aerial
  misc_feature: MA Experiment 108504 PARAMETER Experiment Name: Zm_Drought_P Parameter: Treatment Value: Drought vs. No Drought
  misc_feature: MA Experiment ID: 108527 Result: Down-regulated in Transcription
  misc_feature: MA Experiment 108527 PARAMETER Experiment Name: Zm_5mM_NO_P Parameter: Age (day) Value: 8
  misc_feature: MA Experiment 108527 PARAMETER Experiment Name: Zm_5mM_NO_P Parameter: Organism Value: Zea mays
  misc_feature: MA Experiment 108527 PARAMETER Experiment Name: Zm_5mM_NO_P Parameter: Plant Line Value: 35A19
  misc_feature: MA Experiment 108527 PARAMETER Experiment Name: Zm_5mM_NO_P Parameter: Timepoint (hr) Value: 6
  misc_feature: MA Experiment 108527 PARAMETER Experiment Name: Zm_5mM_NO_P Parameter: Tissue Value: Aerial
  misc_feature: MA Experiment 108527 PARAMETER Experiment Name: Zm_5mM_NO_P Parameter: Treatment Value: 5mM NO vs. No Treatment
  misc_feature: MA Experiment ID: 108529 Result: Down-regulated in Transcription
  misc_feature: MA Experiment 108529 PARAMETER Experiment Name: Zm_Imbibed_Seeds_P Parameter: Age (day) Value: 5 vs. 2
  misc_feature: MA Experiment 108529 PARAMETER Experiment Name: Zm_Imbibed_Seeds_P Parameter: Organism Value: Zea mays
  misc_feature: MA Experiment 108529 PARAMETER Experiment Name: Zm_Imbibed_Seeds_P Parameter: Plant Line Value: 35A19
  misc_feature: MA Experiment 108529 PARAMETER Experiment Name: Zm_Imbibed_Seeds_P Parameter: Tissue Value: Roots vs. Embryo
  misc_feature: MA Experiment ID: 108535 Result: Up-regulated in Transcription
  misc_feature: MA Experiment 108535 PARAMETER Experiment Name: Zm_Meristem_P Parameter: Age (day) Value: 8
  misc_feature: MA Experiment 108535 PARAMETER Experiment Name: Zm_Meristem_P Parameter: Organism Value: Zea mays
  misc_feature: MA Experiment 108535 PARAMETER Experiment Name: Zm_Meristem_P Parameter: Plant Line Value: 35A19
  misc_feature: MA Experiment 108535 PARAMETER Experiment Name: Zm_Meristem_P Parameter: Tissue Value: Root Meristem vs. Above Root Meristem
  misc_feature: MA Experiment ID: 108536 Result: Down-regulated in Transcription
  misc_feature: MA Experiment 108536 PARAMETER Experiment Name: Zm_Meristem_P Parameter: Age (day) Value: 8
  misc_feature: MA Experiment 108536 PARAMETER Experiment Name: Zm_Meristem_P Parameter: Organism Value: Zea mays
  misc_feature: MA Experiment 108536 PARAMETER Experiment Name: Zm_Meristem_P Parameter: Plant Line Value: 35A19
  misc_feature: MA Experiment 108536 PARAMETER Experiment Name: Zm_Meristem_P Parameter: Tissue Value: Shoot Meristem vs. Above Shoot Meristem
  misc_feature: MA Experiment ID: 108543 Result: Down-regulated in Transcription
  misc_feature: MA Experiment ID: 108544 Result: Down-regulated in Transcription
  misc_feature: MA Experiment ID: 108545 Result: Up-regulated in Transcription
  misc_feature: MA Experiment 108545 PARAMETER Experiment Name: Zm_Imbibed_Seeds_P Parameter: Age (day) Value: 3 vs. 2
  misc_feature: MA Experiment 108545 PARAMETER Experiment Name: Zm_Imbibed_Seeds_P Parameter: Organism Value: Zea mays
  misc_feature: MA Experiment 108545 PARAMETER Experiment Name: Zm_Imbibed_Seeds_P Parameter: Plant Line Value: 35A19
  misc_feature: MA Experiment 108545 PARAMETER Experiment Name: Zm_Imbibed_Seeds_P Parameter: Tissue Value: Aerial vs. Embryo
  misc_feature: MA Experiment ID: 108556 Result: Up-regulated in Transcription
  misc_feature: MA Experiment 108556 PARAMETER Experiment Name: Zm_Drought_P Parameter: Age (day) Value: 9
  misc_feature: MA Experiment 108556 PARAMETER Experiment Name: Zm_Drought_P Parameter: Organism Value: Zea mays
  misc_feature: MA Experiment 108556 PARAMETER Experiment Name: Zm_Drought_P Parameter: Plant Line Value: 35A19
  misc_feature: MA Experiment 108556 PARAMETER Experiment Name: Zm_Drought_P Parameter: Timepoint (hr) Value: 24
  misc_feature: MA Experiment 108556 PARAMETER Experiment Name: Zm_Drought_P Parameter: Tissue Value: Aerial
  misc_feature: MA Experiment 108556 PARAMETER Experiment Name: Zm_Drought_P Parameter: Treatment Value: Drought vs. No Drought
  misc_feature: MA Experiment ID: 20000480 Result: Up-regulated in Transcription
  misc_feature: MA Experiment 20000480 PARAMETER Experiment Name: Zm_Drought_P Parameter: Age (day) Value: 11
  misc_feature: MA Experiment 20000480 PARAMETER Experiment Name: Zm_Drought_P Parameter: Organism Value: Zea mays
  misc_feature: MA Experiment 20000480 PARAMETER Experiment Name: Zm_Drought_P Parameter: Plant Line Value: 35A19
  misc_feature: MA Experiment 20000480 PARAMETER Experiment Name: Zm_Drought_P Parameter: Timepoint (hr) Value: 72
  misc_feature: MA Experiment 20000480 PARAMETER Experiment Name: Zm_Drought_P Parameter: Tissue Value: Aerial
  misc_feature: MA Experiment 20000480 PARAMETER Experiment Name: Zm_Drought_P Parameter: Treatment Value: Drought vs. No Drought
  misc_feature: MA Experiment ID: 20000487 Result: Down-regulated in Transcription
  misc_feature: MA Experiment 20000487 PARAMETER Experiment Name: Zm_50mM_NH4NO3_L_to_H_P Parameter: Organism Value: Zea mays
  misc_feature: MA Experiment 20000487 PARAMETER Experiment Name: Zm_50mM_NH4NO3_L_to_H_P Parameter: Timepoint (hr) Value: 4
  misc_feature: MA Experiment 20000487 PARAMETER Experiment Name: Zm_50mM_NH4NO3_L_to_H_P Parameter: Tissue Value: Leaves
  misc_feature: MA Experiment 20000487 PARAMETER Experiment Name: Zm_50mM_NH4NO3_L_to_H_P Parameter: Treatment Value: 50mM NH4NO3 vs. 100mM Mannitol
  misc_feature: MA Experiment ID: 20000535 Result: Up-regulated in Transcription
  misc_feature: MA Experiment 20000535 PARAMETER Experiment Name: Zm_Hybrid_Seed_Dev_P Parameter: DAP Value: 30 vs. 12
  misc_feature: MA Experiment 20000535 PARAMETER Experiment Name: Zm_Hybrid_Seed_Dev_P Parameter: Organism Value: Zea mays
  misc_feature: MA Experiment 20000535 PARAMETER Experiment Name: Zm_Hybrid_Seed_Dev_P Parameter: Plant Line Value: 35A19
  misc_feature: MA Experiment 20000535 PARAMETER Experiment Name: Zm_Hybrid_Seed_Dev_P Parameter: Tissue Value: Embryo vs. Unfert Floret
agtcaaacaaattgtttactagcctaagtgtaagagcagcacgatggtgcatcaggctcagggacagatggtgcaggaggtggccgccgccggcctccccgcgctgccgagccggtacgtgctgagggaggaggaccgcccaactggtgacgtcgcggcacccgagttggccttccccaccgtggacgtcaatgtcttgccgaccccggtgacgtggaggaggccagcaagctccggtcggcgctcgaatcctggggcctcttcaaggtgaccggccacggcatgccggtatccctgctggacggcatccgggacgccgggctggagttcttccacctgccagcggcggagaagctgaagcacgccaaccgggacgacgccggcgagttccagcccgagggttacggcatcgaccgcgtggacaccgacggtcaggtgctggactggtgcgaccggctgtacctgacggtgcagccggaggaggagcggcggatgcagttctggcccgcgcggccggcgtcgctcgtggggctcctgcacgagtacgccctgggcagcgagcaggtggccaggcgcgtgctccgggccatggcgcgggtgctggggttcggcgaggggttcttcctcgggcacgtgggcgagaagggcggcacgtacgcgcggttcacctactaccctccctgcccgcgcccggacctcgtgtacgggctgaagccccacacggacaactccgtcgtcaccgtgctcctcctcgaccgcgacgtcggcggcctccaggtgctgctcagggggcctggccccggcccggtgggtggacgtgcccgtgctcgcccgcgacgagctgctcgtcgtcgtcggcgaggagatggagatcatgagcaacgcggtgttcagggcgcccacgcaccgcgtggtcaccagcggcagggagaggatgtcgctcgtgctcttctaccagccggagccgcacaaggacctgcagcccgcggaggagctggtgagcgaggaccggcccgcgatttacaggaggctcaaggccaagaccttcggcgacgggttctgggatgcgttcgcgctcggcgagcgcaccatcgacttcctcaacatcaaggtcgacgacaaggagcatggaggcggattagtaacctcagcgccagcttgacgccatgcatgtgaacgaactactgtacacgatgtatcactggtagtgtaatgtaataagagacatggagcggttttccatgcaatataatctagttt

SEQ ID NO: 18598 - protein, 297 aa, Zea mays subsp. mays
  peptide (1)..(297): Ceres Seq. ID no. 12368127
  misc_feature (1)..(165): Homolog of NCBI NO: 21593366 NR Description: ethylene-forming-enzyme-like dioxygenase-like
  misc_feature (1)..(165): Homolog of NCBI NO: 15241348 NR Description: ethylene-forming-enzyme-like dioxygenase-like
  misc_feature (1)..(167): Homolog of NCBI NO: 2688828 NR Description: ethylene-forming-enzyme-like dioxygenase [Prunus
  misc_feature (1)..(170): Homolog of NCBI NO: 15241383 NR Description: ethylene-forming-enzyme-like dioxygenase - like
  misc_feature (1)..(170): Homolog of NCBI NO: 24413984 NR Description: ethylene-forming-enzyme-like dioxygenase-like
  misc_feature (1)..(170): Homolog of NCBI NO: 34898468 NR Description: Similar to Prunus armeniaca
  misc_feature (1)..(166): Homolog of NCBI NO: 33115140 NR Description: iron/ascorbate-dependent oxidoreductase [Hordeum
  misc_feature (1)..(166): Homolog of NCBI NO: 34898470 NR Description: ESTs D47168(S12332),D46350(S10967) correspond to region of the predicted gene.~Similar to Prunus armeniaca
  misc_feature (1)..(166): Homolog of NCBI NO: 24413982 NR Description: ethylene-forming-enzyme-like dioxygenase-like
  misc_feature (1)..(170): Homolog of NCBI NO: 34898464 NR Description: Similar to Prunus armeniaca
MPVSLLDGIRDAGLEFFHLPAAEKLKHANRDDAGEFQPEGYGIDRVDTDGQVLDWCDRLYLTVQPEEERRMQFWPARPASLVGLLHEYALGSEQVARRVLRAMARVLGFGEGFFLGHVGEKGGTYARFTYYPPCPRPDLVYGLKPHTDNSVVTVLLLDRDVGGLQVLLRGPGPGPVGGRARARPRRAARRRRRGDGDHEQRGVQGAHAPRGHQRQGEDVARALLPAGAAQGPAARGGAGERGPARDLQEAQGQDLRRRVLGCVRARRAHHRLPQHQGRRQGAWRRISNLSASLTPCM

SEQ ID NO: 18599 - protein, 227 aa, Zea mays subsp. mays
  peptide (1)..(227): Ceres Seq. ID no. 12368128
  misc_feature (1)..(100): Homolog of NCBI NO: 15241383 NR Description: ethylene-forming-enzyme-like dioxygenase - like
  misc_feature (1)..(100): Homolog of NCBI NO: 24413984 NR Description: ethylene-forming-enzyme-like dioxygenase-like
  misc_feature (1)..(100): Homolog of NCBI NO: 34898468 NR Description: Similar to Prunus armeniaca
  misc_feature (1)..(96): Homolog of NCBI NO: 33115140 NR Description: iron/ascorbate-dependent oxidoreductase [Hordeum
  misc_feature (1)..(96): Homolog of NCBI NO: 34898470 NR Description: ESTs D47168(S12332),D46350(S10967) correspond to region of the predicted gene.~Similar to Prunus armeniaca
  misc_feature (1)..(96): Homolog of NCBI NO: 24413982 NR Description: ethylene-forming-enzyme-like dioxygenase-like
  misc_feature (1)..(100): Homolog of NCBI NO: 34898464 NR Description: Similar to Prunus armeniaca
  misc_feature (1)..(95): Homolog of NCBI NO: 15241348 NR Description: ethylene-forming-enzyme-like dioxygenase-like
  misc_feature (1)..(97): Homolog of NCBI NO: 2688828 NR Description: ethylene-forming-enzyme-like dioxygenase [Prunus
  misc_feature (1)..(95): Homolog of NCBI NO: 21593366 NR Description: ethylene-forming-enzyme-like dioxygenase-like
MQFWPARPASLVGLLHEYALGSEQVARRVLRAMARVLGFGEGFFLGHVGEKGGTYARFTYYPPCPRPDLVYGLKPHTDNSVVTVLLLDRDVGGLQVLLRGPGPGPVGGRARARPRRAARRRRRGDGDHEQRGVQGAHAPRGHQRQGEDVARALLPAGAAQGPAARGGAGERGPARDLQEAQGQDLRRRVLGCVRARRAHHRLPQHQGRRQGAWRRISNLSASLTPCM

SEQ ID NO: 18600 - protein, 195 aa, Zea mays subsp. mays
  peptide (1)..(195): Ceres Seq. ID no. 12368129
  misc_feature (1)..(63): Homolog of NCBI NO: 21593366 NR Description: ethylene-forming-enzyme-like dioxygenase-like
  misc_feature (1)..(63): Homolog of NCBI NO: 15241348 NR Description: ethylene-forming-enzyme-like dioxygenase-like
  misc_feature (1)..(65): Homolog of NCBI NO: 2688828 NR Description: ethylene-forming-enzyme-like dioxygenase [Prunus
  misc_feature (1)..(68): Homolog of NCBI NO: 15241383 NR Description: ethylene-forming-enzyme-like dioxygenase - like
  misc_feature (1)..(68): Homolog of NCBI NO: 24413984 NR Description: ethylene-forming-enzyme-like dioxygenase-like
  misc_feature (1)..(68): Homolog of NCBI NO: 34898468 NR Description: Similar to Prunus armeniaca
  misc_feature (1)..(64): Homolog of NCBI NO: 33115140 NR Description: iron/ascorbate-dependent oxidoreductase [Hordeum
  misc_feature (1)..(64): Homolog of NCBI NO: 34898470 NR Description: ESTs D47168(S12332),D46350(S10967) correspond to region of the predicted gene.~Similar to Prunus armeniaca
  misc_feature (1)..(64): Homolog of NCBI NO: 24413982 NR Description: ethylene-forming-enzyme-like dioxygenase-like
  misc_feature (1)..(68): Homolog of NCBI NO: 34898464 NR Description: Similar to Prunus armeniaca
MARVLGFGEGFFLGHVGEKGGTYARFTYYPPCPRPDLVYGLKPHTDNSVVTVLLLDRDVGGLQVLLRGPGPGPVGGRARARPRRAARRRRRGDGDHEQRGVQGAHAPRGHQRQGEDVARALLPAGAAQGPAARGGAGERGPARDLQEAQGQDLRRRVLGCVRARRAHHRLPQHQGRRQGAWRRISNLSASLTPCM

SEQ ID NO: 18601 - DNA, 1487 bp, Zea mays subsp. mays
  misc_feature (1)..(1487): Ceres Seq. ID no. 12363475
  misc_feature: MA Experiment ID: 108528 Result: Up-regulated in Transcription
  misc_feature: MA Experiment 108528 PARAMETER Experiment Name: Zm_Imbibed_Seeds_P Parameter: Age (day) Value: 5 vs. 2
  misc_feature: MA Experiment 108528 PARAMETER Experiment Name: Zm_Imbibed_Seeds_P Parameter: Organism Value: Zea mays
  misc_feature: MA Experiment 108528 PARAMETER Experiment Name: Zm_Imbibed_Seeds_P Parameter: Plant Line Value: 35A19
  misc_feature: MA Experiment 108528 PARAMETER Experiment Name: Zm_Imbibed_Seeds_P Parameter: Tissue Value: Aerial vs. Embryo
  misc_feature: MA Experiment ID: 108530 Result: Up-regulated in Transcription
  misc_feature: MA Experiment 108530 PARAMETER Experiment Name: Zm_Imbibed_Seeds_P Parameter: Age (day) Value: 6 vs. 2
  misc_feature: MA Experiment 108530 PARAMETER Experiment Name: Zm_Imbibed_Seeds_P Parameter: Organism Value: Zea mays
  misc_feature: MA Experiment 108530 PARAMETER Experiment Name: Zm_Imbibed_Seeds_P Parameter: Plant Line Value: 35A19
  misc_feature: MA Experiment 108530 PARAMETER Experiment Name: Zm_Imbibed_Seeds_P Parameter: Tissue Value: Aerial vs. Embryo
  misc_feature: MA Experiment ID: 108536 Result: Up-regulated in Transcription
  misc_feature: MA Experiment 108536 PARAMETER Experiment Name: Zm_Meristem_P Parameter: Age (day) Value: 8
  misc_feature: MA Experiment 108536 PARAMETER Experiment Name: Zm_Meristem_P Parameter: Organism Value: Zea mays
  misc_feature: MA Experiment 108536 PARAMETER Experiment Name: Zm_Meristem_P Parameter: Plant Line Value: 35A19
  misc_feature: MA Experiment 108536 PARAMETER Experiment Name: Zm_Meristem_P Parameter: Tissue Value: Shoot Meristem vs. Above Shoot Meristem
  misc_feature: MA Experiment ID: 108556 Result: Down-regulated in Transcription
  misc_feature: MA Experiment 108556 PARAMETER Experiment Name: Zm_Drought_P Parameter: Age (day) Value: 9
  misc_feature: MA Experiment 108556 PARAMETER Experiment Name: Zm_Drought_P Parameter: Organism Value: Zea mays
  misc_feature: MA Experiment 108556 PARAMETER Experiment Name: Zm_Drought_P Parameter: Plant Line Value: 35A19
  misc_feature: MA Experiment 108556 PARAMETER Experiment Name: Zm_Drought_P Parameter: Timepoint (hr) Value: 24
  misc_feature: MA Experiment 108556 PARAMETER Experiment Name: Zm_Drought_P Parameter: Tissue Value: Aerial
  misc_feature: MA Experiment 108556 PARAMETER Experiment Name: Zm_Drought_P Parameter: Treatment Value: Drought vs. No Drought
  misc_feature: MA Experiment ID: 20000480 Result: Down-regulated in Transcription
  misc_feature: MA Experiment 20000480 PARAMETER Experiment Name: Zm_Drought_P Parameter: Age (day) Value: 11
  misc_feature: MA Experiment 20000480 PARAMETER Experiment Name: Zm_Drought_P Parameter: Organism Value: Zea mays
  misc_feature: MA Experiment 20000480 PARAMETER Experiment Name: Zm_Drought_P Parameter: Plant Line Value: 35A19
  misc_feature: MA Experiment 20000480 PARAMETER Experiment Name: Zm_Drought_P Parameter: Timepoint (hr) Value: 72
  misc_feature: MA Experiment 20000480 PARAMETER Experiment Name: Zm_Drought_P Parameter: Tissue Value: Aerial
  misc_feature: MA Experiment 20000480 PARAMETER Experiment Name: Zm_Drought_P Parameter: Treatment Value: Drought vs. No Drought
gcacgagaccattacctagaacatcctaatcgaaaaatgtgtgtgtatatatatgcacaaataaataaataaataaataatataaagaacaatcgtctacgcgcaggaccgcgccggctggggcgccgccaccgtcgcgctcgccgccgtcatggccgcctcgctcgccgtcttcctcgccggccgccggtactaccgctacagggtgcccgagggcagcccgctcacgccgctgctccaggtcctcgtcgccgccttccggaataggcggctcccgttgccggacgacgacgccgagctgtacgaggtcaggcggccgcagagtagcaagaggaggctgctttgccacacctaccagctgaggttcctcgacaaggcagccatagtggagcccggcgccggcgaggacgcctgcgggccgtggcggctggcgacggtgacgcaggtggaggagacgaagctggtgctggcgatggtgcccatctgggtgtgcacgctgcccttcgggcatggcggtggcgcaggtgtccaccttcttcatcaagcagggcagcgtgatggaccgtcgcctgggcccgcacttggaggccccggcggcgtcggtgttcgcgctgtcggcggtggccatgatcgccacggtggcggcctacgacaaggcgctggtgccgtacctgcggcgcgccacgggaggggagcgcgggatcagcatccttgggcgcgtgggcatcggcatggcgttcgccatcgcggggctgggcgtggcggcggcggtggagcggcggcgcctgctgtcggcgggcgccgcgcggccgtcgacgtcggtgctgtggctggtgccgcagttcgcgctgatgggcgtggccgacgggttcgcgctggtgggcctgcaggagtacttctacgagcaggtccccgacggcatgcgcagcctgggcatcggcctctacctcagcgtcattggcgccgggagcttcctgancagcctggtgatcaacggcggcggaccgcgccagctcccgcggagggcgcnccggctggttcgccaaggacctcaaccgcagcaggctggacctcttctactggctgctggcgtgcatcagcgccgtcaacctggcattctacgcgctggtcgccaccaagtgctcgtacaagcagaccgtcagggccggcagggtcggcgacgaggtcgagtgcgccgccgcgtagctgctgctgtacgtggtggtcatgaaaccaaccatgcatcagccgcacgaccatgtgtattattattattattataggggctaatagtaactagctactcgttgatcgtgttgttgttctagctagcttgggtacaagtagtacattcatgccacgtcgtgttgtatatgctgctcgtagacgttggtgtatatatgtgtactggcgcgtcgtcgaaacaatacgtgtacaagtactgtttggttcgttgtagcagcgatttatcagctaaattaattact

SEQ ID NO: 18602 - protein, 359 aa, Zea mays subsp. mays
  peptide (1)..(359): Ceres Seq. ID no. 12363476
  misc_feature (1)..(119): Pfam Name: POT family Pfam Description: POT family
  misc_feature (1)..(116): Homolog of NCBI NO: 17380882 NR Description: putative PTR2 family peptide transporter protein
  misc_feature (1)..(115): Homolog of NCBI NO: 37535270 NR Description: putative peptide transport protein
  misc_feature (1)..(116): Homolog of NCBI NO: 15226687 NR Description: putative PTR2 family peptide transporter
  misc_feature (1)..(118): Homolog of NCBI NO: 37530498 NR Description: putative LeOPT1 - oligopeptide transporter
  misc_feature (1)..(118): Homolog of NCBI NO: 37533590 NR Description: putative proton-dependent oligopeptide transport
  misc_feature (1)..(112): Homolog of NCBI NO: 37530472 NR Description: putative peptide transporter
  misc_feature (71)..(119): Homolog of NCBI NO: 13605523 NR Description: AT3g53960/F5K20_260 [Arabidopsis thaliana]
  misc_feature (1)..(119): Homolog of NCBI NO: 15232380 NR Description: transporter-like protein; protein id: At3g53960.1
  misc_feature (1)..(119): Homolog of NCBI NO: 15224397 NR Description: putative peptide/amino acid transporter; protein
  misc_feature (1)..(119): Homolog of NCBI NO: 34897398 NR Description: putative peptide transport protein
  misc_feature (276)..(276): Xaa is any aa, unknown or other
  misc_feature (293)..(293): Xaa is any aa, unknown or other
MAASLAVFLAGRRYYRYRVPEGSPLTPLLQVLVAAFRNRRLPLPDDDAELYEVRRPQSSKRRLLCHTYQLRFLDKAAIVEPGAGEDACGPWRLATVTQVEETKLVLAMVPIWVCTLPFGHGGGAGVHLLHQAGQRDGPSPGPALGGPGGVGVRAVGGGHDRHGGGLRQGAGAVPAARHGRGARDQHPWARGHRHGVRHRGAGRGGGGGAAAPAVGGRRAAVDVGAVAGAAVRADGRGRRVRAGGPAGVLLRAGPRRHAQPGHRPLPQRHWRRELPXQPGDQRRRTAPAPAEGXPAGSPRTSTAAGWTSSTGCWRASAPSTWHSTRWSPPSARTSRPSGPAGSATRSSAPPRSCCCTWWS

SEQ ID NO: 18603 - protein, 257 aa, Zea mays subsp. mays
  peptide (1)..(257): Ceres Seq. ID no. 12363477
  misc_feature (1)..(150): Pfam Name: POT family Pfam Description: POT family
  misc_feature (4)..(161): Homolog of NCBI NO: 17380882 NR Description: putative PTR2 family peptide transporter protein
  misc_feature (1)..(162): Homolog of NCBI NO: 37535270 NR Description: putative peptide transport protein
  misc_feature (4)..(161): Homolog of NCBI NO: 15226687 NR Description: putative PTR2 family peptide transporter
  misc_feature (1)..(170): Homolog of NCBI NO: 37530498 NR Description: putative LeOPT1 - oligopeptide transporter
  misc_feature (1)..(158): Homolog of NCBI NO: 37533590 NR Description: putative proton-dependent oligopeptide transport
  misc_feature (1)..(161): Homolog of NCBI NO: 37530472 NR Description: putative peptide transporter
  misc_feature (1)..(161): Homolog of NCBI NO: 13605523 NR Description: AT3g53960/F5K20_260 [Arabidopsis thaliana]
  misc_feature (1)..(161): Homolog of NCBI NO: 15232380 NR Description: transporter-like protein; protein id: At3g53960.1
  misc_feature (1)..(161): Homolog of NCBI NO: 15224397 NR Description: putative peptide/amino acid transporter; protein
  misc_feature (1)..(161): Homolog of NCBI NO: 34897398 NR Description: putative peptide transport protein
  misc_feature (157)..(157): Xaa is any aa, unknown or other
  misc_feature (174)..(174): Xaa is any aa, unknown or other
MAVAQVSTFFIKQGSVMDRRLGPHLEAPAASVFALSAVAMIATVAAYDKALVPYLRRATGGERGISILGRVGIGMAFAIAGLGVAAAVERRRLLSAGAARPSTSVLWLVPQFALMGVADGFALVGLQEYFYEQVPDGMRSLGIGLYLSVIGAGSFLXSLVINGGGPRQLPRRAXRLVRQGPQPQQAGPLLLAAGVHQRRQPGILRAGRHQVLVQADRQGRQGRRRGRVRRRVAAAVRGGHETNHASAARPCVLLLLL

SEQ ID NO: 18604 - protein, 252 aa, Zea mays subsp. mays
  peptide (1)..(252): Ceres Seq. ID no. 12363478
  misc_feature (1)..(11): Homolog of NCBI NO: 28273096 NR Description: nitrate transporter [Nicotiana tabacum]
  misc_feature (1)..(11): Homolog of NCBI NO: 4102839 NR Description: LeOPT1 [Lycopersicon esculentum]
  misc_feature (1)..(11): Homolog of NCBI NO: 21741984 NR Description: OSJNBa0060P14.5 [Oryza sativa (japonica
  misc_feature (1)..(11): Homolog of NCBI NO: 11358594 NR Description: oligopeptide transporter-like protein -
  misc_feature (1)..(11): Homolog of NCBI NO: 37530498 NR Description: putative LeOPT1 - oligopeptide transporter
  misc_feature (1)..(11): Homolog of NCBI NO: 37533590 NR Description: putative proton-dependent oligopeptide transport
  misc_feature (1)..(12): Homolog of NCBI NO: 13605523 NR Description: AT3g53960/F5K20_260 [Arabidopsis thaliana]
  misc_feature (1)..(12): Homolog of NCBI NO: 15232380 NR Description: transporter-like protein; protein id: At3g53960.1
  misc_feature (1)..(12): Homolog of NCBI NO: 15224397 NR Description: putative peptide/amino acid transporter; protein
  misc_feature (1)..(12): Homolog of NCBI NO: 34897398 NR Description: putative peptide transport protein
  misc_feature (169)..(169): Xaa is any aa, unknown or other
  misc_feature (186)..(186): Xaa is any aa, unknown or other
MVPIWVCTLPFGHGGGAGVHLLHQAGQRDGPSPGPALGGPGGVGVRAVGGGHDRHGGGLRQGAGAVPAARHGRGARDQHPWARGHRHGVRHRGAGRGGGGGAAAPAVGGRRAAVDVGAVAGAAVRADGRGRRVRAGGPAGVLLRAGPRRHAQPGHRPLPQRHWRRELPXQPGDQRRRTAPAPAEGXPAGSPRTSTAAGWTSSTGCWRASAPSTWHSTRWSPPSARTSRPSGPAGSATRSSAPPRSCCCTWWS

SEQ ID NO: 18605 - DNA, 1573 bp, Zea mays subsp. mays
  misc_feature (1)..(1573): Ceres Seq. ID no. 12391535
  misc_feature: MA Experiment ID: 108527 Result: Down-regulated in Transcription
  misc_feature: MA Experiment 108527 PARAMETER Experiment Name: Zm_5mM_NO_P Parameter: Age (day) Value: 8
  misc_feature: MA Experiment 108527 PARAMETER Experiment Name: Zm_5mM_NO_P Parameter: Organism Value: Zea mays
  misc_feature: MA Experiment 108527 PARAMETER Experiment Name: Zm_5mM_NO_P Parameter: Plant Line Value: 35A19
  misc_feature: MA Experiment 108527 PARAMETER Experiment Name: Zm_5mM_NO_P Parameter: Timepoint (hr) Value: 6
  misc_feature: MA Experiment 108527 PARAMETER Experiment Name: Zm_5mM_NO_P Parameter: Tissue Value: Aerial
  misc_feature: MA Experiment 108527 PARAMETER Experiment Name: Zm_5mM_NO_P Parameter: Treatment Value: 5mM NO vs. No Treatment
  misc_feature: MA Experiment ID: 108543 Result: Down-regulated in Transcription
atccatcactcacgagcaggatcgagtcgaggcctcagctccctcctcggcgtcctcgcaacgaaggaaaggaacaatgtcagcggctcgtcgtcggtccccaatccccgttctcctcttcttcctcctcctccactccgcgtcgccgagccccatcaagacggtggtggtgctggtgatggagaaccgctccttcgaccacattctggggtggatgaagcggctgaacccggagatcgacggcgtgacggggcgggagtggaacccggccaacgcgtcggacccggcggcggggcgcgtctacttccgcgacggcgccgcgtacgtggacccggacccgggccactcgttccaggagatccggcagcaggtcttcggctccgacgacgacgccgcggacaacccgccccgcatggacggcttcgcgcagcaggcgcgctccatcggcggcggcgccatgtccgacgccgtcatgcgcggcttcaaccccgccgacgtcgccgtctaccgcgagctcgtctcgcagttcgccgtctgcgaccgatggttcgcgtccgtgccgtcgtccacgcagcccaaccgcctgttcgtgcactccggaacgtccggcggcgccaccagcaacaacccgacgctgctggcggagggctacccgcagcggaccatcttcgacaacctccacgacgccggcctctccttcggcgtctacttccaggacgtgccggcggtgctcttctaccggaacctccgcaagctcaagtacctgctggacttccacccgctgcgcccctccttcgccgaccacgcccgccgcgggacgctccccaactacgccgtcatcacctacgacgagcacggcggcttcttcgaccacgtgcccacgcccgtcgccggcgtgcccagccccgacggcatcgtcggcccgccgccctacaacttcaccttcgaccgcctcggcgtccgcgtcccggccatcctcgtgtccccctggatcgacaggggcaccgtcgtccacgggccccacggccccacgcccacgtcgcagtacgagcactcgtccatcccggccactgtcaagaagatcttcggcctgccgcaggacttcctcacgaggcgggacgcgtgggcggggaccttcgagggcgtggtgcaggggaggaccgagccacgcaccgactgccccgagcagctgcccacgccgacgaggatcaggcagacggaggcggacgaggaggccaagcttagcgagttccagcaggagatcatccagctcgcctccgtgctcaacggcgaccaccacctcgccaccctgcaggaccggatcaagaacgacatgaacgtcagggaaggcatcgactacatgaaggccgccgtcaaacgctacttccaggccggcgcgtccgccagaaggatgggcgtcgacggcgaccagatcgtcaagatgagaccctccctcaccaccaggatccaacgcccatagacagactgtctaatcaaagcgggatcggttatgttcacaaacaggattggactacatatatatattctaaaaatacagatcacattcagtgct

SEQ ID NO: 18606 - protein, 492 aa, Zea mays subsp. mays
  peptide (1)..(492): Ceres Seq. ID no. 12391536
  misc_feature (52)..(285): Pfam Name: Phosphoesterase family Pfam Description: Phosphoesterase family
  misc_feature (279)..(488): Homolog of NCBI NO: 34897344 NR Description: putative phospholipase [Oryza sativa]
  misc_feature (50)..(280): Homolog of NCBI NO: 34897344 NR Description: putative phospholipase [Oryza sativa]
  misc_feature (279)..(488): Homolog of NCBI NO: 15222342 NR Description: unknown protein; protein id: At1g07230.1
  misc_feature (51)..(280): Homolog of NCBI NO: 15222342 NR Description: unknown protein; protein id: At1g07230.1
  misc_feature (279)..(488): Homolog of NCBI NO: 21703147 NR Description: At1g07230/F10K1_4 [Arabidopsis thaliana]
  misc_feature (51)..(280): Homolog of NCBI NO: 21703147 NR Description: At1g07230/F10K1_4 [Arabidopsis thaliana]
  misc_feature (279)..(492): Homolog of NCBI NO: 15225806 NR Description: putative phospholipase C; protein id: At2g26870.1
  misc_feature (45)..(280): Homolog of NCBI NO: 15225806 NR Description: putative phospholipase C; protein id: At2g26870.1
  misc_feature (279)..(488): Homolog of NCBI NO: 20161866 NR Description: B1139B11.7 [Oryza sativa (japonica
  misc_feature (28)..(285): Homolog of NCBI NO: 20161866 NR Description: B1139B11.7 [Oryza sativa (japonica
SITHEQDRVEASAPSSASSQRRKGTMSAARRRSPIPVLLFFLLLHSASPSPIKTVVVLVMENRSFDHILGWMKRLNPEIDGVTGREWNPANASDPAAGRVYFRDGAAYVDPDPGHSFQEIRQQVFGSDDDAADNPPRMDGFAQQARSIGGGAMSDAVMRGFNPADVAVYRELVSQFAVCDRWFASVPSSTQPNRLFVHSGTSGGATSNNPTLLAEGYPQRTIFDNLHDAGLSFGVYFQDVPAVLFYRNLRKLKYLLDFHPLRPSFADHARRGTLPNYAVITYDEHGGFFDHVPTPVAGVPSPDGIVGPPPYNFTFDRLGVRVPAILVSPWIDRGTVVHGPHGPTPTSQYEHSSIPATVKKIFGLPQDFLTRRDAWAGTFEGVVQGRTEPRTDCPEQLPTPTRIRQTEADEEAKLSEFQQEIIQLASVLNGDHHLATLQDRIKNDMNVREGIDYMKAAVKRYFQAGASARRMGVDGDQIVKMRPSLTTRIQRP

SEQ ID NO: 18607 - protein, 467 aa, Zea mays subsp. mays
  peptide (1)..(467): Ceres Seq. ID no. 12391537
  misc_feature (27)..(260): Pfam Name: Phosphoesterase family Pfam Description: Phosphoesterase family
  misc_feature (254)..(463): Homolog of NCBI NO: 34897344 NR Description: putative phospholipase [Oryza sativa]
  misc_feature (25)..(255): Homolog of NCBI NO: 34897344 NR Description: putative phospholipase [Oryza sativa]
  misc_feature (254)..(463): Homolog of NCBI NO: 15222342 NR Description: unknown protein; protein id: At1g07230.1
  misc_feature (26)..(255): Homolog of NCBI NO: 15222342 NR Description: unknown protein; protein id: At1g07230.1
  misc_feature (254)..(463): Homolog of NCBI NO: 21703147 NR Description: At1g07230/F10K1_4 [Arabidopsis thaliana]
  misc_feature (26)..(255): Homolog of NCBI NO: 21703147 NR Description: At1g07230/F10K1_4 [Arabidopsis thaliana]
  misc_feature (254)..(467): Homolog of NCBI NO: 15225806 NR Description: putative phospholipase C; protein id: At2g26870.1
  misc_feature (20)..(255): Homolog of NCBI NO: 15225806 NR Description: putative phospholipase C; protein id: At2g26870.1
  misc_feature (254)..(463): Homolog of NCBI NO: 20161866 NR Description: B1139B11.7 [Oryza sativa (japonica
  misc_feature (3)..(260): Homolog of NCBI NO: 20161866 NR Description: B1139B11.7 [Oryza sativa (japonica
MSAARRRSPIPVLLFFLLLHSASPSPIKTVVVLVMENRSFDHILGWMKRLNPEIDGVTGREWNPANASDPAAGRVYFRDGAAYVDPDPGHSFQEIRQQVFGSDDDAADNPPRMDGFAQQARSIGGGAMSDAVMRGFNPADVAVYRELVSQFAVCDRWFASVPSSTQPNRLFVHSGTSGGATSNNPTLLAEGYPQRTIFDNLHDAGLSFGVYFQDVPAVLFYRNLRKLKYLLDFHPLRPSFADHARRGTLPNYAVITYDEHGGFFDHVPTPVAGVPSPDGIVGPPPYNFTFDRLGVRVPAILVSPWIDRGTVVHGPHGPTPTSQYEHSSIPATVKKIFGLPQDFLTRRDAWAGTFEGVVQGRTEPRTDCPEQLPTPTRIRQTEADEEAKLSEFQQEIIQLASVLNGDHHLATLQDRIKNDMNVREGIDYMKAAVKRYFQAGASARRMGVDGDQIVKMRPSLTTRIQRP

SEQ ID NO: 18608 - protein, 433 aa, Zea mays subsp. mays
  peptide (1)..(433): Ceres Seq. ID no. 12391538
  misc_feature (1)..(226): Pfam Name: Phosphoesterase family Pfam Description: Phosphoesterase family
  misc_feature (220)..(429): Homolog of NCBI NO: 15222342 NR Description: unknown protein; protein id: At1g07230.1
  misc_feature (1)..(221): Homolog of NCBI NO: 15222342 NR Description: unknown protein; protein id: At1g07230.1
  misc_feature (220)..(429): Homolog of NCBI NO: 21703147 NR Description: At1g07230/F10K1_4 [Arabidopsis thaliana]
  misc_feature (1)..(221): Homolog of NCBI NO: 21703147 NR Description: At1g07230/F10K1_4 [Arabidopsis thaliana]
  misc_feature (220)..(429): Homolog of NCBI NO: 34897344 NR Description: putative phospholipase [Oryza sativa]
  misc_feature (1)..(221): Homolog of NCBI NO: 34897344 NR Description: putative phospholipase [Oryza sativa]
  misc_feature (220)..(433): Homolog of NCBI NO: 15225806 NR Description: putative phospholipase C; protein id: At2g26870.1
  misc_feature (1)..(221): Homolog of NCBI NO: 15225806 NR Description: putative phospholipase C; protein id: At2g26870.1
  misc_feature (220)..(429): Homolog of NCBI NO: 20161866 NR Description: B1139B11.7 [Oryza sativa (japonica
  misc_feature (1)..(226): Homolog of NCBI NO: 20161866 NR Description: B1139B11.7 [Oryza sativa (japonica
MENRSFDHILGWMKRLNPEIDGVTGREWNPANASDPAAGRVYFRDGAAYVDPDPGHSFQEIRQQVFGSDDDAADNPPRMDGFAQQARSIGGGAMSDAVMRGFNPADVAVYRELVSQFAVCDRWFASVPSSTQPNRLFVHSGTSGGATSNNPTLLAEGYPQRTIFDNLHDAGLSFGVYFQDVPAVLFYRNLRKLKYLLDFHPLRPSFADHARRGTLPNYAVITYDEHGGFFDHVPTPVAGVPSPDGIVGPPPYNFTFDRLGVRVPAILVSPWIDRGTVVHGPHGPTPTSQYEHSSIPATVKKIFGLPQDFLTRRDAWAGTFEGVVQGRTEPRTDCPEQLPTPTRIRQTEADEEAKLSEFQQEIIQLASVLNGDHHLATLQDRIKNDMNVREGIDYMKAAVKRYFQAGASARRMGVDGDQIVKMRPSLTTRIQRP

SEQ ID NO: 18609 - DNA, 1673 bp, Zea mays subsp. mays
  misc_feature (1)..(1673): Ceres Seq. ID no. 12418201
  misc_feature: MA Experiment ID: 108523 Result: Up-regulated in Transcription
  misc_feature: MA Experiment 108523 PARAMETER Experiment Name: Zm_42deg_Heat_P Parameter: Age (day) Value: 8
  misc_feature: MA Experiment 108523 PARAMETER Experiment Name: Zm_42deg_Heat_P Parameter: Organism Value: Zea mays
  misc_feature: MA Experiment 108523 PARAMETER Experiment Name: Zm_42deg_Heat_P Parameter: Plant Line Value: 35A19
  misc_feature: MA Experiment 108523 PARAMETER Experiment Name: Zm_42deg_Heat_P Parameter: Temperature (deg C) Value: 42 vs. 22
  misc_feature: MA Experiment 108523 PARAMETER Experiment Name: Zm_42deg_Heat_P Parameter: Timepoint (hr) Value: 6
  misc_feature: MA Experiment 108523 PARAMETER Experiment Name: Zm_42deg_Heat_P Parameter: Tissue Value: Aerial
  misc_feature: MA Experiment ID: 108543 Result: Down-regulated in Transcription
  misc_feature: MA Experiment ID: 108544 Result: Down-regulated in Transcription
gcacgagaccattacctagaacatcctaatcgaaaacgcctccccgagagcccccgttttctgtcacaaatcgccactaaaaccctagccttccgccatggccacctcccctgccgcctcgtcctcctccgctccgaccgcctccgcggtggctgcggctacgatggctgttgaggccaccgacgggccggtgctcagcgtagtatcgaagcgtctccgcgcactgcggaagaagtacaaccgaatcacgcagattgaggagtcgctcgccgccggcaagacgctcaaccgagagcaggaggaggttctccgctccaagcccgtcgtcgccgctctgatcgacgagctcgagcgcctccgccctccgctcgcctccgccctcgcggaggagctcttctnccgncccgcccccgccccctccgccgcttcctcctccgactcagattcgtcagtccaggacttgcttgcgctcgtctacttcggctccctctttgacgtcaagcagcaaagcgacttcgtctctttggtttacacgcgcgaactcgagcggagcagctgcctcacttatgactacgtcggggatgatccggaggacagtctcgcggagaccgatctgaacgcggtttctgcccttgcctccctcgccgcgttgcgccctcctgctgcagccggagtctcgcaccgtgacgcccttcaggcttgtgctcatcacgcccgcctctggctctgccgtgcggatgaacccatccatcctgactccaccatcacatatgctggggtgagggcaaagctggataggatcatggcatcgggctacttcacagcgcagctagaaatgaggacaccattggatctggctgctgcagtggcaagttttggagctggaggtgtgcaggtgcaagagagcatggttgtgtcacctcaggcaccggaagcagtggaggagagccaggctgttgaaggacacaagaatgagaaggaagattctcaggctacagaaatctacaatgatcatcctgttgttgactctgaacatgtggaggatgaagtcctggtgcatccaactgatgaagttcctccagctgagacagagcaggagcaggagacatttgatgctgatgtgaaggatcaggagcaaaaggaccaacaattcatccagcggcggtcttaccagaaccagcgtggtggtggtcgtggtggcagcaggagaggctatcctaatggtcgtggaggacgtggtggccgaggtggcgggtaccagaatggccgtggtggataccagaatggtcgtggcggtgctggcgggtactactacgaatctggatactaccagccgaggaactacaacagaggccggggtggtcgctccggcggtggcaactcttactacaacagccatggtggaggtgcacaggggcatcatcctgggagtgttgagctgggcgcaaacgcctagcttcgctgactgttctgtttgataatgaggagcgagtgagtcgtgccattttgttattatagaactaacttagcctgttattacgtcaccgttggtcccatccgtgagtctttttgctgctcgagtgactgcatatggtcggtcggtattgaggaaatactctgggaaagtagtttcaggtcatattcgttttctaagttacgtttttttttgtgtt

SEQ ID NO: 18610 - protein, 452 aa, Zea mays subsp. mays
  peptide (1)..(452): Ceres Seq. ID no. 12418202
  misc_feature (354)..(445): Pfam Name: Dehydrin Pfam Description: Dehydrin
  misc_feature (281)..(451): Homolog of NCBI NO: 1710626 NR Description: Heterogeneous nuclear ribonucleoprotein A3
  misc_feature (359)..(444): Homolog of NCBI NO: 15234010 NR Description: glycine-rich protein 2 (GRP2)
  misc_feature (331)..(440): Homolog of NCBI NO: 21388660 NR Description: glycine-rich RNA-binding protein [Physcomitrella
  misc_feature (363)..(447): Homolog of NCBI NO: 1170023 NR Description: ABSCISIC ACID AND ENVIRONMENTAL STRESS INDUCIBLE
  misc_feature (363)..(449): Homolog of NCBI NO: 7488799 NR Description: dormancy-associated protein 2 - garden pea
  misc_feature (359)..(444): Homolog of NCBI NO: 25009944 NR Description: GH03391p [Drosophila melanogaster]
  misc_feature (358)..(435): Homolog of NCBI NO: 1170023 NR Description: ABSCISIC ACID AND ENVIRONMENTAL STRESS INDUCIBLE
  misc_feature (343)..(451): Homolog of NCBI NO: 3893085 NR Description: glycine-rich protein 2 [Cicer arietinum]
  misc_feature (27)..(98): Homolog of NCBI NO: 15230159 NR Description: unknown protein; protein id: At3g24690.1
  misc_feature (20)..(434): Homolog of NCBI NO: 15223426 NR Description: unknown protein
  misc_feature (101)..(101): Xaa is any aa, unknown or other
  misc_feature (102)..(102): Xaa is any aa, unknown or other
MATSPAASSSSAPTASAVAAATMAVEATDGPVLSVVSKRLRALRKKYNRITQIEESLAAGKTLNREQEEVLRSKPVVAALIDELERLRPPLASALAEELFXXPAPAPSAASSSDSDSSVQDLLALVYFGSLFDVKQQSDFVSLVYTRELERSSCLTYDYVGDDPEDSLAETDLNAVSALASLAALRPPAAAGVSHRDALQACAHHARLWLCRADEPIHPDSTITYAGVRAKLDRIMASGYFTAQLEMRTPLDLAAAVASFGAGGVQVQESMVVSPQAPEAVEESQAVEGHKNEKEDSQATEIYNDHPVVDSEHVEDEVLVHPTDEVPPAETEQEQETFDADVKDQEQKDQQFIQRRSYQNQRGGGRGGSRRGYPNGRGGRGGRGGGYQNGRGGYQNGRGGAGGYYYESGYYQPRNYNRGRGGRSGGGNSYYNSHGGGAQGHHPGSVELGANA

SEQ ID NO: 18611 - protein, 430 aa, Zea mays subsp. mays
  peptide (1)..(430): Ceres Seq. ID no. 12418203
  misc_feature (332)..(423): Pfam Name: Dehydrin Pfam Description: Dehydrin
  misc_feature (259)..(429): Homolog of NCBI NO: 1710626 NR Description: Heterogeneous nuclear ribonucleoprotein A3
  misc_feature (337)..(422): Homolog of NCBI NO: 15234010 NR Description: glycine-rich protein 2 (GRP2)
  misc_feature (309)..(418): Homolog of NCBI NO: 21388660 NR Description: glycine-rich RNA-binding protein [Physcomitrella
  misc_feature (341)..(425): Homolog of NCBI NO: 1170023 NR Description: ABSCISIC ACID AND ENVIRONMENTAL STRESS INDUCIBLE
  misc_feature (341)..(427): Homolog of NCBI NO: 7488799 NR Description: dormancy-associated protein 2 - garden pea
  misc_feature (337)..(422): Homolog of NCBI NO: 25009944 NR Description: GH03391p [Drosophila melanogaster]
  misc_feature (336)..(413): Homolog of NCBI NO: 1170023 NR Description: ABSCISIC ACID AND ENVIRONMENTAL STRESS INDUCIBLE
  misc_feature (321)..(429): Homolog of NCBI NO: 3893085 NR Description: glycine-rich protein 2 [Cicer arietinum]
  misc_feature (5)..(76): Homolog of NCBI NO: 15230159 NR Description: unknown protein; protein id: At3g24690.1
  misc_feature (1)..(412): Homolog of NCBI NO: 15223426 NR Description: unknown protein
  misc_feature (79)..(79): Xaa is any aa, unknown or other
  misc_feature (80)..(80): Xaa is any aa, unknown or other
MAVEATDGPVLSVVSKRLRALRKKYNRITQIEESLAAGKTLNREQEEVLRSKPVVAALIDELERLRPPLASALAEELFXXPAPAPSAASSSDSDSSVQDLLALVYFGSLFDVKQQSDFVSLVYTRELERSSCLTYDYVGDDPEDSLAETDLNAVSALASLAALRPPAAAGVSHRDALQACAHHARLWLCRADEPIHPDSTITYAGVRAKLDRIMASGYFTAQLEMRTPLDLAAAVASFGAGGVQVQESMVVSPQAPEAVEESQAVEGHKNEKEDSQATEIYNDHPVVDSEHVEDEVLVHPTDEVPPAETEQEQETFDADVKDQEQKDQQFIQRRSYQNQRGGGRGGSRRGYPNGRGGRGGRGGGYQNGRGGYQNGRGGAGGYYYESGYYQPRNYNRGRGGRSGGGNSYYNSHGGGAQGHHPGSVELGANA

SEQ ID NO: 18612 - DNA, 489 bp, Zea mays subsp. mays
  misc_feature (1)..(489): Ceres Seq. ID no. 1850217
  misc_feature: MA Experiment ID: 108689 Result: Up-regulated in Transcription
  misc_feature: MA Experiment 108689 PARAMETER Experiment Name: Zm_Drought_Roots_P Parameter: Age (day) Value: 9
  misc_feature: MA Experiment 108689 PARAMETER Experiment Name: Zm_Drought_Roots_P Parameter: Organism Value: Zea mays
  misc_feature: MA Experiment 108689 PARAMETER Experiment Name: Zm_Drought_Roots_P Parameter: Plant Line Value: 35A19
  misc_feature: MA Experiment 108689 PARAMETER Experiment Name: Zm_Drought_Roots_P Parameter: Timepoint (hr) Value: 24
  misc_feature: MA Experiment 108689 PARAMETER Experiment Name: Zm_Drought_Roots_P Parameter: Tissue Value: Roots
  misc_feature: MA Experiment 108689 PARAMETER Experiment Name: Zm_Drought_Roots_P Parameter: Treatment Value: Drought vs. No Drought
  misc_feature: MA Experiment ID: 20000478 Result: Up-regulated in Transcription
  misc_feature: MA Experiment 20000478 PARAMETER Experiment Name: Zm_5mM_SA_P Parameter: Age (day) Value: 11
  misc_feature: MA Experiment 20000478 PARAMETER Experiment Name: Zm_5mM_SA_P Parameter: Organism Value: Zea mays
  misc_feature: MA Experiment 20000478 PARAMETER Experiment Name: Zm_5mM_SA_P Parameter: Plant Line Value: 35A19
  misc_feature: MA Experiment 20000478 PARAMETER Experiment Name: Zm_5mM_SA_P Parameter: Timepoint (hr) Value: 72
  misc_feature: MA Experiment 20000478 PARAMETER Experiment Name: Zm_5mM_SA_P Parameter: Tissue Value: Aerial
  misc_feature: MA Experiment 20000478 PARAMETER Experiment Name: Zm_5mM_SA_P Parameter: Treatment Value: 5mM SA vs. No Treatment
  misc_feature: MA Experiment ID: 20000487 Result: Up-regulated in Transcription
  misc_feature: MA Experiment 20000487 PARAMETER Experiment Name: Zm_50mM_NH4NO3_L_to_H_P Parameter: Organism Value: Zea mays
  misc_feature: MA Experiment 20000487 PARAMETER Experiment Name: Zm_50mM_NH4NO3_L_to_H_P Parameter: Timepoint (hr) Value: 4
  misc_feature: MA Experiment 20000487 PARAMETER Experiment Name: Zm_50mM_NH4NO3_L_to_H_P Parameter: Tissue Value: Leaves
  misc_feature: MA Experiment 20000487 PARAMETER Experiment Name: Zm_50mM_NH4NO3_L_to_H_P Parameter: Treatment Value: 50mM NH4NO3 vs. 100mM Mannitol
  misc_feature: Pfam Name: Aa_trans Pfam Description: Transmembrane amino acid transporter protein
ctccctctgcaagtacaagttgtcctgtctttggtttagtttgcgcccctgtatttgttcagggttttggtcgcgtgttgaggaaagattcggggttcttaagtgaaacaaatggggtcatcaaggaatgtgccgcacaaagtgatgcaagatgagatcacacctcttctcccgatcaaagctgaggaggacgcagttcatgagttcgacggagcttctttctctggcgcggtcttcaatctgtcaacaaccattgtaggagctggaatcatggctctgcctgcgagtatcaagatgctaggccttatacctggtattctaatgatcatccttgtggcgctgctcaccgagacatccattgacatgctggtcaggtgcagccaccagggcaagattacatcctacggctggttgatgggtgacacatttggtcagtgggggagaattgcgctacaagcatcggtggtgataaacaatgtcggcgtgttg

SEQ ID NO: 18613 - protein, 126 aa, Zea mays subsp. mays
  peptide (1)..(126): Ceres Seq. ID no. 1850218
  misc_feature: Pfam Name: Aa_trans Pfam Description: Transmembrane amino acid transporter protein
  misc_feature (35)..(125): Homolog of NCBI NO: 34907894 NR Description: P0439E11.11 [Oryza sativa (japonica
  misc_feature (23)..(125): Homolog of NCBI NO: 34907896 NR Description: P0439E11.12 [Oryza sativa (japonica
  misc_feature (18)..(124): Homolog of NCBI NO: 30688270 NR Description: amino acid transporter family [Arabidopsis
  misc_feature (17)..(125): Homolog of NCBI NO: 15228851 NR Description: putative protein
  misc_feature (34)..(125): Homolog of NCBI NO: 18412864 NR Description: expressed protein
  misc_feature (33)..(125): Homolog of NCBI NO: 24461850 NR Description: CTV.3 [Poncirus trifoliata]
  misc_feature (7)..(125): Homolog of NCBI NO: 34898706 NR Description: hypothetical protein [Oryza sativa (japonica
  misc_feature (14)..(125): Homolog of NCBI NO: 15241555 NR Description: transporter -like protein; protein id:
  misc_feature (2)..(125): Homolog of NCBI NO: 9758059 NR Description: amino acid transporter-like protein [Arabidopsis
  misc_feature (14)..(125): Homolog of NCBI NO: 18406463 NR Description: expressed protein
MGSSRNVPHKVMQDEITPLLPIKAEEDAVHEFDGASFSGAVFNLSTTIVGAGIMALPASIKMLGLIPGILMIILVALLTETSIDMLVRCSHQGKITSYGWLMGDTFGQWGRIALQASVVINNVGVL

SEQ ID NO: 18614 - protein, 115 aa, Zea mays subsp. mays
  peptide (1)..(115): Ceres Seq. ID no. 1850219
  misc_feature: Pfam Name: Aa_trans Pfam Description: Transmembrane amino acid transporter protein
  misc_feature (24)..(114): Homolog of NCBI NO: 34907894 NR Description: P0439E11.11 [Oryza sativa (japonica
  misc_feature (12)..(114): Homolog of NCBI NO: 34907896 NR Description: P0439E11.12 [Oryza sativa (japonica
  misc_feature (7)..(113): Homolog of NCBI NO: 30688270 NR Description: amino acid transporter family [Arabidopsis
  misc_feature (6)..(114): Homolog of NCBI NO: 15228851 NR Description: putative protein
  misc_feature (23)..(114): Homolog of NCBI NO: 18412864 NR Description: expressed protein
  misc_feature (22)..(114): Homolog of NCBI NO: 24461850 NR Description: CTV.3 [Poncirus trifoliata]
  misc_feature (1)..(114): Homolog of NCBI NO: 34898706 NR Description: hypothetical protein [Oryza sativa (japonica
  misc_feature (3)..(114): Homolog of NCBI NO: 15241555 NR Description: transporter -like protein; protein id:
  misc_feature (1)..(114): Homolog of NCBI NO: 9758059 NR Description: amino acid transporter-like protein [Arabidopsis
  misc_feature (3)..(114): Homolog of NCBI NO: 18406463 NR Description: expressed protein
MQDEITPLLPIKAEEDAVHEFDGASFSGAVFNLSTTIVGAGIMALPASIKMLGLIPGILMIILVALLTETSIDMLVRCSHQGKITSYGWLMGDTFGQWGRIALQASVVINNVGVL

SEQ ID NO: 18615 - protein, 73 aa, Zea mays subsp. mays
  peptide (1)..(73): Ceres Seq. ID no. 1850220
  misc_feature: Pfam Name: Aa_trans Pfam Description: Transmembrane amino acid transporter protein
  misc_feature (1)..(72): Homolog of NCBI NO: 34907894 NR Description: P0439E11.11 [Oryza sativa (japonica
  misc_feature (1)..(72): Homolog of NCBI NO: 34907896 NR Description: P0439E11.12 [Oryza sativa (japonica
  misc_feature (1)..(71): Homolog of NCBI NO: 30688270 NR Description: amino acid transporter family [Arabidopsis
  misc_feature (1)..(72): Homolog of NCBI NO: 15228851 NR Description: putative protein
  misc_feature (1)..(72): Homolog of NCBI NO: 18412864 NR Description: expressed protein
  misc_feature (1)..(72): Homolog of NCBI NO: 24461850 NR Description: CTV.3 [Poncirus trifoliata]
  misc_feature (1)..(72): Homolog of NCBI NO: 34898706 NR Description: hypothetical protein [Oryza sativa (japonica
  misc_feature (1)..(72): Homolog of NCBI NO: 15241555 NR Description: transporter -like protein; protein id:
  misc_feature (1)..(72): Homolog of NCBI NO: 9758059 NR Description: amino acid transporter-like protein [Arabidopsis
  misc_feature (1)..(72): Homolog of NCBI NO: 18406463 NR Description: expressed protein
MALPASIKMLGLIPGILMIILVALLTETSIDMLVRCSHQGKITSYGWLMGDTFGQWGRIALQASVVINNVGVL

SEQ ID NO: 18616 - DNA, 1103 bp, Zea mays subsp. mays
  misc_feature (1)..(1103): Ceres Seq. ID no. 12368722
  misc_feature: MA Experiment ID: 108522 Result: Down-regulated in Transcription
  misc_feature: MA Experiment 108522 PARAMETER Experiment Name: Zm_42deg_Heat_P Parameter: Age (day) Value: 8
  misc_feature: MA Experiment 108522 PARAMETER Experiment Name: Zm_42deg_Heat_P Parameter: Organism Value: Zea mays
  misc_feature: MA Experiment 108522 PARAMETER Experiment Name: Zm_42deg_Heat_P Parameter: Plant Line Value: 35A19
  misc_feature: MA Experiment 108522 PARAMETER Experiment Name: Zm_42deg_Heat_P Parameter: Temperature (deg C) Value: 42 vs. 22
  misc_feature: MA Experiment 108522 PARAMETER Experiment Name: Zm_42deg_Heat_P Parameter: Timepoint (hr) Value: 1
  misc_feature: MA Experiment 108522 PARAMETER Experiment Name: Zm_42deg_Heat_P Parameter: Tissue Value: Aerial
  misc_feature: MA Experiment ID: 108528 Result: Up-regulated in Transcription
  misc_feature: MA Experiment 108528 PARAMETER Experiment Name: Zm_Imbibed_Seeds_P Parameter: Age (day) Value: 5 vs. 2
  misc_feature: MA Experiment 108528 PARAMETER Experiment Name: Zm_Imbibed_Seeds_P Parameter: Organism Value: Zea mays
  misc_feature: MA Experiment 108528 PARAMETER Experiment Name: Zm_Imbibed_Seeds_P Parameter: Plant Line Value: 35A19
  misc_feature: MA Experiment 108528 PARAMETER Experiment Name: Zm_Imbibed_Seeds_P Parameter: Tissue Value: Aerial vs. Embryo
  misc_feature: MA Experiment ID: 20000534 Result: Down-regulated in Transcription
  misc_feature: MA Experiment 20000534 PARAMETER Experiment Name: Zm_Hybrid_Pollen_P Parameter: Age (day) Value: 8
  misc_feature: MA Experiment 20000534 PARAMETER Experiment Name: Zm_Hybrid_Pollen_P Parameter: Organism Value: Zea mays
  misc_feature: MA Experiment 20000534 PARAMETER Experiment Name: Zm_Hybrid_Pollen_P Parameter: Plant Line Value: 35A19
  misc_feature: MA Experiment 20000534 PARAMETER Experiment Name: Zm_Hybrid_Pollen_P Parameter: Tissue Value: Pollen vs. Aerial
gcacgagaccattacctagaacatcctaatcgaaaaagagcgaagtgtaatttgaatggcaggcacaagacagagaagcaggtgggaagtcgacgcagttgtttgttgtggatgagttgcgtgtgttgctgctgccgcgcgtgcgtgtcccccgacggccccggaccacgactccctcctcccgccgccgccttctccttcgtcggggaccgaatgcagcgggtcgtcgtcatgcgccacggcgatcgcctcgaccattccgagcccatgtggcccgccaacaagccgcgcccctgggatccgcctctcgacgacgccggcctcctccgcgcctggaccgtcggcaagtgcatcagggccgccgccgccaagcagggatgggccctccaccgggtcctcgtctccccgttcctgcgatgccgacagaccgccgcgcgcgccgtcgccgcgctatgtgccgtccccgacgacgacgcgctgctcgcggtcggcgacccggccaatgtgcccctcgacacctcacgcgtcaaggtgtctatcgagtatggattgtctgagatgatgaacacccaagcaatgggcattactgttagcaagctggctcccaacgtcagcaagtggtttcctgacttgccagagcttgaagccgacttcccggctggaaccatcgaccattctgcagaaccaatctacccggagctaccaaagtgggaggaatccatcatggaggcaagaagcagatacgcaagcataatcaaagctcttgctgacaaatatcctcatgaaaacctgctattagtaacacacggtgagggcgttggtgcatccatttcctactttgagatgggactagagatctacgacgtggagtactgtgcgtactctgttctggagaggcaggtgactgcagagcctggtgatgagcatgggggctttacctttaccgcggatagcttcaaggtcatgaccaagagtggtagcacaggcatacgatacgccccggtgtgagagggctggtttcttggttgagcaatatttttttaaaagcatgaatacctggactgtctttttaatactttcaacttttttatgacgatcttttg

SEQ ID NO: 18617 - protein, 335 aa, Zea mays subsp. mays
  peptide (1)..(335): Ceres Seq. ID no. 12368723
  misc_feature (77)..(151): Pfam Name: Phosphoglycerate mutase family Pfam Description: Phosphoglycerate mutase family
  misc_feature (73)..(144): Homolog of NCBI NO: 23042637 NR Description: hypothetical protein [Trichodesmium erythraeum
  misc_feature (178)..(273): Homolog of NCBI NO: 23042637 NR Description: hypothetical protein [Trichodesmium erythraeum
  misc_feature (78)..(312): Homolog of NCBI NO: 21592687 NR Description: unknown [Arabidopsis thaliana]
  misc_feature (63)..(312): Homolog of NCBI NO: 15232324 NR Description: putative protein
  misc_feature (70)..(334): Homolog of NCBI NO: 15232326 NR Description: putative protein; protein id: At3g60430.1
  misc_feature (99)..(332): Homolog of NCBI NO: 25347741 NR Description: pRIB5 protein [imported] - Ribes nigrum
  misc_feature (70)..(332): Homolog of NCBI NO: 15232328 NR Description: putative protein; protein id: At3g60440.1
  misc_feature (66)..(333): Homolog of NCBI NO: 21553703 NR Description: pRIB5 protein [Arabidopsis thaliana]
  misc_feature (66)..(333): Homolog of NCBI NO: 15232331 NR Description: putative protein
ARDHYLEHPNRKRAKCNLNGRHKTEKQVGSRRSCLLWMSCVCCCCRACVSPDGPGPRLPPPAAAFSFVGDRMQRVVVMRHGDRLDHSEPMWPANKPRPWDPPLDDAGLLRAWTVGKCIRAAAAKQGWALHRVLVSPFLRCRQTAARAVAALCAVPDDDALLAVGDPANVPLDTSRVKVSIEYGLSEMMNTQAMGITVSKLAPNVSKWFPDLPELEADFPAGTIDHSAEPIYPELPKWEESIMEARSRYASIIKALADKYPHENLLLVTHGEGVGASISYFEMGLEIYDVEYCAYSVLERQVTAEPGDEHGGFTFTADSFKVMTKSGSTGIRYAPV

SEQ ID NO: 18618 - protein, 298 aa, Zea mays subsp. mays
  peptide (1)..(298): Ceres Seq. ID no. 12368724
  misc_feature (40)..(114): Pfam Name: Phosphoglycerate mutase family Pfam Description: Phosphoglycerate mutase family
  misc_feature (36)..(107): Homolog of NCBI NO: 23042637 NR Description: hypothetical protein [Trichodesmium erythraeum
  misc_feature (141)..(236): Homolog of NCBI NO: 23042637 NR Description: hypothetical protein [Trichodesmium erythraeum
  misc_feature (41)..(275): Homolog of NCBI NO: 21592687 NR Description: unknown [Arabidopsis thaliana]
  misc_feature (26)..(275): Homolog of NCBI NO: 15232324 NR Description: putative protein
  misc_feature (33)..(297): Homolog of NCBI NO: 15232326 NR Description: putative protein; protein id: At3g60430.1
  misc_feature (62)..(295): Homolog of NCBI NO: 25347741 NR Description: pRIB5 protein [imported] - Ribes nigrum
  misc_feature (33)..(295): Homolog of NCBI NO: 15232328 NR Description: putative protein; protein id: At3g60440.1
  misc_feature (29)..(296): Homolog of NCBI NO: 21553703 NR Description: pRIB5 protein [Arabidopsis thaliana]
  misc_feature (29)..(296): Homolog of NCBI NO: 15232331 NR Description: putative protein
MSCVCCCCRACVSPDGPGPRLPPPAAAFSFVGDRMQRVVVMRHGDRLDHSEPMWPANKPRPWDPPLDDAGLLRAWTVGKCIRAAAAKQGWALHRVLVSPFLRCRQTAARAVAALCAVPDDDALLAVGDPANVPLDTSRVKVSIEYGLSEMMNTQAMGITVSKLAPNVSKWFPDLPELEADFPAGTIDHSAEPIYPELPKWEESIMEARSRYASIIKALADKYPHENLLLVTHGEGVGASISYFEMGLEIYDVEYCAYSVLERQVTAEPGDEHGGFTFTADSFKVMTKSGSTGIRYAPV

SEQ ID NO: 18619 - protein, 264 aa, Zea mays subsp. mays
  peptide (1)..(264): Ceres Seq. ID no. 12368725
  misc_feature (6)..(80): Pfam Name: Phosphoglycerate mutase family Pfam Description: Phosphoglycerate mutase family
  misc_feature (2)..(73): Homolog of NCBI NO: 23042637 NR Description: hypothetical protein [Trichodesmium erythraeum
  misc_feature (107)..(202): Homolog of NCBI NO: 23042637 NR Description: hypothetical protein [Trichodesmium erythraeum
  misc_feature (7)..(241): Homolog of NCBI NO: 21592687 NR Description: unknown [Arabidopsis thaliana]
  misc_feature (1)..(241): Homolog of NCBI NO: 15232324 NR Description: putative protein
  misc_feature (1)..(263): Homolog of NCBI NO: 15232326 NR Description: putative protein; protein id: At3g60430.1
  misc_feature (28)..(261): Homolog of NCBI NO: 25347741 NR Description: pRIB5 protein [imported] - Ribes nigrum
  misc_feature (1)..(261): Homolog of NCBI NO: 15232328 NR Description: putative protein; protein id: At3g60440.1
  misc_feature (1)..(262): Homolog of NCBI NO: 21553703 NR Description: pRIB5 protein [Arabidopsis thaliana]
  misc_feature (1)..(262): Homolog of NCBI NO: 15232331 NR Description: putative protein
MQRVVVMRHGDRLDHSEPMWPANKPRPWDPPLDDAGLLRAWTVGKCIRAAAAKQGWALHRVLVSPFLRCRQTAARAVAALCAVPDDDALLAVGDPANVPLDTSRVKVSIEYGLSEMMNTQAMGITVSKLAPNVSKWFPDLPELEADFPAGTIDHSAEPIYPELPKWEESIMEARSRYASIIKALADKYPHENLLLVTHGEGVGASISYFEMGLEIYDVEYCAYSVLERQVTAEPGDEHGGFTFTADSFKVMTKSGSTGIRYAPV

SEQ ID NO: 18620 - DNA, 1703 bp, Zea mays subsp. mays
  misc_feature (1)..(1703): Ceres Seq. ID no. 12376841
  misc_feature: MA Experiment ID: 108535 Result: Down-regulated in Transcription
  misc_feature: MA Experiment 108535 PARAMETER Experiment Name: Zm_Meristem_P Parameter: Age (day) Value: 8
  misc_feature: MA Experiment 108535 PARAMETER Experiment Name: Zm_Meristem_P Parameter: Organism Value: Zea mays
  misc_feature: MA Experiment 108535 PARAMETER Experiment Name: Zm_Meristem_P Parameter: Plant Line Value: 35A19
  misc_feature: MA Experiment 108535 PARAMETER Experiment Name: Zm_Meristem_P Parameter: Tissue Value: Root Meristem vs. Above Root Meristem
  misc_feature: MA Experiment ID: 20000492 Result: Down-regulated in Transcription
  misc_feature: MA Experiment 20000492 PARAMETER Experiment Name: Zm_Hybrid_Seed_Dev_P Parameter: DAP Value: 12
  misc_feature: MA Experiment 20000492 PARAMETER Experiment Name: Zm_Hybrid_Seed_Dev_P Parameter: Organism Value: Zea mays
  misc_feature: MA Experiment 20000492 PARAMETER Experiment Name: Zm_Hybrid_Seed_Dev_P Parameter: Plant Line Value: 35A19
  misc_feature: MA Experiment 20000492 PARAMETER Experiment Name: Zm_Hybrid_Seed_Dev_P Parameter: Tissue Value: Fert Kernel vs. Unfert Floret
  misc_feature: MA Experiment ID: 20000535 Result: Down-regulated in Transcription
  misc_feature: MA Experiment 20000535 PARAMETER Experiment Name: Zm_Hybrid_Seed_Dev_P Parameter: DAP Value: 30 vs. 12
  misc_feature: MA Experiment 20000535 PARAMETER Experiment Name: Zm_Hybrid_Seed_Dev_P Parameter: Organism Value: Zea mays
  misc_feature: MA Experiment 20000535 PARAMETER Experiment Name: Zm_Hybrid_Seed_Dev_P Parameter: Plant Line Value: 35A19
  misc_feature: MA Experiment 20000535 PARAMETER Experiment Name: Zm_Hybrid_Seed_Dev_P Parameter: Tissue Value: Embryo vs. Unfert Floret
gcacgagaccattacctagaacatcctaatcgaaaagaccgaataaccacccgtctgccgctgtgccgcacggcccgcaccccgcacgagacccgtccttgaggggcacgtcctagatcggtggcgccttcctctcgccgccgatacggtgcctctcgcggtctcgctccccctcgcaggtcttttggtttttttagttcctccctttgcttcttggaggtgtttgttgccgtctcacccgcagttcttgaggtacgcacgcagtaatccggcttctttctatgttccgatgtcttgctggttggatgaggagggtacgacgctctgtggagagatctaatcgcgctggtaaactggggcgatcggtgtgggggaatcggatagcgtggatgggatttgggattggaagagaagctggaggatgccttttttctggatgacggtgataatcgtggacgagctaagctcattgagtgtctggctgatgtgggattgggtggcatatgctggattgctaactgttccatctggtgcaccaagcaattggactgcactggggttgggattgggattgggatgggattgctttgcctttgattgtgtatatgcttattatgtgctcatccgctgtggctttggccggaactttgcagacatgcagagccagatagtgtgccacgggtgcaggacccttctgttctacccaagaggtgctccgagcgtgtgttgtgcggtatgccatgtggtcaccaatgtgccgcctccagcaatggagatggctcgacttatatgtggtggctgccagacattattgatgtatgctcgcagtgcaacaactgtaagatgctcatgttgtgacacagtcaatcttgtcagaccagtgagtagcatagctcatgtgaactgtggccagtgccaaacagtgttgatgtatccatacggagcaccgtctgtcaaatgtgctgtttgcaacttcattacaaatgttggcggggtgactcccatgatacctttgccaccaccagcactacctgcatcaagtggaacttcatatatcatcccgtcaatttccgtgccgacgaatcaaccgcggaatgtaactgttgtcgttgaaaacccaatgacagtagatgacaagggaaaattggtgagcaatgttgtagtaggggttacgagcggcgggaaaaagtgacggcatatcacaaccgtgtgtagctttgtccaaactatctaaaaagggtttaagaatacataccttgtatcatactgctgtttggcgatcggctgctcgacggaggaatccccctccctggagagcgtagtggcaaagcagcgaggctttcgccactgcgaacgagccaaaaaaaaacgaagtgcgggtgtgcatactcagagtatatctgtagcttgttaccccttgattcttttgtatgtaatatgggctctgcctgactttcactgtgtgatcaaatttccaagcccgtgggcgctgttgctgcgtgccttgttattagtgaataacaaacattgcaaatggctcttgaaatacagtgtgtgtgtgttttaatctctctgcatttatgttaatcagcaggtgccaccatttgctgttccagactgataatgcagagtttgtatccacgttctttggagaaaacatttgaggctcatacgctgtttcatgtcccatnngtatattttct

SEQ ID NO: 18621 - protein, 256 aa, Zea mays subsp. mays
  peptide (1)..(256): Ceres Seq. ID no. 12376842
  misc_feature (77)..(255): Homolog of NCBI NO: 30685085 NR Description: zinc-finger protein Lsd1 [Arabidopsis thaliana]
  misc_feature (113)..(208): Homolog of NCBI NO: 34912604 NR Description: P0046B10.19 [Oryza sativa (japonica
  misc_feature (80)..(150): Homolog of NCBI NO: 25403154 NR Description: probable zinc-finger protein, 7043-7771
  misc_feature (79)..(198): Homolog of NCBI NO: 29467531 NR Description: P0582D05.23 [Oryza sativa (japonica
  misc_feature (113)..(255): Homolog of NCBI NO: 17981378 NR Description: zinc finger protein LSD1 [Brassica oleracea]
  misc_feature (80)..(190): Homolog of NCBI NO: 34905200 NR Description: P0672D01.2 [Oryza sativa (japonica
  misc_feature (80)..(190): Homolog of NCBI NO: 30692719 NR Description: zinc-finger protein -related [Arabidopsis
  misc_feature (80)..(193): Homolog of NCBI NO: 18398482 NR Description: zinc-finger protein, putative
  misc_feature (79)..(256): Homolog of NCBI NO: 17981380 NR Description: zinc finger protein LSD2 [Brassica oleracea]
  misc_feature (79)..(255): Homolog of NCBI NO: 30685083 NR Description: zinc-finger protein Lsd1 [Arabidopsis thaliana]
MPFFWMTVIIVDELSSLSVWLMWDWVAYAGLLTVPSGAPSNWTALGLGLGLGWDCFAFDCVYAYYVLIRCGFGRNFADMQSQIVCHGCRTLLFYPRGAPSVCCAVCHVVTNVPPPAMEMARLICGGCQTLLMYARSATTVRCSCCDTVNLVRPVSSIAHVNCGQCQTVLMYPYGAPSVKCAVCNFITNVGGVTPMIPLPPPALPASSGTSYIIPSISVPTNQPRNVTVVVENPMTVDDKGKLVSNVVVGVTSGGKK

SEQ ID NO: 18622 - protein, 251 aa, Zea mays subsp. mays
  peptide (1)..(251): Ceres Seq. ID no. 12376843
  misc_feature (108)..(203): Homolog of NCBI NO: 34912604 NR Description: P0046B10.19 [Oryza sativa (japonica
  misc_feature (75)..(145): Homolog of NCBI NO: 25403154 NR Description: probable zinc-finger protein, 7043-7771
  misc_feature (74)..(193): Homolog of NCBI NO: 29467531 NR Description: P0582D05.23 [Oryza sativa (japonica
  misc_feature (108)..(250): Homolog of NCBI NO: 17981378 NR Description: zinc finger protein LSD1 [Brassica oleracea]
  misc_feature (75)..(185): Homolog of NCBI NO: 34905200 NR Description: P0672D01.2 [Oryza sativa (japonica
  misc_feature (75)..(185): Homolog of NCBI NO: 30692719 NR Description: zinc-finger protein -related [Arabidopsis
  misc_feature (75)..(188): Homolog of NCBI NO: 18398482 NR Description: zinc-finger protein, putative
  misc_feature (74)..(251): Homolog of NCBI NO: 17981380 NR Description: zinc finger protein LSD2 [Brassica oleracea]
  misc_feature (74)..(250): Homolog of NCBI NO: 30685083 NR Description: zinc-finger protein Lsd1 [Arabidopsis thaliana]
  misc_feature (72)..(250): Homolog of NCBI NO: 30685085 NR Description: zinc-finger protein Lsd1 [Arabidopsis thaliana]
MTVIIVDELSSLSVWLMWDWVAYAGLLTVPSGAPSNWTALGLGLGLGWDCFAFDCVYAYYVLIRCGFGRNFADMQSQIVCHGCRTLLFYPRGAPSVCCAVCHVVTNVPPPAMEMARLICGGCQTLLMYARSATTVRCSCCDTVNLVRPVSSIAHVNCGQCQTVLMYPYGAPSVKCAVCNFITNVGGVTPMIPLPPPALPASSGTSYIIPSISVPTNQPRNVTVVVENPMTVDDKGKLVSNVVVGVTSGGKK

SEQ ID NO: 18623 - protein, 235 aa, Zea mays subsp. mays
  peptide (1)..(235): Ceres Seq. ID no. 12376844
  misc_feature (92)..(187): Homolog of NCBI NO: 34912604 NR Description: P0046B10.19 [Oryza sativa (japonica
  misc_feature (59)..(129): Homolog of NCBI NO: 25403154 NR Description: probable zinc-finger protein, 7043-7771
  misc_feature (58)..(177): Homolog of NCBI NO: 29467531 NR Description: P0582D05.23 [Oryza sativa (japonica
  misc_feature (92)..(234): Homolog of NCBI NO: 17981378 NR Description: zinc finger protein LSD1 [Brassica oleracea]
  misc_feature (59)..(169): Homolog of NCBI NO: 34905200 NR Description: P0672D01.2 [Oryza sativa (japonica
  misc_feature (59)..(169): Homolog of NCBI NO: 30692719 NR Description: zinc-finger protein -related [Arabidopsis
  misc_feature (59)..(172): Homolog of NCBI NO: 18398482 NR Description: zinc-finger protein, putative
  misc_feature (58)..(235): Homolog of NCBI NO: 17981380 NR Description: zinc finger protein LSD2 [Brassica oleracea]
  misc_feature (58)..(234): Homolog of NCBI NO: 30685083 NR Description: zinc-finger protein Lsd1 [Arabidopsis thaliana]
  misc_feature (56)..(234): Homolog of NCBI NO: 30685085 NR Description: zinc-finger protein Lsd1 [Arabidopsis thaliana]
MWDWVAYAGLLTVPSGAPSNWTALGLGLGLGWDCFAFDCVYAYYVLIRCGFGRNFADMQSQIVCHGCRTLLFYPRGAPSVCCAVCHVVTNVPPPAMEMARLICGGCQTLLMYARSATTVRCSCCDTVNLVRPVSSIAHVNCGQCQTVLMYPYGAPSVKCAVCNFITNVGGVTPMIPLPPPALPASSGTSYIIPSISVPTNQPRNVTVVVENPMTVDDKGKLVSNVVVGVTSGGKK

SEQ ID NO: 18624 - DNA, 1573 bp, Zea mays subsp. mays
  misc_feature (1)..(1573): Ceres Seq. ID no. 12435633
  misc_feature: MA Experiment ID: 108527 Result: Up-regulated in Transcription
  misc_feature: MA Experiment 108527 PARAMETER Experiment Name: Zm_5mM_NO_P Parameter: Age (day) Value: 8
  misc_feature: MA Experiment 108527 PARAMETER Experiment Name: Zm_5mM_NO_P Parameter: Organism Value: Zea mays
  misc_feature: MA Experiment 108527 PARAMETER Experiment Name: Zm_5mM_NO_P Parameter: Plant Line Value: 35A19
  misc_feature: MA Experiment 108527 PARAMETER Experiment Name: Zm_5mM_NO_P Parameter: Timepoint (hr) Value: 6
  misc_feature: MA Experiment 108527 PARAMETER Experiment Name: Zm_5mM_NO_P Parameter: Tissue Value: Aerial
  misc_feature: MA Experiment 108527 PARAMETER Experiment Name: Zm_5mM_NO_P Parameter: Treatment Value: 5mM NO vs. No Treatment
  misc_feature: MA Experiment ID: 108530 Result: Up-regulated in Transcription
  misc_feature: MA Experiment 108530 PARAMETER Experiment Name: Zm_Imbibed_Seeds_P Parameter: Age (day) Value: 6 vs. 2
  misc_feature: MA Experiment 108530 PARAMETER Experiment Name: Zm_Imbibed_Seeds_P Parameter: Organism Value: Zea mays
  misc_feature: MA Experiment 108530 PARAMETER Experiment Name: Zm_Imbibed_Seeds_P Parameter: Plant Line Value: 35A19
  misc_feature: MA Experiment 108530 PARAMETER Experiment Name: Zm_Imbibed_Seeds_P Parameter: Tissue Value: Aerial vs. Embryo
  misc_feature: MA Experiment ID: 108534 Result: Up-regulated in Transcription
  misc_feature: MA Experiment 108534 PARAMETER Experiment Name: Zm_4deg_Cold_P Parameter: Age (hr) Value: 8
  misc_feature: MA Experiment 108534 PARAMETER Experiment Name: Zm_4deg_Cold_P Parameter: Organism Value: Zea mays
  misc_feature: MA Experiment 108534 PARAMETER Experiment Name: Zm_4deg_Cold_P Parameter: Plant Line Value: 35A19
  misc_feature: MA Experiment 108534 PARAMETER Experiment Name: Zm_4deg_Cold_P Parameter: Temperature (deg C) Value: 4 vs. 22
  misc_feature: MA Experiment 108534 PARAMETER Experiment Name: Zm_4deg_Cold_P Parameter: Timepoint (hr) Value: 6
  misc_feature: MA Experiment 108534 PARAMETER Experiment Name: Zm_4deg_Cold_P Parameter: Tissue Value: Aerial
  misc_feature: MA Experiment ID: 108535 Result: Down-regulated in Transcription
  misc_feature: MA Experiment 108535 PARAMETER Experiment Name: Zm_Meristem_P Parameter: Age (day) Value: 8
  misc_feature: MA Experiment 108535 PARAMETER Experiment Name: Zm_Meristem_P Parameter: Organism Value: Zea mays
  misc_feature: MA Experiment 108535 PARAMETER Experiment Name: Zm_Meristem_P Parameter: Plant Line Value: 35A19
  misc_feature: MA Experiment 108535 PARAMETER Experiment Name: Zm_Meristem_P Parameter: Tissue Value: Root Meristem vs. Above Root Meristem
  misc_feature: MA Experiment ID: 108536 Result: Up-regulated in Transcription
  misc_feature: MA Experiment 108536 PARAMETER Experiment Name: Zm_Meristem_P Parameter: Age (day) Value: 8
  misc_feature: MA Experiment 108536 PARAMETER Experiment Name: Zm_Meristem_P Parameter: Organism Value: Zea mays
  misc_feature: MA Experiment 108536 PARAMETER Experiment Name: Zm_Meristem_P Parameter: Plant Line Value: 35A19
  misc_feature: MA Experiment 108536 PARAMETER Experiment Name: Zm_Meristem_P Parameter: Tissue Value: Shoot Meristem vs. Above Shoot Meristem
  misc_feature: MA Experiment ID: 108543 Result: Down-regulated in Transcription
  misc_feature: MA Experiment ID: 108547 Result: Up-regulated in Transcription
  misc_feature: MA Experiment 108547 PARAMETER Experiment Name: Zm_Imbibed_Seeds_P Parameter: Age (day) Value: 4 vs. 2
  misc_feature: MA Experiment 108547 PARAMETER Experiment Name: Zm_Imbibed_Seeds_P Parameter: Organism Value: Zea mays
  misc_feature: MA Experiment 108547 PARAMETER Experiment Name: Zm_Imbibed_Seeds_P Parameter: Plant Line Value: 35A19
  misc_feature: MA Experiment 108547 PARAMETER Experiment Name: Zm_Imbibed_Seeds_P Parameter: Tissue Value: Aerial vs. Embryo
  misc_feature: MA Experiment ID: 108688 Result: Down-regulated in Transcription
  misc_feature: MA Experiment 108688 PARAMETER Experiment Name: Zm_Embryos-Flowers__P Parameter: Tissue Value: Immature Flowers vs. Aerial+
  misc_feature: MA Experiment ID: 20000478 Result: Up-regulated in Transcription
  misc_feature: MA Experiment 20000478 PARAMETER Experiment Name: Zm_5mM_SA_P Parameter: Age (day) Value: 11
  misc_feature: MA Experiment 20000478 PARAMETER Experiment Name: Zm_5mM_SA_P Parameter: Organism Value: Zea mays
  misc_feature: MA Experiment 20000478 PARAMETER Experiment Name: Zm_5mM_SA_P Parameter: Plant Line Value: 35A19
  misc_feature: MA Experiment 20000478 PARAMETER Experiment Name: Zm_5mM_SA_P Parameter: Timepoint (hr) Value: 72
  misc_feature: MA Experiment 20000478 PARAMETER Experiment Name: Zm_5mM_SA_P Parameter: Tissue Value: Aerial
  misc_feature: MA Experiment 20000478 PARAMETER Experiment Name: Zm_5mM_SA_P Parameter: Treatment Value: 5mM SA vs. No Treatment
  misc_feature: MA Experiment ID: 20000488 Result: Up-regulated in Transcription
  misc_feature: MA Experiment 20000488 PARAMETER Experiment Name: Zm_50mM_NH4NO3_L_to_H_P Parameter: Organism Value: Zea mays
  misc_feature: MA Experiment 20000488 PARAMETER Experiment Name: Zm_50mM_NH4NO3_L_to_H_P Parameter: Timepoint (hr) Value: 8
  misc_feature: MA Experiment 20000488 PARAMETER Experiment Name: Zm_50mM_NH4NO3_L_to_H_P Parameter: Tissue Value: Leaves
  misc_feature: MA Experiment 20000488 PARAMETER Experiment Name: Zm_50mM_NH4NO3_L_to_H_P Parameter: Treatment Value: 50mM NH4NO3 vs. 100mM Mannitol
  misc_feature: MA Experiment ID: 20000534 Result: Down-regulated in Transcription
  misc_feature: MA Experiment 20000534 PARAMETER Experiment Name: Zm_Hybrid_Pollen_P Parameter: Age (day) Value: 8
  misc_feature: MA Experiment 20000534 PARAMETER Experiment Name: Zm_Hybrid_Pollen_P Parameter: Organism Value: Zea mays
  misc_feature: MA Experiment 20000534 PARAMETER Experiment Name: Zm_Hybrid_Pollen_P Parameter: Plant Line Value: 35A19
  misc_feature: MA Experiment 20000534 PARAMETER Experiment Name: Zm_Hybrid_Pollen_P Parameter: Tissue Value: Pollen vs. Aerial
gcacgagaccattacctagaacatcctaatcgaaaagtaaactaaccaccaaagccgaagaaggcggcttgccctgcccgccgccttggtgccgcgcgcgccatggccaagagcaagtcgtccgccaaggccggccccccgctcctcggcaagtacgagctcggccacctcctcggccggggcaacttcgccaaggtataccacgcgcgctgcctcggcggaggcgaccccgtggccgtgaaggtgctggacaaggccgggctggccgccacgggcatggcgtcgcggctcctgcgcgaggtgtccgccatgcgccgcctgagccaccccaacgtgctccgcctccacgaggtgctggcgacgcgctccaaggtgtacctcgtgatggagctggccccgggcggggacctcctgtcccggctggcgtcgctgccgtcccgcaggctccccgagcacgcggcgcggcgcgtgttcctccagctggcgtcggcgctcatctacagccacgcgcgcggggtgttccaccgcgacgtgaagccgcagaacgtgctgctggacgccgagggcaacctcaaggtgtccgacttcggcctcgcggcgctcccggactcggtccgcgacgacgggcgcctgcacacggcgtgcggcaccccggcgttcgcggcgcccgaggtgctccggcgcagggcctacgacggcgccaaggcggacgcgtggtcctgcggggtcatcctcttcgtcctcctcgcgggccacctccccttcgacgacgccaacatcgccgacatgtgccgcagggcgcaccgccgggagtacacggtcccgcggtgggtgtcgcagccggcgcgccgcctcgtggcgcgcctgctggacccgaacccggcgacgcgcctcgccgtcgcggagctcgccggccacccctggttcaagcgctcgctcagcgtggactcccagctcggcggcctcctggacggccaggcggagcgcgagctggcgttccaggccccgccggcgctgaacgccttcgacatcatctccatgtccccagggctggacctgtcgggcctgttcggcgagggcaggcgccgccgcgagaagcggttcatgacgacggcgtccccggagcgggcggtggagcggctcgcgcaggccggcgcgaggctcggctacttcattgtggggaagaagggggccgagcgcctgccgctgggcgtcctgccgggcctcgtggccatgtcgatggagatgtcggaggtgtcgccggagctgatgctggtggagctgaggctggagggcggccacggccgacgaggacgaggcgttcgggtgggaggagctccgggttgagctgggggacgtggtaacagcatggcacgtgagtgaagaaggttaaaaattcgcaagaggaaatgcgagaacgatttcgcaggtgtatcagtgtagtatgtatagccgtatagcaagtgcgcatctcatctcgtgtacgtgaaattagttggttaggacgaacagcagcgtgtgatgttggggattaactagactggtagtttcaatcaaatgtgtgatgtgtggg

SEQ ID NO: 18625 - protein, 414 aa, Zea mays subsp. mays
  peptide (1)..(414): Ceres Seq. ID no. 12435634
  misc_feature (18)..(275): Pfam Name: Protein kinase domain Pfam Description: Protein kinase domain
  misc_feature (290)..(399): Homolog of NCBI NO: 34903780 NR Description: unnamed protein product [Oryza sativa (japonica
  misc_feature (14)..(277): Homolog of NCBI NO: 34903780 NR Description: unnamed protein product [Oryza sativa (japonica
  misc_feature (302)..(399): Homolog of NCBI NO: 5821067 NR Description: OsPK4 [Oryza sativa]
  misc_feature (1)..(303): Homolog of NCBI NO: 5821067 NR Description: OsPK4 [Oryza sativa]
  misc_feature (302)..(399): Homolog of NCBI NO: 34909714 NR Description: OsPK4-like protein [Oryza sativa (japonica
  misc_feature (14)..(278): Homolog of NCBI NO: 34909714 NR Description: OsPK4-like protein [Oryza sativa (japonica
  misc_feature (3)..(398): Homolog of NCBI NO: 9798601 NR Description: serine/threonine protein kinase [Arabidopsis
  misc_feature (3)..(398): Homolog of NCBI NO: 15451212 NR Description: SNF1 related protein kinase [Arabidopsis thaliana]
  misc_feature (3)..(398): Homolog of NCBI NO: 15228920 NR Description: SNF1 related protein kinase (ATSRPK1)
  misc_feature (5)..(396): Homolog of NCBI NO: 15233500 NR Description: SNF1 like protein kinase
MAKSKSSAKAGPPLLGKYELGHLLGRGNFAKVYHARCLGGGDPVAVKVLDKAGLAATGMASRLLREVSAMRRLSHPNVLRLHEVLATRSKVYLVMELAPGGDLLSRLASLPSRRLPEHAARRVFLQLASALIYSHARGVFHRDVKPQNVLLDAEGNLKVSDFGLAALPDSVRDDGRLHTACGTPAFAAPEVLRRRAYDGAKADAWSCGVILFVLLAGHLPFDDANIADMCRRAHRREYTVPRWVSQPARRLVARLLDPNPATRLAVAELAGHPWFKRSLSVDSQLGGLLDGQAERELAFQAPPALNAFDIISMSPGLDLSGLFGEGRRRREKRFMTTASPERAVERLAQAGARLGYFIVGKKGAERLPLGVLPGLVAMSMEMSEVSPELMLVELRLEGGHGRRGRGVRVGGAPG

SEQ ID NO: 18626 - protein, 356 aa, Zea mays subsp. mays
  peptide (1)..(356): Ceres Seq. ID no. 12435635
  misc_feature (1)..(217): Pfam Name: Protein kinase domain Pfam Description: Protein kinase domain
  misc_feature (232)..(341): Homolog of NCBI NO: 34903780 NR Description: unnamed protein product [Oryza sativa (japonica
  misc_feature (1)..(219): Homolog of NCBI NO: 34903780 NR Description: unnamed protein product [Oryza sativa (japonica
  misc_feature (244)..(341): Homolog of NCBI NO: 5821067 NR Description: OsPK4 [Oryza sativa]
  misc_feature (1)..(245): Homolog of NCBI NO: 5821067 NR Description: OsPK4 [Oryza sativa]
  misc_feature (244)..(341): Homolog of NCBI NO: 34909714 NR Description: OsPK4-like protein [Oryza sativa (japonica
  misc_feature (1)..(220): Homolog of NCBI NO: 34909714 NR Description: OsPK4-like protein [Oryza sativa (japonica
  misc_feature (1)..(340): Homolog of NCBI NO: 9798601 NR Description: serine/threonine protein kinase [Arabidopsis
  misc_feature (1)..(340): Homolog of NCBI NO: 15451212 NR Description: SNF1 related protein kinase [Arabidopsis thaliana]
  misc_feature (1)..(340): Homolog of NCBI NO: 15228920 NR Description: SNF1 related protein kinase (ATSRPK1)
  misc_feature (1)..(338): Homolog of NCBI NO: 15233500 NR Description: SNF1 like protein kinase
MASRLLREVSAMRRLSHPNVLRLHEVLATRSKVYLVMELAPGGDLLSRLASLPSRRLPEHAARRVFLQLASALIYSHARGVFHRDVKPQNVLLDAEGNLKVSDFGLAALPDSVRDDGRLHTACGTPAFAAPEVLRRRAYDGAKADAWSCGVILFVLLAGHLPFDDANIADMCRRAHRREYTVPRWVSQPARRLVARLLDPNPATRLAVAELAGHPWFKRSLSVDSQLGGLLDGQAERELAFQAPPALNAFDIISMSPGLDLSGLFGEGRRRREKRFMTTASPERAVERLAQAGARLGYFIVGKKGAERLPLGVLPGLVAMSMEMSEVSPELMLVELRLEGGHGRRGRGVRVGGAPG

SEQ ID NO: 18627 - protein, 345 aa, Zea mays subsp. mays
  peptide (1)..(345): Ceres Seq. ID no. 12435636
  misc_feature (1)..(206): Pfam Name: Protein kinase domain Pfam Description: Protein kinase domain
  misc_feature (221)..(330): Homolog of NCBI NO: 34903780 NR Description: unnamed protein product [Oryza sativa (japonica
  misc_feature (1)..(208): Homolog of NCBI NO: 34903780 NR Description: unnamed protein product [Oryza sativa (japonica
  misc_feature (233)..(330): Homolog of NCBI NO: 5821067 NR Description: OsPK4 [Oryza sativa]
  misc_feature (1)..(234): Homolog of NCBI NO: 5821067 NR Description: OsPK4 [Oryza sativa]
  misc_feature (233)..(330): Homolog of NCBI NO: 34909714 NR Description: OsPK4-like protein [Oryza sativa (japonica
  misc_feature (1)..(209): Homolog of NCBI NO: 34909714 NR Description: OsPK4-like protein [Oryza sativa (japonica
  misc_feature (1)..(329): Homolog of NCBI NO: 9798601 NR Description: serine/threonine protein kinase [Arabidopsis
  misc_feature (1)..(329): Homolog of NCBI NO: 15451212 NR Description: SNF1 related protein kinase [Arabidopsis thaliana]
  misc_feature (1)..(329): Homolog of NCBI NO: 15228920 NR Description: SNF1 related protein kinase (ATSRPK1)
  misc_feature (1)..(327): Homolog of NCBI NO: 15233500 NR Description: SNF1 like protein kinase
MRRLSHPNVLRLHEVLATRSKVYLVMELAPGGDLLSRLASLPSRRLPEHAARRVFLQLASALIYSHARGVFHRDVKPQNVLLDAEGNLKVSDFGLAALPDSVRDDGRLHTACGTPAFAAPEVLRRRAYDGAKADAWSCGVILFVLLAGHLPFDDANIADMCRRAHRREYTVPRWVSQPARRLVARLLDPNPATRLAVAELAGHPWFKRSLSVDSQLGGLLDGQAERELAFQAPPALNAFDIISMSPGLDLSGLFGEGRRRREKRFMTTASPERAVERLAQAGARLGYFIVGKKGAERLPLGVLPGLVAMSMEMSEVSPELMLVELRLEGGHGRRGRGVRVGGAPG

SEQ ID NO: 18628 - DNA, 912 bp, Zea mays subsp. mays; identical to SEQ ID NO: 6225
  misc_feature (1)..(912): Ceres Seq. ID no. 12414036
  misc_feature: MA Experiment ID: 108535 Result: Up-regulated in Transcription
  misc_feature: MA Experiment 108535 PARAMETER Experiment Name: Zm_Meristem_P Parameter: Age (day) Value: 8
  misc_feature: MA Experiment 108535 PARAMETER Experiment Name: Zm_Meristem_P Parameter: Organism Value: Zea mays
  misc_feature: MA Experiment 108535 PARAMETER Experiment Name: Zm_Meristem_P Parameter: Plant Line Value: 35A19
  misc_feature: MA Experiment 108535 PARAMETER Experiment Name: Zm_Meristem_P Parameter: Tissue Value: Root Meristem vs. Above Root Meristem

SEQ ID NO: 18629 - protein, 128 aa, Zea mays subsp. mays; identical to SEQ ID NO: 6226
  peptide (1)..(128): Ceres Seq. ID no. 12414037
  misc_feature (57)..(127): Pfam Name: ATPase family associated with various cellular Pfam Description: ATPase family associated with various cellular
  misc_feature (1)..(127): Homolog of NCBI NO: 34909678 NR Description: katanin p60 subunit A 1-like [Oryza sativa
  misc_feature (1)..(127): Homolog of NCBI NO: 18403587 NR Description: putative katanin; protein id: At2g34560.1, by cDNA: 119620. [Arabidopsis thaliana] putative katanin [Arabidopsis thaliana]
  misc_feature (1)..(127): Homolog of NCBI NO: 25408335 NR Description: probable katanin [imported] - Arabidopsis thaliana
  misc_feature (1)..(127): Homolog of NCBI NO: 11071772 NR Description: probable AAA ATPase [Leishmania major]
  misc_feature (1)..(127): Homolog of NCBI NO: 34911050 NR Description: putative katanin [Oryza sativa (japonica
  misc_feature (1)..(127): Homolog of NCBI NO: 21313044 NR Description: RIKEN cDNA 4933439B08 [Mus musculus]
  misc_feature (1)..(127): Homolog of NCBI NO: 34190544 NR Description: Unknown (protein for MGC:33211) [Homo sapiens]
  misc_feature (43)..(127): Homolog of NCBI NO: 34932450 NR Description: similar to RIKEN cDNA 4933439B08 [Rattus
  misc_feature (1)..(44): Homolog of NCBI NO: 34932450 NR Description: similar to RIKEN cDNA 4933439B08 [Rattus
  misc_feature (1)..(126): Homolog of NCBI NO: 32478841 NR Description: katanin [Gossypium hirsutum]

SEQ ID NO: 18630 - protein, 89 aa, Zea mays subsp. mays; identical to SEQ ID NO: 6227
  peptide (1)..(89): Ceres Seq. ID no. 12414038
  misc_feature (18)..(88): Pfam Name: ATPase family associated with various cellular Pfam Description: ATPase family associated with various cellular
  misc_feature (1)..(88): Homolog of NCBI NO: 34909678 NR Description: katanin p60 subunit A 1-like [Oryza sativa
  misc_feature (1)..(88): Homolog of NCBI NO: 18403587 NR Description: putative katanin; protein id: At2g34560.1, by cDNA: 119620. [Arabidopsis thaliana] putative katanin [Arabidopsis thaliana]
  misc_feature (1)..(88): Homolog of NCBI NO: 25408335 NR Description: probable katanin [imported] - Arabidopsis thaliana
  misc_feature (1)..(88): Homolog of NCBI NO: 11071772 NR Description: probable AAA ATPase [Leishmania major]
  misc_feature (1)..(88): Homolog of NCBI NO: 34911050 NR Description: putative katanin [Oryza sativa (japonica
  misc_feature (1)..(88): Homolog of NCBI NO: 21313044 NR Description: RIKEN cDNA 4933439B08 [Mus musculus]
  misc_feature (1)..(88): Homolog of NCBI NO: 34190544 NR Description: Unknown (protein for MGC:33211) [Homo sapiens]
  misc_feature (4)..(88): Homolog of NCBI NO: 34932450 NR Description: similar to RIKEN cDNA 4933439B08 [Rattus
  misc_feature (1)..(87): Homolog of NCBI NO: 32478841 NR Description: katanin [Gossypium hirsutum]
  misc_feature (1)..(87): Homolog of NCBI NO: 32478843 NR Description: katanin [Gossypium barbadense]

SEQ ID NO: 18631 - protein, 84 aa, Zea mays subsp. mays; identical to SEQ ID NO: 6228
  peptide (1)..(84): Ceres Seq. ID no. 12414039
  misc_feature (1)..(46): Homolog of NCBI NO: 34909678 NR Description: katanin p60 subunit A 1-like [Oryza sativa
  misc_feature (46)..(65): Homolog of NCBI NO: 34909678 NR Description: katanin p60 subunit A 1-like [Oryza sativa

SEQ ID NO: 18632 - DNA, 1637 bp, Zea mays subsp. mays
  misc_feature (1)..(1637): Ceres Seq. ID no. 12418899
  misc_feature: MA Experiment ID: 108522 Result: Down-regulated in Transcription
  misc_feature: MA Experiment 108522 PARAMETER Experiment Name: Zm_42deg_Heat_P Parameter: Age (day) Value: 8
  misc_feature: MA Experiment 108522 PARAMETER Experiment Name: Zm_42deg_Heat_P Parameter: Organism Value: Zea mays
  misc_feature: MA Experiment 108522 PARAMETER Experiment Name: Zm_42deg_Heat_P Parameter: Plant Line Value: 35A19
  misc_feature: MA Experiment 108522 PARAMETER Experiment Name: Zm_42deg_Heat_P Parameter: Temperature (deg C) Value: 42 vs. 22
  misc_feature: MA Experiment 108522 PARAMETER Experiment Name: Zm_42deg_Heat_P Parameter: Timepoint (hr) Value: 1
  misc_feature: MA Experiment 108522 PARAMETER Experiment Name: Zm_42deg_Heat_P Parameter: Tissue Value: Aerial
  misc_feature: MA Experiment ID: 108527 Result: Down-regulated in Transcription
  misc_feature: MA Experiment 108527 PARAMETER Experiment Name: Zm_5mM_NO_P Parameter: Age (day) Value: 8
  misc_feature: MA Experiment 108527 PARAMETER Experiment Name: Zm_5mM_NO_P Parameter: Organism Value: Zea mays
  misc_feature: MA Experiment 108527 PARAMETER Experiment Name: Zm_5mM_NO_P Parameter: Plant Line Value: 35A19
  misc_feature: MA Experiment 108527 PARAMETER Experiment Name: Zm_5mM_NO_P Parameter: Timepoint (hr) Value: 6
  misc_feature: MA Experiment 108527 PARAMETER Experiment Name: Zm_5mM_NO_P Parameter: Tissue Value: Aerial
  misc_feature: MA Experiment 108527 PARAMETER Experiment Name: Zm_5mM_NO_P Parameter: Treatment Value: 5mM NO vs. No Treatment
  misc_feature: MA Experiment ID: 108530 Result: Up-regulated in Transcription
  misc_feature: MA Experiment 108530 PARAMETER Experiment Name: Zm_Imbibed_Seeds_P Parameter: Age (day) Value: 6 vs. 2
  misc_feature: MA Experiment 108530 PARAMETER Experiment Name: Zm_Imbibed_Seeds_P Parameter: Organism Value: Zea mays
  misc_feature: MA Experiment 108530 PARAMETER Experiment Name: Zm_Imbibed_Seeds_P Parameter: Plant Line Value: 35A19
  misc_feature: MA Experiment 108530 PARAMETER Experiment Name: Zm_Imbibed_Seeds_P Parameter: Tissue Value: Aerial vs. Embryo
  misc_feature: MA Experiment ID: 108535 Result: Down-regulated in Transcription
  misc_feature: MA Experiment 108535 PARAMETER Experiment Name: Zm_Meristem_P Parameter: Age (day) Value: 8
  misc_feature: MA Experiment 108535 PARAMETER Experiment Name: Zm_Meristem_P Parameter: Organism Value: Zea mays
  misc_feature: MA Experiment 108535 PARAMETER Experiment Name: Zm_Meristem_P Parameter: Plant Line Value: 35A19
  misc_feature: MA Experiment 108535 PARAMETER Experiment Name: Zm_Meristem_P Parameter: Tissue Value: Root Meristem vs. Above Root Meristem
  misc_feature: MA Experiment ID: 108536 Result: Down-regulated in Transcription
  misc_feature: MA Experiment 108536 PARAMETER Experiment Name: Zm_Meristem_P Parameter: Age (day) Value: 8
  misc_feature: MA Experiment 108536 PARAMETER Experiment Name: Zm_Meristem_P Parameter: Organism Value: Zea mays
  misc_feature: MA Experiment 108536 PARAMETER Experiment Name: Zm_Meristem_P Parameter: Plant Line Value: 35A19
  misc_feature: MA Experiment 108536 PARAMETER Experiment Name: Zm_Meristem_P Parameter: Tissue Value: Shoot Meristem vs. Above Shoot Meristem
  misc_feature: MA Experiment ID: 108543 Result: Up-regulated in Transcription
  misc_feature: MA Experiment ID: 108546 Result: Up-regulated in Transcription
  misc_feature: MA Experiment 108546 PARAMETER Experiment Name: Zm_Imbibed_Seeds_P Parameter: Age (day) Value: 3 vs. 2
  misc_feature: MA Experiment 108546 PARAMETER Experiment Name: Zm_Imbibed_Seeds_P Parameter: Organism Value: Zea mays
  misc_feature: MA Experiment 108546 PARAMETER Experiment Name: Zm_Imbibed_Seeds_P Parameter: Plant Line Value: 35A19
  misc_feature: MA Experiment 108546 PARAMETER Experiment Name: Zm_Imbibed_Seeds_P Parameter: Tissue Value: Roots vs. Embryo
  misc_feature: MA Experiment ID: 108547 Result: Up-regulated in Transcription
  misc_feature: MA Experiment 108547 PARAMETER Experiment Name: Zm_Imbibed_Seeds_P Parameter: Age (day) Value: 4 vs. 2
  misc_feature: MA Experiment 108547 PARAMETER Experiment Name: Zm_Imbibed_Seeds_P Parameter: Organism Value: Zea mays
  misc_feature: MA Experiment 108547 PARAMETER Experiment Name: Zm_Imbibed_Seeds_P Parameter: Plant Line Value: 35A19
  misc_feature: MA Experiment 108547 PARAMETER Experiment Name: Zm_Imbibed_Seeds_P Parameter: Tissue Value: Aerial vs. Embryo
  misc_feature: MA Experiment ID: 108559 Result: Down-regulated in Transcription
  misc_feature: MA Experiment 108559 PARAMETER Experiment Name: Zm_5mM_NO_P Parameter: Age (day) Value: 8
  misc_feature: MA Experiment 108559 PARAMETER Experiment Name: Zm_5mM_NO_P Parameter: Organism Value: Zea mays
  misc_feature: MA Experiment 108559 PARAMETER Experiment Name: Zm_5mM_NO_P Parameter: Plant Line Value: 35A19
  misc_feature: MA Experiment 108559 PARAMETER Experiment Name: Zm_5mM_NO_P Parameter: Timepoint (hr) Value: 12
  misc_feature: MA Experiment 108559 PARAMETER Experiment Name: Zm_5mM_NO_P Parameter: Tissue Value: Aerial
  misc_feature: MA Experiment 108559 PARAMETER Experiment Name: Zm_5mM_NO_P Parameter: Treatment Value: 5mM NO vs. No Treatment
  misc_feature: MA Experiment ID: 20000478 Result: Down-regulated in Transcription
  misc_feature: MA Experiment 20000478 PARAMETER Experiment Name: Zm_5mM_SA_P Parameter: Age (day) Value: 11
  misc_feature: MA Experiment 20000478 PARAMETER Experiment Name: Zm_5mM_SA_P Parameter: Organism Value: Zea mays
  misc_feature: MA Experiment 20000478 PARAMETER Experiment Name: Zm_5mM_SA_P Parameter: Plant Line Value: 35A19
  misc_feature: MA Experiment 20000478 PARAMETER Experiment Name: Zm_5mM_SA_P Parameter: Timepoint (hr) Value: 72
  misc_feature: MA Experiment 20000478 PARAMETER Experiment Name: Zm_5mM_SA_P Parameter: Tissue Value: Aerial
  misc_feature: MA Experiment 20000478 PARAMETER Experiment Name: Zm_5mM_SA_P Parameter: Treatment Value: 5mM SA vs. No Treatment
  misc_feature: MA Experiment ID: 20000535 Result: Down-regulated in Transcription
  misc_feature: MA Experiment 20000535 PARAMETER Experiment Name: Zm_Hybrid_Seed_Dev_P Parameter: DAP Value: 30 vs. 12
  misc_feature: MA Experiment 20000535 PARAMETER Experiment Name: Zm_Hybrid_Seed_Dev_P Parameter: Organism Value: Zea mays
  misc_feature: MA Experiment 20000535 PARAMETER Experiment Name: Zm_Hybrid_Seed_Dev_P Parameter: Plant Line Value: 35A19
  misc_feature: MA Experiment 20000535 PARAMETER Experiment Name: Zm_Hybrid_Seed_Dev_P Parameter: Tissue Value: Embryo vs. Unfert Floret
  misc_feature: MA Experiment ID: 20000626 Result: Down-regulated in Transcription
  misc_feature: MA Experiment 20000626 PARAMETER Experiment Name: Zm_Herbicide-Treatments_P Parameter: Timepoint (hr) Value: 12
  misc_feature: MA Experiment 20000626 PARAMETER Experiment Name: Zm_Herbicide-Treatments_P Parameter: Tissue Value: Aerial
  misc_feature: MA Experiment 20000626 PARAMETER Experiment Name: Zm_Herbicide-Treatments_P Parameter: Treatment Value: Roundup vs. No Treatment
gcacgagaccattacctagaacatcctaatcgaaaaccatttcactcgtattctatcagctagctacccactgtcgccaactcgccgcaacaaagaaccaccatcatgcacctgctgatgctcccttggctcgccttcggccacatcgtgccgttcgtgcagctggcgcggaggctgctgtcctccacctcctcctccgtccgcgtcacgttcctcacggccgctggcaacgtcccgcgcgtcgaggccatgctgtcctctccctcgtccaccggcgaggcggccgtcgtcgtgccgctgcgcctgccccacgtgccggggctgcccgaggacgccgccagcacggcggacctctcgcccgagggcgccgagcttcttaaggccgcgctggacgctgcccggccgcagtggccgcgctgctggccgagctccgcccggacgccgtgctgctcgacttcgccaccccgtgggccgccgaggacgccgcggcgctgggcgccaagtcgctccggttcagcgtcttctccgccgtcncangcgcctacctctccgtccccgcgcgccgccccgacgcggcgggccagctgccgtcggcgcgcgacctcatgtccgcccctgccggcttccccggctcctccccgctcgccgnngccggcgtcccggcgtaccaggcagccgacttcacctacatgttcaccagcttcggcggccagccctgcgtccacgaacgcgtggtggccggcatccgggcctgcgacggcctcgtgctcaagacctgcgccgagatggagggtgcctacatcgactacctnnccgcgcagnttcgcaagcccgtgctcgtggcggggcccctgntgcctggcccgccggcgggagatctcgacgaccactgggccacctggttgtccgcgttcccggacggcgccgtcgtcttcgcctcgttcggcagcgagacgttcctgccgcccgccgcggccacggagctgctcctggggctcgaggccacgggtcgcccgttcctcgccgtgctcaactccccggacggcgccgtcccgccgccggggttcgcggagagggtgtcggggagagggctcgttcatgccgggtgggtgccgcagcagcacatcctgcgccaccggagcgtggggtgctacctcacccacgccggcttcagctccgtcgtggagggcctcgtcgccggctgccgcctcgtactgctgcccatgaagggcgaccagttcctcaacgcggcgctgttcgcgcgcgagctccgcgtgggcgtggaggtggcgcgccgcgacgacgacggctggttcgggcgccaggacgtgtgcgacgcgatcgccgcagcggtggcggacgggggggaaagggacgccaggaagtgggccgactttttgacggacgacggcgtgcaagggaggttcgccgacgagttcgtccggcagctcagggagctcgtcggcgcggcctccagttgatttgagcgctcgacgacgtttctcgtggaacacgcggcaagtgcgattattgaagaaataattccacccacctatttatttgtacattaataacattgcccacccacctgtactgtatcattattgaagaaataattccagccatggatattgcac

SEQ ID NO: 18633 - protein, 373 aa, Zea mays subsp. mays
  peptide (1)..(373): Ceres Seq. ID no. 12418900
  misc_feature (2)..(98): Pfam Name: UDP-glucoronosyl and UDP-glucosyl transferase Pfam Description: UDP-glucoronosyl and UDP-glucosyl transferase
  misc_feature (2)..(101): Homolog of NCBI NO: 15239523 NR Description: flavonol 3-O-glucosyltransferase-like protein
  misc_feature (2)..(101): Homolog of NCBI NO: 15234195 NR Description: UDP rhamnose-anthocyanidin-3-glucoside
  misc_feature (2)..(101): Homolog of NCBI NO: 15217773 NR Description: rhamnosyltransferase, putative; protein id:
  misc_feature (2)..(101): Homolog of NCBI NO: 15234196 NR Description: UDP rhamnose--anthocyanidin-3-glucoside
  misc_feature (1)..(101): Homolog of NCBI NO: 15239543 NR Description: flavonol 3-O-glucosyltransferase-like; protein
  misc_feature (1)..(101): Homolog of NCBI NO: 23955910 NR Description: UDP-glucosyltransferase [Stevia rebaudiana]
  misc_feature (1)..(101): Homolog of NCBI NO: 7433907 NR Description: anthocyanin rhamnosyltransferase - garden petunia
  misc_feature (1)..(101): Homolog of NCBI NO: 22759895 NR Description: rhamnosyl transferase [Nierembergia sp. NB17]
  misc_feature (1)..(101): Homolog of NCBI NO: 2501497 NR Description: FLAVONOL 3-O-GLUCOSYLTRANSFERASE (UDP-GLUCOSE
  misc_feature (1)..(101): Homolog of NCBI NO: 480314 NR Description: UDP rhamnose-anthocyanidin-3-glucoside
  misc_feature (143)..(143): Xaa is any aa, unknown or other
  misc_feature (144)..(144): Xaa is any aa, unknown or other
  misc_feature (182)..(182): Xaa is any aa, unknown or other
  misc_feature (236)..(236): Xaa is any aa, unknown or other
  misc_feature (239)..(239): Xaa is any aa, unknown or other
  misc_feature (250)..(250): Xaa is any aa, unknown or other
MHLLMLPWLAFGHIVPFVQLARRLLSSTSSSVRVTFLTAAGNVPRVEAMLSSPSSTGEAAVVVPLRLPHVPGLPEDAASTADLSPEGAELLKAALDAARPQWPRCWPSSARTPCCSTSPPRGPPRTPRRWAPSRSGSASSPPXXAPTSPSPRAAPTRRASCRRRATSCPPLPASPAPPRSPXPASRRTRQPTSPTCSPASAASPASTNAWWPASGPATASCSRPAPRWRVPTSTTXPRXFASPCSWRGPXCLARRREISTTTGPPGCPRSRTAPSSSPRSAARRSCRPPRPRSCSWGSRPRVARSSPCSTPRTAPSRRRGSRRGCRGEGSFMPGGCRSSTSCATGAWGATSPTPASAPSWRASSPAAASYCCP

SEQ ID NO: 18634 - protein, 369 aa, Zea mays subsp. mays
  peptide (1)..(369): Ceres Seq. ID no. 12418901
  misc_feature (1)..(94): Pfam Name: UDP-glucoronosyl and UDP-glucosyl transferase Pfam Description: UDP-glucoronosyl and UDP-glucosyl transferase
  misc_feature (1)..(97): Homolog of NCBI NO: 15239523 NR Description: flavonol 3-O-glucosyltransferase-like protein
  misc_feature (1)..(97): Homolog of NCBI NO: 15234195 NR Description: UDP rhamnose-anthocyanidin-3-glucoside
  misc_feature (1)..(97): Homolog of NCBI NO: 15217773 NR Description: rhamnosyltransferase, putative; protein id:
  misc_feature (1)..(97): Homolog of NCBI NO: 15234196 NR Description: UDP rhamnose--anthocyanidin-3-glucoside
  misc_feature (1)..(97): Homolog of NCBI NO: 15239543 NR Description: flavonol 3-O-glucosyltransferase-like; protein
  misc_feature (1)..(97): Homolog of NCBI NO: 23955910 NR Description: UDP-glucosyltransferase [Stevia rebaudiana]
  misc_feature (1)..(97): Homolog of NCBI NO: 7433907 NR Description: anthocyanin rhamnosyltransferase - garden petunia
  misc_feature (1)..(97): Homolog of NCBI NO: 22759895 NR Description: rhamnosyl transferase [Nierembergia sp. NB17]
  misc_feature (1)..(97): Homolog of NCBI NO: 2501497 NR Description: FLAVONOL 3-O-GLUCOSYLTRANSFERASE (UDP-GLUCOSE
  misc_feature (1)..(97): Homolog of NCBI NO: 480314 NR Description: UDP rhamnose-anthocyanidin-3-glucoside
  misc_feature (139)..(139): Xaa is any aa, unknown or other
  misc_feature (140)..(140): Xaa is any aa, unknown or other
  misc_feature (178)..(178): Xaa is any aa, unknown or other
  misc_feature (232)..(232): Xaa is any aa, unknown or other
  misc_feature (235)..(235): Xaa is any aa, unknown or other
  misc_feature (246)..(246): Xaa is any aa, unknown or other
MLPWLAFGHIVPFVQLARRLLSSTSSSVRVTFLTAAGNVPRVEAMLSSPSSTGEAAVVVPLRLPHVPGLPEDAASTADLSPEGAELLKAALDAARPQWPRCWPSSARTPCCSTSPPRGPPRTPRRWAPSRSGSASSPPXXAPTSPSPRAAPTRRASCRRRATSCPPLPASPAPPRSPXPASRRTRQPTSPTCSPASAASPASTNAWWPASGPATASCSRPAPRWRVPTSTTXPRXFASPCSWRGPXCLARRREISTTTGPPGCPRSRTAPSSSPRSAARRSCRPPRPRSCSWGSRPRVARSSPCSTPRTAPSRRRGSRRGCRGEGSFMPGGCRSSTSCATGAWGATSPTPASAPSWRASSPAAASYCCP

SEQ ID NO: 18635 - protein, 325 aa, Zea mays subsp. mays
  peptide (1)..(325): Ceres Seq. ID no. 12418902
  misc_feature (60)..(325): Pfam Name: Equine herpesvirus glycoprotein gp2 Pfam Description: Equine herpesvirus glycoprotein gp2
  misc_feature (1)..(53): Homolog of NCBI NO: 15239523 NR Description: flavonol 3-O-glucosyltransferase-like protein
  misc_feature (1)..(53): Homolog of NCBI NO: 15234195 NR Description: UDP rhamnose-anthocyanidin-3-glucoside
  misc_feature (1)..(53): Homolog of NCBI NO: 15217773 NR Description: rhamnosyltransferase, putative; protein id:
  misc_feature (1)..(53): Homolog of NCBI NO: 15234196 NR Description: UDP rhamnose--anthocyanidin-3-glucoside
  misc_feature (1)..(53): Homolog of NCBI NO: 15239543 NR Description: flavonol 3-O-glucosyltransferase-like; protein
  misc_feature (1)..(53): Homolog of NCBI NO: 23955910 NR Description: UDP-glucosyltransferase [Stevia rebaudiana]
  misc_feature (1)..(53): Homolog of NCBI NO: 7433907 NR Description: anthocyanin rhamnosyltransferase - garden petunia
  misc_feature (1)..(53): Homolog of NCBI NO: 22759895 NR Description: rhamnosyl transferase [Nierembergia sp. NB17]
  misc_feature (1)..(53): Homolog of NCBI NO: 2501497 NR Description: FLAVONOL 3-O-GLUCOSYLTRANSFERASE (UDP-GLUCOSE
  misc_feature (1)..(53): Homolog of NCBI NO: 480314 NR Description: UDP rhamnose-anthocyanidin-3-glucoside
  misc_feature (95)..(95): Xaa is any aa, unknown or other
  misc_feature (96)..(96): Xaa is any aa, unknown or other
  misc_feature (134)..(134): Xaa is any aa, unknown or other
  misc_feature (188)..(188): Xaa is any aa, unknown or other
  misc_feature (191)..(191): Xaa is any aa, unknown or other
  misc_feature (202)..(202): Xaa is any aa, unknown or other
MLSSPSSTGEAAVVVPLRLPHVPGLPEDAASTADLSPEGAELLKAALDAARPQWPRCWPSSARTPCCSTSPPRGPPRTPRRWAPSRSGSASSPPXXAPTSPSPRAAPTRRASCRRRATSCPPLPASPAPPRSPXPASRRTRQPTSPTCSPASAASPASTNAWWPASGPATASCSRPAPRWRVPTSTTXPRXFASPCSWRGPXCLARRREISTTTGPPGCPRSRTAPSSSPRSAARRSCRPPRPRSCSWGSRPRVARSSPCSTPRTAPSRRRGSRRGCRGEGSFMPGGCRSSTSCATGAWGATSPTPASAPSWRASSPAAASYCCP

SEQ ID NO: 18636 - protein, 291 aa, Zea mays subsp. mays
  peptide (1)..(291): Ceres Seq. ID no. 12418903
  misc_feature (1)..(284): Pfam Name: UDP-glucoronosyl and UDP-glucosyl transferase Pfam Description: UDP-glucoronosyl and UDP-glucosyl transferase
  misc_feature (1)..(286): Homolog of NCBI NO: 15239523 NR Description: flavonol 3-O-glucosyltransferase-like protein
  misc_feature (1)..(290): Homolog of NCBI NO: 15234195 NR Description: UDP rhamnose-anthocyanidin-3-glucoside
  misc_feature (1)..(286): Homolog of NCBI NO: 15217773 NR Description: rhamnosyltransferase, putative; protein id:
  misc_feature (1)..(290): Homolog of NCBI NO: 15234196 NR Description: UDP rhamnose--anthocyanidin-3-glucoside
  misc_feature (1)..(286): Homolog of NCBI NO: 15239543 NR Description: flavonol 3-O-glucosyltransferase-like; protein
  misc_feature (1)..(285): Homolog of NCBI NO: 23955910 NR Description: UDP-glucosyltransferase [Stevia rebaudiana]
  misc_feature (1)..(291): Homolog of NCBI NO: 7433907 NR Description: anthocyanin rhamnosyltransferase - garden petunia
  misc_feature (1)..(282): Homolog of NCBI NO: 22759895 NR Description: rhamnosyl transferase [Nierembergia sp. NB17]
  misc_feature (1)..(291): Homolog of NCBI NO: 2501497 NR Description: FLAVONOL 3-O-GLUCOSYLTRANSFERASE (UDP-GLUCOSE
  misc_feature (1)..(291): Homolog of NCBI NO: 480314 NR Description: UDP rhamnose-anthocyanidin-3-glucoside
  misc_feature (15)..(15): Xaa is any aa, unknown or other
  misc_feature (69)..(69): Xaa is any aa, unknown or other
  misc_feature (70)..(70): Xaa is any aa, unknown or other
  misc_feature (73)..(73): Xaa is any aa, unknown or other
  misc_feature (84)..(84): Xaa is any aa, unknown or other
MSAPAGFPGSSPLAXAGVPAYQAADFTYMFTSFGGQPCVHERVVAGIRACDGLVLKTCAEMEGAYIDYXXAQXRKPVLVAGPLXPGPPAGDLDDHWATWLSAFPDGAVVFASFGSETFLPPAAATELLLGLEATGRPFLAVLNSPDGAVPPPGFAERVSGRGLVHAGWVPQQHILRHRSVGCYLTHAGFSSVVEGLVAGCRLVLLPMKGDQFLNAALFARELRVGVEVARRDDDGWFGRQDVCDAIAAAVADGGERDARKWADFLTDDGVQGRFADEFVRQLRELVGAASS

SEQ ID NO: 18637 - DNA, 491 bp, Zea mays subsp. mays
  misc_feature (1)..(491): Ceres Seq. ID no. 1845739
  misc_feature: MA Experiment ID: 108527 Result: Down-regulated in Transcription
  misc_feature: MA Experiment 108527 PARAMETER Experiment Name: Zm_5mM_NO_P Parameter: Age (day) Value: 8
  misc_feature: MA Experiment 108527 PARAMETER Experiment Name: Zm_5mM_NO_P Parameter: Organism Value: Zea mays
  misc_feature: MA Experiment 108527 PARAMETER Experiment Name: Zm_5mM_NO_P Parameter: Plant Line Value: 35A19
  misc_feature: MA Experiment 108527 PARAMETER Experiment Name: Zm_5mM_NO_P Parameter: Timepoint (hr) Value: 6
  misc_feature: MA Experiment 108527 PARAMETER Experiment Name: Zm_5mM_NO_P Parameter: Tissue Value: Aerial
  misc_feature: MA Experiment 108527 PARAMETER Experiment Name: Zm_5mM_NO_P Parameter: Treatment Value: 5mM NO vs. No Treatment
  misc_feature: MA Experiment ID: 108544 Result: Down-regulated in Transcription
  misc_feature: MA Experiment ID: 20000535 Result: Up-regulated in Transcription
  misc_feature: MA Experiment 20000535 PARAMETER Experiment Name: Zm_Hybrid_Seed_Dev_P Parameter: DAP Value: 30 vs. 12
  misc_feature: MA Experiment 20000535 PARAMETER Experiment Name: Zm_Hybrid_Seed_Dev_P Parameter: Organism Value: Zea mays
  misc_feature: MA Experiment 20000535 PARAMETER Experiment Name: Zm_Hybrid_Seed_Dev_P Parameter: Plant Line Value: 35A19
  misc_feature: MA Experiment 20000535 PARAMETER Experiment Name: Zm_Hybrid_Seed_Dev_P Parameter: Tissue Value: Embryo vs. Unfert Floret
gcgcaasskctcgaccattgcaatgctgagaacaggaaaatctatcatgatttgaatgcttatagggtactttttgatgaggtacacaacaggaaggtgatccccgcttgtcaagttttggattaatgaagaacagccgtgatgggaaaagttatagcactaacctggcttacactccaccagagtttctacgaactggcagagtaattccggagagtgtgatctatagctatggaactgtcctgttggatcttttgagcggaaaacacattcctcctagtcatgccctagatttaataaggggaaagaatatactgttgctgatggattcctccttagaagggcagtatgctaatgaagatgcttcgaaattggttgatcttgcatcaaagtgtctgcaatttgaatctagggatagaccgaacataaagtatcttctgtcttctgttggtcctcttcagaatcaaaaggaggttgcatcacatgtgttc

SEQ ID NO: 18638 - protein, 122 aa, Zea mays subsp. mays
  peptide (1)..(122): Ceres Seq. ID no. 1845740
  misc_feature (1)..(108): Pfam Name: Protein kinase domain Pfam Description: Protein kinase domain
  misc_feature (1)..(121): Homolog of NCBI NO: 22328189 NR Description: hypothetical protein
  misc_feature (1)..(120): Homolog of NCBI NO: 15237604 NR Description: protein kinase-like; protein id: At5g41260.1
  misc_feature (1)..(121): Homolog of NCBI NO: 21553556 NR Description: protein kinase-like protein [Arabidopsis thaliana]
  misc_feature (1)..(121): Homolog of NCBI NO: 15232406 NR Description: protein kinase -like protein
  misc_feature (1)..(121): Homolog of NCBI NO: 18418600 NR Description: putative protein
  misc_feature (1)..(121): Homolog of NCBI NO: 7486022 NR Description: hypothetical protein F23E12.210 - Arabidopsis
  misc_feature (1)..(121): Homolog of NCBI NO: 22327962 NR Description: protein kinase - like
  misc_feature (1)..(121): Homolog of NCBI NO: 28393210 NR Description: putative protein kinase [Arabidopsis thaliana]
  misc_feature (1)..(121): Homolog of NCBI NO: 15237465 NR Description: protein kinase-like protein; protein id:
  misc_feature (1)..(121): Homolog of NCBI NO: 37537032 NR Description: putative protein kinase [Oryza sativa (japonica
MKNSRDGKSYSTNLAYTPPEFLRTGRVIPESVIYSYGTVLLDLLSGKHIPPSHALDLIRGKNILLLMDSSLEGQYANEDASKLVDLASKCLQFESRDRPNIKYLLSSVGPLQNQKEVASHVF

SEQ ID NO: 18639 - DNA, 1414 bp, Zea mays subsp. mays
  misc_feature (1)..(1414): Ceres Seq. ID no. 12383423
  misc_feature: MA Experiment ID: 108504 Result: Down-regulated in Transcription
  misc_feature: MA Experiment 108504 PARAMETER Experiment Name: Zm_Drought_P Parameter: Age (day) Value: 8
  misc_feature: MA Experiment 108504 PARAMETER Experiment Name: Zm_Drought_P Parameter: Organism Value: Zea mays
  misc_feature: MA Experiment 108504 PARAMETER Experiment Name: Zm_Drought_P Parameter: Plant Line Value: 35A19
  misc_feature: MA Experiment 108504 PARAMETER Experiment Name: Zm_Drought_P Parameter: Timepoint (hr) Value: 12
  misc_feature: MA Experiment 108504 PARAMETER Experiment Name: Zm_Drought_P Parameter: Tissue Value: Aerial
  misc_feature: MA Experiment 108504 PARAMETER Experiment Name: Zm_Drought_P Parameter: Treatment Value: Drought vs. No Drought
  misc_feature: MA Experiment ID: 108522 Result: Down-regulated in Transcription
  misc_feature: MA Experiment 108522 PARAMETER Experiment Name: Zm_42deg_Heat_P Parameter: Age (day) Value: 8
  misc_feature: MA Experiment 108522 PARAMETER Experiment Name: Zm_42deg_Heat_P Parameter: Organism Value: Zea mays
  misc_feature: MA Experiment 108522 PARAMETER Experiment Name: Zm_42deg_Heat_P Parameter: Plant Line Value: 35A19
  misc_feature: MA Experiment 108522 PARAMETER Experiment Name: Zm_42deg_Heat_P Parameter: Temperature (deg C) Value: 42 vs. 22
  misc_feature: MA Experiment 108522 PARAMETER Experiment Name: Zm_42deg_Heat_P Parameter: Timepoint (hr) Value: 1
  misc_feature: MA Experiment 108522 PARAMETER Experiment Name: Zm_42deg_Heat_P Parameter: Tissue Value: Aerial
  misc_feature: MA Experiment ID: 108527 Result: Down-regulated in Transcription
  misc_feature: MA Experiment 108527 PARAMETER Experiment Name: Zm_5mM_NO_P Parameter: Age (day) Value: 8
  misc_feature: MA Experiment 108527 PARAMETER Experiment Name: Zm_5mM_NO_P Parameter: Organism Value: Zea mays
  misc_feature: MA Experiment 108527 PARAMETER Experiment Name: Zm_5mM_NO_P Parameter: Plant Line Value: 35A19
  misc_feature: MA Experiment 108527 PARAMETER Experiment Name: Zm_5mM_NO_P Parameter: Timepoint (hr) Value: 6
  misc_feature: MA Experiment 108527 PARAMETER Experiment Name: Zm_5mM_NO_P Parameter: Tissue Value: Aerial
  misc_feature: MA Experiment 108527 PARAMETER Experiment Name: Zm_5mM_NO_P Parameter: Treatment Value: 5mM NO vs. No Treatment
  misc_feature: MA Experiment ID: 108534 Result: Down-regulated in Transcription
  misc_feature: MA Experiment 108534 PARAMETER Experiment Name: Zm_4deg_Cold_P Parameter: Age (hr) Value: 8
  misc_feature: MA Experiment 108534 PARAMETER Experiment Name: Zm_4deg_Cold_P Parameter: Organism Value: Zea mays
  misc_feature: MA Experiment 108534 PARAMETER Experiment Name: Zm_4deg_Cold_P Parameter: Plant Line Value: 35A19
  misc_feature: MA Experiment 108534 PARAMETER Experiment Name: Zm_4deg_Cold_P Parameter: Temperature (deg C) Value: 4 vs. 22
  misc_feature: MA Experiment 108534 PARAMETER Experiment Name: Zm_4deg_Cold_P Parameter: Timepoint (hr) Value: 6
  misc_feature: MA Experiment 108534 PARAMETER Experiment Name: Zm_4deg_Cold_P Parameter: Tissue Value: Aerial
  misc_feature: MA Experiment ID: 108689 Result: Down-regulated in Transcription
  misc_feature: MA Experiment 108689 PARAMETER Experiment Name: Zm_Drought_Roots_P Parameter: Age (day) Value: 9
  misc_feature: MA Experiment 108689 PARAMETER Experiment Name: Zm_Drought_Roots_P Parameter: Organism Value: Zea mays
  misc_feature: MA Experiment 108689 PARAMETER Experiment Name: Zm_Drought_Roots_P Parameter: Plant Line Value: 35A19
  misc_feature: MA Experiment 108689 PARAMETER Experiment Name: Zm_Drought_Roots_P Parameter: Timepoint (hr) Value: 24
  misc_feature: MA Experiment 108689 PARAMETER Experiment Name: Zm_Drought_Roots_P Parameter: Tissue Value: Roots
  misc_feature: MA Experiment 108689 PARAMETER Experiment Name: Zm_Drought_Roots_P Parameter: Treatment Value: Drought vs. No Drought
  misc_feature: MA Experiment ID: 20000492 Result: Up-regulated in Transcription
  misc_feature: MA Experiment 20000492 PARAMETER Experiment Name: Zm_Hybrid_Seed_Dev_P Parameter: DAP Value: 12
  misc_feature: MA Experiment 20000492 PARAMETER Experiment Name: Zm_Hybrid_Seed_Dev_P Parameter: Organism Value: Zea mays
  misc_feature: MA Experiment 20000492 PARAMETER Experiment Name: Zm_Hybrid_Seed_Dev_P Parameter: Plant Line Value: 35A19
  misc_feature: MA Experiment 20000492 PARAMETER Experiment Name: Zm_Hybrid_Seed_Dev_P Parameter: Tissue Value: Fert Kernel vs. Unfert Floret
  misc_feature: MA Experiment ID: 20000626 Result: Up-regulated in Transcription
  misc_feature: MA Experiment 20000626 PARAMETER Experiment Name: Zm_Herbicide-Treatments_P Parameter: Timepoint (hr) Value: 12
  misc_feature: MA Experiment 20000626 PARAMETER Experiment Name: Zm_Herbicide-Treatments_P Parameter: Tissue Value: Aerial
  misc_feature: MA Experiment 20000626 PARAMETER Experiment Name: Zm_Herbicide-Treatments_P Parameter: Treatment Value: Roundup vs. No Treatment
actcttccgatcccgaggaggtaaaaacaccgtcgctcaccaccaacacaacgccaaccaacctgccccctcacccccgctggccgctgcttaacaaaccgccgccacaggacaagacaaacttattacagctccacctcagtgctgcagagactgagggccagccaaaccgctcaccgcacacgcggaattcaagcagcatgtacgccgacgccgggttcgccttcgccttcgccgccgcctactcccccaccctcacttcctcgcagccccagccgccgccgccgccgttcgactacgccttctcctccgagccacccctcctctccatgcccgccatggaccacgacgcctacctggggaacttggtacagccatccatggtatcagaatatgacctgggaggagaaggggacctgttcaaagctccagaagccatcatcgaggaaccgctgctcagcctcgatcctgtcgcagctgccttttcaatgatggctggcaatggaagtgctgtcatggatcaaactattaaggacgcaggcaccggcaccatccaaaatgaccccctcctgagtgaggtgctgtacgagtgcgagaaggaactcatggagaagtccacaatcgaagagacaatttctgaacttatggatgttaagattcctatgctgcaagttgaagaaatcccaagccaagctgaacaggttcttatacagaaccagcagctcccggccatggagaaagagaagcaatccgttcctgaatgctcgctccaaaaaagtgttagttctggatgcctcaactcagcagattggatgaatggacctgccaggccaaactttctagacttccaggggctggactttgaggcagcatttgggctgaggagagcttacagcgaaggagacattcagaaccttggagccaacacgcctcgaccagcagcaaatgtttgtgtgaccatcagtgacctcaagaccgaagaaaggaagcaaaagctttccaggtataggaagaagaagatcaagcggaactttggcaggaagatcaagtacgcgtgcaggaaggctctggcagacagccagccaagagtgcgagggagatttgccaagatcgaagaatgcgacctgctgaagccaagcaagtagatccaagtatgcttggttttggcttctagctaggcgccgctccatcgtccttaccttgtgcgctggagaggcgccgcgatgcccgtcggaattcattcaattgacctctcctgtttctctcgggcagcatgctgtgtaataataatctcctccgggcccttgggtgcgagtgaagagctgaaaatttggtatggtagtctagcccccctgtactgtacaaaaggcttgaagatggtaataaaactcagctcccctcttgcttgcttggc

SEQ ID NO: 18640 - protein, 380 aa, Zea mays subsp. mays
  peptide (1)..(380): Ceres Seq. ID no. 12383424
  misc_feature (333)..(372): Pfam Name: CCT motif Pfam Description: CCT motif
  misc_feature (293)..(372): Homolog of NCBI NO: 15238070 NR Description: putative protein; protein id: At5g41380.1
  misc_feature (320)..(372): Homolog of NCBI NO: 26451419 NR Description: unknown protein [Arabidopsis thaliana]
  misc_feature (172)..(372): Homolog of NCBI NO: 21593708 NR Description: unknown [Arabidopsis thaliana]
  misc_feature (172)..(372): Homolog of NCBI NO: 15234310 NR Description: putative protein
  misc_feature (116)..(218): Homolog of NCBI NO: 8843771 NR Description: gene_id:MYN8.3~pir||T02891~similar to unknown
  misc_feature (256)..(372): Homolog of NCBI NO: 8843771 NR Description: gene_id:MYN8.3~pir||T02891~similar to unknown
  misc_feature (123)..(218): Homolog of NCBI NO: 21536819 NR Description: unknown [Arabidopsis thaliana]
  misc_feature (256)..(372): Homolog of NCBI NO: 21536819 NR Description: unknown [Arabidopsis thaliana]
  misc_feature (116)..(218): Homolog of NCBI NO: 18423511 NR Description: putative protein
  misc_feature (256)..(372): Homolog of NCBI NO: 18423511 NR Description: putative protein
SSDPEEVKTPSLTTNTTPTNLPPHPRWPLLNKPPPQDKTNLLQLHLSAAETEGQPNRSPHTRNSSSMYADAGFAFAFAAAYSPTLTSSQPQPPPPPFDYAFSSEPPLLSMPAMDHDAYLGNLVQPSMVSEYDLGGEGDLFKAPEAIIEEPLLSLDPVAAAFSMMAGNGSAVMDQTIKDAGTGTIQNDPLLSEVLYECEKELMEKSTIEETISELMDVKIPMLQVEEIPSQAEQVLIQNQQLPAMEKEKQSVPECSLQKSVSSGCLNSADWMNGPARPNFLDFQGLDFEAAFGLRRAYSEGDIQNLGANTPRPAANVCVTISDLKTEERKQKLSRYRKKKIKRNFGRKIKYACRKALADSQPRVRGRFAKIEECDLLKPSK

SEQ ID NO: 18641 - protein, 314 aa, Zea mays subsp. mays
  peptide (1)..(314): Ceres Seq. ID no. 12383425
  misc_feature (267)..(306): Pfam Name: CCT motif Pfam Description: CCT motif
  misc_feature (227)..(306): Homolog of NCBI NO: 15238070 NR Description: putative protein; protein id: At5g41380.1
  misc_feature (254)..(306): Homolog of NCBI NO: 26451419 NR Description: unknown protein [Arabidopsis thaliana]
  misc_feature (106)..(306): Homolog of NCBI NO: 21593708 NR Description: unknown [Arabidopsis thaliana]
  misc_feature (106)..(306): Homolog of NCBI NO: 15234310 NR Description: putative protein
  misc_feature (50)..(152): Homolog of NCBI NO: 8843771 NR Description: gene_id:MYN8.3~pir||T02891~similar to unknown
  misc_feature (190)..(306): Homolog of NCBI NO: 8843771 NR Description: gene_id:MYN8.3~pir||T02891~similar to unknown
  misc_feature (57)..(152): Homolog of NCBI NO: 21536819 NR Description: unknown [Arabidopsis thaliana]
  misc_feature (190)..(306): Homolog of NCBI NO: 21536819 NR Description: unknown [Arabidopsis thaliana]
  misc_feature (50)..(152): Homolog of NCBI NO: 18423511 NR Description: putative protein
  misc_feature (190)..(306): Homolog of NCBI NO: 18423511 NR Description: putative protein
MYADAGFAFAFAAAYSPTLTSSQPQPPPPPFDYAFSSEPPLLSMPAMDHDAYLGNLVQPSMVSEYDLGGEGDLFKAPEAIIEEPLLSLDPVAAAFSMMAGNGSAVMDQTIKDAGTGTIQNDPLLSEVLYECEKELMEKSTIEETISELMDVKIPMLQVEEIPSQAEQVLIQNQQLPAMEKEKQSVPECSLQKSVSSGCLNSADWMNGPARPNFLDFQGLDFEAAFGLRRAYSEGDIQNLGANTPRPAANVCVTISDLKTEERKQKLSRYRKKKIKRNFGRKIKYACRKALADSQPRVRGRFAKIEECDLLKPSK

SEQ ID NO: 18642 - protein, 271 aa, Zea mays subsp. mays
  peptide (1)..(271): Ceres Seq. ID no. 12383426
  misc_feature (224)..(263): Pfam Name: CCT motif Pfam Description: CCT motif
  misc_feature (147)..(263): Homolog of NCBI NO: 8843771 NR Description: gene_id:MYN8.3~pir||T02891~similar to unknown
  misc_feature (14)..(109): Homolog of NCBI NO: 21536819 NR Description: unknown [Arabidopsis thaliana]
  misc_feature (147)..(263): Homolog of NCBI NO: 21536819 NR Description: unknown [Arabidopsis thaliana]
  misc_feature (211)..(263): Homolog of NCBI NO: 26451419 NR Description: unknown protein [Arabidopsis thaliana]
  misc_feature (63)..(263): Homolog of NCBI NO: 15234310 NR Description: putative protein
  misc_feature (7)..(109): Homolog of NCBI NO: 8843771 NR Description: gene_id:MYN8.3~pir||T02891~similar to unknown
  misc_feature (63)..(263): Homolog of NCBI NO: 21593708 NR Description: unknown [Arabidopsis thaliana]
  misc_feature (184)..(263): Homolog of NCBI NO: 15238070 NR Description: putative protein; protein id: At5g41380.1
  misc_feature (7)..(109): Homolog of NCBI NO: 18423511 NR Description: putative protein
  misc_feature (147)..(263): Homolog of NCBI NO: 18423511 NR Description: putative protein
MPAMDHDAYLGNLVQPSMVSEYDLGGEGDLFKAPEAIIEEPLLSLDPVAAAFSMMAGNGSAVMDQTIKDAGTGTIQNDPLLSEVLYECEKELMEKSTIEETISELMDVKIPMLQVEEIPSQAEQVLIQNQQLPAMEKEKQSVPECSLQKSVSSGCLNSADWMNGPARPNFLDFQGLDFEAAFGLRRAYSEGDIQNLGANTPRPAANVCVTISDLKTEERKQKLSRYRKKKIKRNFGRKIKYACRKALADSQPRVRGRFAKIEECDLLKPSK

SEQ ID NO: 18643 - DNA, 1572 bp, Zea mays subsp. mays
  misc_feature (1)..(1572): Ceres Seq. ID no. 12368130
  misc_feature: MA Experiment ID: 108527 Result: Up-regulated in Transcription
  misc_feature: MA Experiment 108527 PARAMETER Experiment Name: Zm_5mM_NO_P Parameter: Age (day) Value: 8
  misc_feature: MA Experiment 108527 PARAMETER Experiment Name: Zm_5mM_NO_P Parameter: Organism Value: Zea mays
  misc_feature: MA Experiment 108527 PARAMETER Experiment Name: Zm_5mM_NO_P Parameter: Plant Line Value: 35A19
  misc_feature: MA Experiment 108527 PARAMETER Experiment Name: Zm_5mM_NO_P Parameter: Timepoint (hr) Value: 6
  misc_feature: MA Experiment 108527 PARAMETER Experiment Name: Zm_5mM_NO_P Parameter: Tissue Value: Aerial
  misc_feature: MA Experiment 108527 PARAMETER Experiment Name: Zm_5mM_NO_P Parameter: Treatment Value: 5mM NO vs. No Treatment
  misc_feature: MA Experiment ID: 108529 Result: Up-regulated in Transcription
  misc_feature: MA Experiment 108529 PARAMETER Experiment Name: Zm_Imbibed_Seeds_P Parameter: Age (day) Value: 5 vs. 2
  misc_feature: MA Experiment 108529 PARAMETER Experiment Name: Zm_Imbibed_Seeds_P Parameter: Organism Value: Zea mays
  misc_feature: MA Experiment 108529 PARAMETER Experiment Name: Zm_Imbibed_Seeds_P Parameter: Plant Line Value: 35A19
  misc_feature: MA Experiment 108529 PARAMETER Experiment Name: Zm_Imbibed_Seeds_P Parameter: Tissue Value: Roots vs. Embryo
  misc_feature: MA Experiment ID: 108533 Result: Up-regulated in Transcription
  misc_feature: MA Experiment 108533 PARAMETER Experiment Name: Zm_4deg_Cold_P Parameter: Age (hr) Value: 8
  misc_feature: MA Experiment 108533 PARAMETER Experiment Name: Zm_4deg_Cold_P Parameter: Organism Value: Zea mays
  misc_feature: MA Experiment 108533 PARAMETER Experiment Name: Zm_4deg_Cold_P Parameter: Plant Line Value: 35A19
  misc_feature: MA Experiment 108533 PARAMETER Experiment Name: Zm_4deg_Cold_P Parameter: Temperature (deg C) Value: 4 vs. 22
  misc_feature: MA Experiment 108533 PARAMETER Experiment Name: Zm_4deg_Cold_P Parameter: Timepoint (hr) Value: 1
  misc_feature: MA Experiment 108533 PARAMETER Experiment Name: Zm_4deg_Cold_P Parameter: Tissue Value: Aerial
  misc_feature: MA Experiment ID: 108534 Result: Up-regulated in Transcription
  misc_feature: MA Experiment 108534 PARAMETER Experiment Name: Zm_4deg_Cold_P Parameter: Age (hr) Value: 8
  misc_feature: MA Experiment 108534 PARAMETER Experiment Name: Zm_4deg_Cold_P Parameter: Organism Value: Zea mays
  misc_feature: MA Experiment 108534 PARAMETER Experiment Name: Zm_4deg_Cold_P Parameter: Plant Line Value: 35A19
  misc_feature: MA Experiment 108534 PARAMETER Experiment Name: Zm_4deg_Cold_P Parameter: Temperature (deg C) Value: 4 vs. 22
  misc_feature: MA Experiment 108534 PARAMETER Experiment Name: Zm_4deg_Cold_P Parameter: Timepoint (hr) Value: 6
  misc_feature: MA Experiment 108534 PARAMETER Experiment Name: Zm_4deg_Cold_P Parameter: Tissue Value: Aerial
  misc_feature: MA Experiment ID: 108535 Result: Down-regulated in Transcription
  misc_feature: MA Experiment 108535 PARAMETER Experiment Name: Zm_Meristem_P Parameter: Age (day) Value: 8
  misc_feature: MA Experiment 108535 PARAMETER Experiment Name: Zm_Meristem_P Parameter: Organism Value: Zea mays
  misc_feature: MA Experiment 108535 PARAMETER Experiment Name: Zm_Meristem_P Parameter: Plant Line Value: 35A19
  misc_feature: MA Experiment 108535 PARAMETER Experiment Name: Zm_Meristem_P Parameter: Tissue Value: Root Meristem vs. Above Root Meristem
  misc_feature: MA Experiment ID: 108556 Result: Down-regulated in Transcription
  misc_feature: MA Experiment 108556 PARAMETER Experiment Name: Zm_Drought_P Parameter: Age (day) Value: 9
  misc_feature: MA Experiment 108556 PARAMETER Experiment Name: Zm_Drought_P Parameter: Organism Value: Zea mays
  misc_feature: MA Experiment 108556 PARAMETER Experiment Name: Zm_Drought_P Parameter: Plant Line Value: 35A19
  misc_feature: MA Experiment 108556 PARAMETER Experiment Name: Zm_Drought_P Parameter: Timepoint (hr) Value: 24
  misc_feature: MA Experiment 108556 PARAMETER Experiment Name: Zm_Drought_P Parameter: Tissue Value: Aerial
  misc_feature: MA Experiment 108556 PARAMETER Experiment Name: Zm_Drought_P Parameter: Treatment Value: Drought vs. No Drought
  misc_feature: MA Experiment ID: 108688 Result: Down-regulated in Transcription
  misc_feature: MA Experiment 108688 PARAMETER Experiment Name: Zm_Embryos-Flowers__P Parameter: Tissue Value: Immature Flowers vs. Aerial+
  misc_feature: MA Experiment ID: 108689 Result: Down-regulated in Transcription
  misc_feature: MA Experiment 108689 PARAMETER Experiment Name: Zm_Drought_Roots_P Parameter: Age (day) Value: 9
  misc_feature: MA Experiment 108689 PARAMETER Experiment Name: Zm_Drought_Roots_P Parameter: Organism Value: Zea mays
  misc_feature: MA Experiment 108689 PARAMETER Experiment Name: Zm_Drought_Roots_P Parameter: Plant Line Value: 35A19
  misc_feature: MA Experiment 108689 PARAMETER Experiment Name: Zm_Drought_Roots_P Parameter: Timepoint (hr) Value: 24
  misc_feature: MA Experiment 108689 PARAMETER Experiment Name: Zm_Drought_Roots_P Parameter: Tissue Value: Roots
  misc_feature: MA Experiment 108689 PARAMETER Experiment Name: Zm_Drought_Roots_P Parameter: Treatment Value: Drought vs. No Drought
  misc_feature: MA Experiment ID: 20000108 Result: Down-regulated in Transcription
  misc_feature: MA Experiment 20000108 PARAMETER Experiment Name: Zm_Root-Tips_P Parameter: Age (day) Value: 12
  misc_feature: MA Experiment 20000108 PARAMETER Experiment Name: Zm_Root-Tips_P Parameter: Organism Value: Zea mays
  misc_feature: MA Experiment 20000108 PARAMETER Experiment Name: Zm_Root-Tips_P Parameter: Tissue Value: Root tips vs. Root mid region    35
  misc_feature: MA Experiment 20000108 PARAMETER Experiment Name: Zm_Root-Tips_P Parameter: Tissue Value: Root tips vs. Root mid region   Sequence Listing-Misc Features (4)
  misc_feature: MA Experiment ID: 20000487 Result: Down-regulated in Transcription
  misc_feature: MA Experiment 20000487 PARAMETER Experiment Name: Zm_50mM_NH4NO3_L_to_H_P Parameter: Organism Value: Zea mays
  misc_feature: MA Experiment 20000487 PARAMETER Experiment Name: Zm_50mM_NH4NO3_L_to_H_P Parameter: Timepoint (hr) Value: 4
  misc_feature: MA Experiment 20000487 PARAMETER Experiment Name: Zm_50mM_NH4NO3_L_to_H_P Parameter: Tissue Value: Leaves
  misc_feature: MA Experiment 20000487 PARAMETER Experiment Name: Zm_50mM_NH4NO3_L_to_H_P Parameter: Treatment Value: 50mM NH4NO3 vs. 100mM Mannitol
  misc_feature: MA Experiment ID: 20000532 Result: Up-regulated in Transcription
  misc_feature: MA Experiment 20000532 PARAMETER Experiment Name: Zm_0.001percent_MeJA_P Parameter: Age (day) Value: 10
  misc_feature: MA Experiment 20000532 PARAMETER Experiment Name: Zm_0.001percent_MeJA_P Parameter: Organism Value: Zea mays
  misc_feature: MA Experiment 20000532 PARAMETER Experiment Name: Zm_0.001percent_MeJA_P Parameter: Plant Line Value: 35A19
  misc_feature: MA Experiment 20000532 PARAMETER Experiment Name: Zm_0.001percent_MeJA_P Parameter: Timepoint (hr) Value: 48
  misc_feature: MA Experiment 20000532 PARAMETER Experiment Name: Zm_0.001percent_MeJA_P Parameter: Tissue Value: Aerial
  misc_feature: MA Experiment 20000532 PARAMETER Experiment Name: Zm_0.001percent_MeJA_P Parameter: Treatment Value: 0.001percent MeJA vs. No Treatment
  misc_feature: MA Experiment ID: 20000535 Result: Down-regulated in Transcription
  misc_feature: MA Experiment 20000535 PARAMETER Experiment Name: Zm_Hybrid_Seed_Dev_P Parameter: DAP Value: 30 vs. 12
  misc_feature: MA Experiment 20000535 PARAMETER Experiment Name: Zm_Hybrid_Seed_Dev_P Parameter: Organism Value: Zea mays
  misc_feature: MA Experiment 20000535 PARAMETER Experiment Name: Zm_Hybrid_Seed_Dev_P Parameter: Plant Line Value: 35A19
  misc_feature: MA Experiment 20000535 PARAMETER Experiment Name: Zm_Hybrid_Seed_Dev_P Parameter: Tissue Value: Embryo vs. Unfert Floret
  misc_feature: MA Experiment ID: 20001608 Result: Down-regulated in Transcription
  misc_feature: MA Experiment 20001608 PARAMETER Experiment Name: Zm_50ppm_KNO3_L-to-H_P Parameter: Age (day) Value: 21
  misc_feature: MA Experiment 20001608 PARAMETER Experiment Name: Zm_50ppm_KNO3_L-to-H_P Parameter: Organism Value: Zea mays
  misc_feature: MA Experiment 20001608 PARAMETER Experiment Name: Zm_50ppm_KNO3_L-to-H_P Parameter: Plant Line Value: 35A19
  misc_feature: MA Experiment 20001608 PARAMETER Experiment Name: Zm_50ppm_KNO3_L-to-H_P Parameter: Timepoint (hr) Value: 48
  misc_feature: MA Experiment 20001608 PARAMETER Experiment Name: Zm_50ppm_KNO3_L-to-H_P Parameter: Tissue Value: Shoots
  misc_feature: MA Experiment 20001608 PARAMETER Experiment Name: Zm_50ppm_KNO3_L-to-H_P Parameter: Treatment Value: 50ppm KNO3 vs. 50ppm KCl
aaaaaccaagaaacagctgaggcggagaggtagctacctgagccaatcggtgtcgcaatggctgcagcgggtatcaccagggcgccgccgatcgggcagaatccgaggctcgcgtgctacgccccgaggaggggcggagggcgtggtgaggtgctcgttgcagggcgcggtcgtcggcggccgggcggagtggcagagcagctgcgccgtgctgtccagcaaggtggccgcgctcggtacgcactccgtcaacggccacgtcgcgccggcgccgactcagaacggggcggtgctggatttggtccccgtgagtagtagtagtatcaatggcgccatcaccaagaacctgccgcagccgcttcgcatcgcggacctgtccccggcaccgatgcacgggtcgcagctgcgcgtggcctaccagggcgtgcccggcgcgtacagcgagaaggcggccgggaaggcgtacccgggctgcgacgccatcccctgcgaccagttcgaggtggcgttccaggccgtggagctgtggatcgcggaccgcgccgtgctccccgtggagaactcgctgggcggcagcatccaccgcaactacgacctgctgctccggcaccggctccacatcgtcggggaggtgcagctccccgtgcaccactgcctgctggcgctgcccggggtgcgcaaggagtgcctgacccgcgtgatcagccacccgcaggcgctggcgcagtgcgagcacacgctcacggccatgggcctcaacgtcgtccgcgaggccttcgacgacacggccggcgccgccgagtacgtggccgccaacggcctccgcgacacggccgccatcgcgtcctcccgcgccgccgagctgtacgggatggaggtgctcgcggacggcatccaggacgactccggcaacgtcacccgcttcgtgatgctggcccgggagcccgtcgtgccgcgcaccgaccgccccttcaagaccagcatcgtgttcgcgcacgacagggagggcacctccgtgctcttcaaggtgctctccgccttcgccttccgcgacatctcgctcaccaagatcgagagcaggccgcaccgccaccgccccatccgcctcgtcgacgacgccaacgtcggcaccgccaagcacttcgagtacatgttctacgtcgacttccaggcgtccctcgcagagccccgcgcgcagaacgcgctggccgaggtccaggagtacacgtccttcctccgggtgctcgggagctaccccatggacatgacccccatgaccgccggctcctcctccaccgttgtttcctcgtccgatgatccctcgtcgtcttgattgccgttggaggctggagctagctccgaggagaagtcgtcgagtagggacgttggttttctgctcatgtcgtcctactcgatcgcccctcgctgcagccggagtagttaattttgagtttcctttaatctttcatggtaatagtattatgtacgtgtaattgttcaaaatcatccgcggtgaatatatctgtgaaacagtactacatgacattcataatttcatattaatcagttttc

SEQ ID NO: 18644 - protein, 443 aa, Zea mays subsp. mays
  peptide (1)..(443): Ceres Seq. ID no. 12368131
  misc_feature (137)..(316): Pfam Name: Prephenate dehydratase Pfam Description: Prephenate dehydratase
  misc_feature (116)..(423): Homolog of NCBI NO: 15231489 NR Description: putative P-protein: chorismate mutase, prephenate
  misc_feature (116)..(422): Homolog of NCBI NO: 14596233 NR Description: Unknown protein [Arabidopsis thaliana]
  misc_feature (116)..(422): Homolog of NCBI NO: 15221096 NR Description: putative chloroplast prephenate dehydratase
  misc_feature (102)..(423): Homolog of NCBI NO: 34394031 NR Description: putative prephenate dehydratase
  misc_feature (28)..(433): Homolog of NCBI NO: 15242928 NR Description: chorismate mutase/prephenate dehydratase-like
  misc_feature (52)..(430): Homolog of NCBI NO: 15230489 NR Description: putative chloroplast prephenate dehydratase
  misc_feature (62)..(436): Homolog of NCBI NO: 21593283 NR Description: putative chorismate mutase/prephenate dehydratase
  misc_feature (62)..(436): Homolog of NCBI NO: 15226259 NR Description: putative chorismate mutase/prephenate dehydratase
  misc_feature (60)..(432): Homolog of NCBI NO: 18390869 NR Description: expressed protein
  misc_feature (44)..(443): Homolog of NCBI NO: 38347597 NR Description: OSJNBa0042I15.10 [Oryza sativa (japonica
KTKKQLRRRGSYLSQSVSQWLQRVSPGRRRSGRIRGSRATPRGGAEGVVRCSLQGAVVGGRAEWQSSCAVLSSKVAALGTHSVNGHVAPAPTQNGAVLDLVPVSSSSINGAITKNLPQPLRIADLSPAPMHGSQLRVAYQGVPGAYSEKAAGKAYPGCDAIPCDQFEVAFQAVELWIADRAVLPVENSLGGSIHRNYDLLLRHRLHIVGEVQLPVHHCLLALPGVRKECLTRVISHPQALAQCEHTLTAMGLNVVREAFDDTAGAAEYVAANGLRDTAAIASSRAAELYGMEVLADGIQDDSGNVTRFVMLAREPVVPRTDRPFKTSIVFAHDREGTSVLFKVLSAFAFRDISLTKIESRPHRHRPIRLVDDANVGTAKHFEYMFYVDFQASLAEPRAQNALAEVQEYTSFLRVLGSYPMDMTPMTAGSSSTVVSSSDDPSSS

SEQ ID NO: 18645 - protein, 314 aa, Zea mays subsp. mays
  peptide (1)..(314): Ceres Seq. ID no. 12368132
  misc_feature (8)..(187): Pfam Name: Prephenate dehydratase Pfam Description: Prephenate dehydratase
  misc_feature (1)..(294): Homolog of NCBI NO: 15231489 NR Description: putative P-protein: chorismate mutase, prephenate
  misc_feature (1)..(293): Homolog of NCBI NO: 14596233 NR Description: Unknown protein [Arabidopsis thaliana]
  misc_feature (1)..(293): Homolog of NCBI NO: 15221096 NR Description: putative chloroplast prephenate dehydratase
  misc_feature (1)..(294): Homolog of NCBI NO: 34394031 NR Description: putative prephenate dehydratase
  misc_feature (1)..(304): Homolog of NCBI NO: 15242928 NR Description: chorismate mutase/prephenate dehydratase-like
  misc_feature (1)..(301): Homolog of NCBI NO: 15230489 NR Description: putative chloroplast prephenate dehydratase
  misc_feature (1)..(307): Homolog of NCBI NO: 21593283 NR Description: putative chorismate mutase/prephenate dehydratase
  misc_feature (1)..(307): Homolog of NCBI NO: 15226259 NR Description: putative chorismate mutase/prephenate dehydratase
  misc_feature (1)..(303): Homolog of NCBI NO: 18390869 NR Description: expressed protein
  misc_feature (1)..(314): Homolog of NCBI NO: 38347597 NR Description: OSJNBa0042I15.10 [Oryza sativa (japonica
MHGSQLRVAYQGVPGAYSEKAAGKAYPGCDAIPCDQFEVAFQAVELWIADRAVLPVENSLGGSIHRNYDLLLRHRLHIVGEVQLPVHHCLLALPGVRKECLTRVISHPQALAQCEHTLTAMGLNVVREAFDDTAGAAEYVAANGLRDTAAIASSRAAELYGMEVLADGIQDDSGNVTRFVMLAREPVVPRTDRPFKTSIVFAHDREGTSVLFKVLSAFAFRDISLTKIESRPHRHRPIRLVDDANVGTAKHFEYMFYVDFQASLAEPRAQNALAEVQEYTSFLRVLGSYPMDMTPMTAGSSSTVVSSSDDPSSS

SEQ ID NO: 18646 - DNA, 934 bp, Zea mays subsp. mays
  misc_feature (1)..(934): Ceres Seq. ID no. 14305241
  misc_feature: MA Experiment ID: 108529 Result: Up-regulated in Transcription
  misc_feature: MA Experiment 108529 PARAMETER Experiment Name: Zm_Imbibed_Seeds_P Parameter: Age (day) Value: 5 vs. 2
  misc_feature: MA Experiment 108529 PARAMETER Experiment Name: Zm_Imbibed_Seeds_P Parameter: Organism Value: Zea mays
  misc_feature: MA Experiment 108529 PARAMETER Experiment Name: Zm_Imbibed_Seeds_P Parameter: Plant Line Value: 35A19
  misc_feature: MA Experiment 108529 PARAMETER Experiment Name: Zm_Imbibed_Seeds_P Parameter: Tissue Value: Roots vs. Embryo
  misc_feature: MA Experiment ID: 108532 Result: Up-regulated in Transcription
  misc_feature: MA Experiment 108532 PARAMETER Experiment Name: Zm_20uM_KNO3_H-to-L_P Parameter: Age (day) Value: 11
  misc_feature: MA Experiment 108532 PARAMETER Experiment Name: Zm_20uM_KNO3_H-to-L_P Parameter: Organism Value: Zea mays
  misc_feature: MA Experiment 108532 PARAMETER Experiment Name: Zm_20uM_KNO3_H-to-L_P Parameter: Plant Line Value: 35A19
  misc_feature: MA Experiment 108532 PARAMETER Experiment Name: Zm_20uM_KNO3_H-to-L_P Parameter: Timepoint (hr) Value: 16
  misc_feature: MA Experiment 108532 PARAMETER Experiment Name: Zm_20uM_KNO3_H-to-L_P Parameter: Tissue Value: Roots
  misc_feature: MA Experiment 108532 PARAMETER Experiment Name: Zm_20uM_KNO3_H-to-L_P Parameter: Treatment Value: 20uM KNO3 vs. 60mM KNO3
  misc_feature: MA Experiment ID: 108535 Result: Down-regulated in Transcription
  misc_feature: MA Experiment 108535 PARAMETER Experiment Name: Zm_Meristem_P Parameter: Age (day) Value: 8
  misc_feature: MA Experiment 108535 PARAMETER Experiment Name: Zm_Meristem_P Parameter: Organism Value: Zea mays
  misc_feature: MA Experiment 108535 PARAMETER Experiment Name: Zm_Meristem_P Parameter: Plant Line Value: 35A19
  misc_feature: MA Experiment 108535 PARAMETER Experiment Name: Zm_Meristem_P Parameter: Tissue Value: Root Meristem vs. Above Root Meristem
  misc_feature: MA Experiment ID: 20000487 Result: Up-regulated in Transcription
  misc_feature: MA Experiment 20000487 PARAMETER Experiment Name: Zm_50mM_NH4NO3_L_to_H_P Parameter: Organism Value: Zea mays
  misc_feature: MA Experiment 20000487 PARAMETER Experiment Name: Zm_50mM_NH4NO3_L_to_H_P Parameter: Timepoint (hr) Value: 4
  misc_feature: MA Experiment 20000487 PARAMETER Experiment Name: Zm_50mM_NH4NO3_L_to_H_P Parameter: Tissue Value: Leaves
  misc_feature: MA Experiment 20000487 PARAMETER Experiment Name: Zm_50mM_NH4NO3_L_to_H_P Parameter: Treatment Value: 50mM NH4NO3 vs. 100mM Mannitol
  misc_feature: MA Experiment ID: 20000535 Result: Up-regulated in Transcription
  misc_feature: MA Experiment 20000535 PARAMETER Experiment Name: Zm_Hybrid_Seed_Dev_P Parameter: DAP Value: 30 vs. 12
  misc_feature: MA Experiment 20000535 PARAMETER Experiment Name: Zm_Hybrid_Seed_Dev_P Parameter: Organism Value: Zea mays
  misc_feature: MA Experiment 20000535 PARAMETER Experiment Name: Zm_Hybrid_Seed_Dev_P Parameter: Plant Line Value: 35A19
  misc_feature: MA Experiment 20000535 PARAMETER Experiment Name: Zm_Hybrid_Seed_Dev_P Parameter: Tissue Value: Embryo vs. Unfert Floret
agagaatacaggggagaagccgagagccgaacgaagagaccgagcccccgccgcccgcggcgtctgttcctttcgtgccgcttcgtggtggcgccgtggcgcccaccaccacctcacctctcagtctctcaccacctatagcaataccacgagtccacgatccatggaatagactagactacaccgctcggccggtgacgacgacggcgacagccgacagtctatccccaactacgctctgcaccagcgccttatccgccgcctggggtttgttctggcgcggtggcagttgataaaggcgggagggattagagcaaggagagggatcggcgatgagcttcgcggatctggaggcgggggctctcagggcgcccctcgggaggaaagcgagaggggggccaaacgacgcgagagcgctcgtcttccagataaccaccgcggtggcctcgtaccgccgcctcctcaactcgctcggcacgcccaaggacaccatcacgcttcgtgataacctgcataagactagtcagaacatccttcaattagcaaaggatgcgaaagataagctccaaaaggctgctgaagcagacaagagcactgatacaagtgcagacaagaggatagctgatatgaagcttgccaaagattttgctgccacaatggaggagttcaggaaacttcagagtcttgcgattcagagggagacggcatataagccagttgttccacagaatacgcagtcaaactattctacagatgagcgaagttccgaatctggtaatatgcctgagcagcgtgcattactcgctgaatcaatgagacaagaggtgctgcaattggacaatgaaattgtttacaatgaagctataattgaggaaagggagcaagccattcaagatatccaacagcagattggtgaagtacatgaagtgttcaa

SEQ ID NO: 18647 - protein, 200 aa, Zea mays subsp. mays
  peptide (1)..(200): Ceres Seq. ID no. 14305242
  misc_feature (16)..(113): Pfam Name: Syntaxin Pfam Description: Syntaxin
MSFADLEAGALRAPLGRKARGGPNDARALVFQITTAVASYRRLLNSLGTPKDTITLRDNLHKTSQNILQLAKDAKDKLQKAAEADKSTDTSADKRIADMKLAKDFAATMEEFRKLQSLAIQRETAYKPVVPQNTQSNYSTDERSSESGNMPEQRALLAESMRQEVLQLDNEIVYNEAIIEEREQAIQDIQQQIGEVHEVF

SEQ ID NO: 18648 - protein, 102 aa, Zea mays subsp. mays
  peptide (1)..(102): Ceres Seq. ID no. 14305243
MKLAKDFAATMEEFRKLQSLAIQRETAYKPVVPQNTQSNYSTDERSSESGNMPEQRALLAESMRQEVLQLDNEIVYNEAIIEEREQAIQDIQQQIGEVHEVF

SEQ ID NO: 18649 - DNA, 1978 bp, Zea mays subsp. mays
  misc_feature (1)..(1978): Ceres Seq. ID no. 12387736
  misc_feature: MA Experiment ID: 108528 Result: Up-regulated in Transcription
  misc_feature: MA Experiment 108528 PARAMETER Experiment Name: Zm_Imbibed_Seeds_P Parameter: Age (day) Value: 5 vs. 2
  misc_feature: MA Experiment 108528 PARAMETER Experiment Name: Zm_Imbibed_Seeds_P Parameter: Organism Value: Zea mays
  misc_feature: MA Experiment 108528 PARAMETER Experiment Name: Zm_Imbibed_Seeds_P Parameter: Plant Line Value: 35A19
  misc_feature: MA Experiment 108528 PARAMETER Experiment Name: Zm_Imbibed_Seeds_P Parameter: Tissue Value: Aerial vs. Embryo
  misc_feature: MA Experiment ID: 108529 Result: Down-regulated in Transcription
  misc_feature: MA Experiment 108529 PARAMETER Experiment Name: Zm_Imbibed_Seeds_P Parameter: Age (day) Value: 5 vs. 2
  misc_feature: MA Experiment 108529 PARAMETER Experiment Name: Zm_Imbibed_Seeds_P Parameter: Organism Value: Zea mays
  misc_feature: MA Experiment 108529 PARAMETER Experiment Name: Zm_Imbibed_Seeds_P Parameter: Plant Line Value: 35A19
  misc_feature: MA Experiment 108529 PARAMETER Experiment Name: Zm_Imbibed_Seeds_P Parameter: Tissue Value: Roots vs. Embryo
  misc_feature: MA Experiment ID: 108530 Result: Up-regulated in Transcription
  misc_feature: MA Experiment 108530 PARAMETER Experiment Name: Zm_Imbibed_Seeds_P Parameter: Age (day) Value: 6 vs. 2
  misc_feature: MA Experiment 108530 PARAMETER Experiment Name: Zm_Imbibed_Seeds_P Parameter: Organism Value: Zea mays
  misc_feature: MA Experiment 108530 PARAMETER Experiment Name: Zm_Imbibed_Seeds_P Parameter: Plant Line Value: 35A19
  misc_feature: MA Experiment 108530 PARAMETER Experiment Name: Zm_Imbibed_Seeds_P Parameter: Tissue Value: Aerial vs. Embryo
  misc_feature: MA Experiment ID: 108543 Result: Down-regulated in Transcription
  misc_feature: MA Experiment ID: 108545 Result: Up-regulated in Transcription
  misc_feature: MA Experiment 108545 PARAMETER Experiment Name: Zm_Imbibed_Seeds_P Parameter: Age (day) Value: 3 vs. 2
  misc_feature: MA Experiment 108545 PARAMETER Experiment Name: Zm_Imbibed_Seeds_P Parameter: Organism Value: Zea mays
  misc_feature: MA Experiment 108545 PARAMETER Experiment Name: Zm_Imbibed_Seeds_P Parameter: Plant Line Value: 35A19
  misc_feature: MA Experiment 108545 PARAMETER Experiment Name: Zm_Imbibed_Seeds_P Parameter: Tissue Value: Aerial vs. Embryo
  misc_feature: MA Experiment ID: 108546 Result: Down-regulated in Transcription
  misc_feature: MA Experiment 108546 PARAMETER Experiment Name: Zm_Imbibed_Seeds_P Parameter: Age (day) Value: 3 vs. 2
  misc_feature: MA Experiment 108546 PARAMETER Experiment Name: Zm_Imbibed_Seeds_P Parameter: Organism Value: Zea mays
  misc_feature: MA Experiment 108546 PARAMETER Experiment Name: Zm_Imbibed_Seeds_P Parameter: Plant Line Value: 35A19
  misc_feature: MA Experiment 108546 PARAMETER Experiment Name: Zm_Imbibed_Seeds_P Parameter: Tissue Value: Roots vs. Embryo
  misc_feature: MA Experiment ID: 108547 Result: Up-regulated in Transcription
  misc_feature: MA Experiment 108547 PARAMETER Experiment Name: Zm_Imbibed_Seeds_P Parameter: Age (day) Value: 4 vs. 2
  misc_feature: MA Experiment 108547 PARAMETER Experiment Name: Zm_Imbibed_Seeds_P Parameter: Organism Value: Zea mays
  misc_feature: MA Experiment 108547 PARAMETER Experiment Name: Zm_Imbibed_Seeds_P Parameter: Plant Line Value: 35A19
  misc_feature: MA Experiment 108547 PARAMETER Experiment Name: Zm_Imbibed_Seeds_P Parameter: Tissue Value: Aerial vs. Embryo
  misc_feature: MA Experiment ID: 108687 Result: Down-regulated in Transcription
  misc_feature: MA Experiment 108687 PARAMETER Experiment Name: Zm_Embryos-Flowers__P Parameter: Tissue Value: Embryo vs. Aerial+
  misc_feature: MA Experiment ID: 20000480 Result: Down-regulated in Transcription
  misc_feature: MA Experiment 20000480 PARAMETER Experiment Name: Zm_Drought_P Parameter: Age (day) Value: 11
  misc_feature: MA Experiment 20000480 PARAMETER Experiment Name: Zm_Drought_P Parameter: Organism Value: Zea mays
  misc_feature: MA Experiment 20000480 PARAMETER Experiment Name: Zm_Drought_P Parameter: Plant Line Value: 35A19
  misc_feature: MA Experiment 20000480 PARAMETER Experiment Name: Zm_Drought_P Parameter: Timepoint (hr) Value: 72
  misc_feature: MA Experiment 20000480 PARAMETER Experiment Name: Zm_Drought_P Parameter: Tissue Value: Aerial
  misc_feature: MA Experiment 20000480 PARAMETER Experiment Name: Zm_Drought_P Parameter: Treatment Value: Drought vs. No Drought
  misc_feature: MA Experiment ID: 20000535 Result: Down-regulated in Transcription
  misc_feature: MA Experiment 20000535 PARAMETER Experiment Name: Zm_Hybrid_Seed_Dev_P Parameter: DAP Value: 30 vs. 12
  misc_feature: MA Experiment 20000535 PARAMETER Experiment Name: Zm_Hybrid_Seed_Dev_P Parameter: Organism Value: Zea mays
  misc_feature: MA Experiment 20000535 PARAMETER Experiment Name: Zm_Hybrid_Seed_Dev_P Parameter: Plant Line Value: 35A19
  misc_feature: MA Experiment 20000535 PARAMETER Experiment Name: Zm_Hybrid_Seed_Dev_P Parameter: Tissue Value: Embryo vs. Unfert Floret
gcacgagaccattacctagaacatcctaatcaaaaattccattccactttccaccatggcttccctctgcgtccaccatacctcgctaccactctccccgccccaccaggtcaccgtccccgaaccctctcgcgcgctgcccccatcctcgcgcctccccgccctgccgtcctcctccaaccatgtcagcgcgctccctcgacccgcggcggcttccttcgccttcgcgtgccactgcaaagcaccggtgcgggaccacgacgctgagctcctccgcgctctacggtccaacggcaacggcaccctccacggggacacagcactgccgcaagtgctcgactcgcgctccgacggaccgggcggcgacggcagcagcaagaggtcgcgtttctgcgcccgggattgcgcgaagcggatcatggagctgcccgtggaggagcgggtgaaggtgctcgacctcttgcagcgcgacgacgcggcgctcaccgtctccgattacaacgacatcctttcggcgctggctcgcgcgggagaccacgccacggccgtcgctctgttccgcgccatgcccgtcgcccccgacgcacactccttcgccaccgccgtgcagtgcctctgccgacagggcgcgcccgacgaggccaagctcgcgctcgacgagatggtggcgcgcgggttccgccccagcgttgccacgttctcagccgttgtggggtgcctctgcaagcgcggacgcgtcaccaaggccatggaggtgttggacgccatgctcggcctcgggtgcgagcctaccatccgcacgtacaacagcctcgtcggtgggctctgctacgtcggccggctggaggaggcgctcgaactcctcaagaagctcaaggactcgcccctgacgcctgacatctacaccttcaccatcgtgctcgacggattctgtaaggtcgggcggacggaggaggccacggccatcttccacgatgcgatcgggatgggcctctcgccgacgacattcacgtacaacgcgctcttgaacggccactgcaaggagggaaacccgctcaaagcgttcgcgctgctcatggagatgtgcggcaataacgacgccgcctgcctgccagacaagaccagcttcgggatcgtgctgacggcgctgctccgcgccggcgagacctcagcggcgtggcagacgtacaagcggatggagcgcgctgggttcgaggtggacgggcgcgcgctggacacgctggctcggggcctgtgccggcggtgcgcgacggacgcctcggccctcggcgacgcggaggaggtgttcggcaaggtagtggcttcgggccacgagccggtgtcctacacgtactgcctgatggcgcaggcgctggcgcgcggcggcgaggtggacgcggccgtggcgctcctggaggacatggtgcgcaagggatacgcgctgcggaagcgcgcctacacggacgtggtgcgcgcgctctgtgaccgtggcagggcccgcgacgcgctgcaggtgcttgtgcttgtgatgatcgtgagggacttcgtgccgggacggaacgcgttcgaagcgctcctgggagagctgagccggcaggggcggtgggctgacgccatgaccgtgtacgccgccgctgtgaagcgaggcgtggtggtctcgtggaagcacctcggcagagaggcgcactcaccggaggagcccattcggctgggcgtccctgtcccgcagtgaccgtttgtctggggctctgggcgcggccgggatcaccatctttctgagcccattcggcttgcgttctgtttccgatgctgtagacggaaaattctgccagtttggaccgcttgcagatggcactgaggaacaagcgtagctgatggttcaggtattcgcgttgtcgctaattttcgtgacactcaccgcaaatgtaccgaaattatgtaaatcatttctgcttctacgtaaatcatctctgcttct

SEQ ID NO: 18650 - protein, 558 aa, Zea mays subsp. mays
  peptide (1)..(558): Ceres Seq. ID no. 12387737
  misc_feature (73)..(524): Homolog of NCBI NO: 34906814 NR Description: similar to membrane-associated salt-inducible
  misc_feature (145)..(532): Homolog of NCBI NO: 15221232 NR Description: putative indole-3-acetate beta-glucosyltransferase
  misc_feature (175)..(554): Homolog of NCBI NO: 15231863 NR Description: putative protein
  misc_feature (121)..(539): Homolog of NCBI NO: 37533554 NR Description: putative PPR-repeat protein
  misc_feature (175)..(532): Homolog of NCBI NO: 15237575 NR Description: salt-inducible protein-like; protein id:
  misc_feature (126)..(499): Homolog of NCBI NO: 15231863 NR Description: putative protein
  misc_feature (26)..(537): Homolog of NCBI NO: 34015356 NR Description: putative fertility restorer
  misc_feature (175)..(531): Homolog of NCBI NO: 34896698 NR Description: putative pentatricopeptide repeat protein
  misc_feature (131)..(486): Homolog of NCBI NO: 15218325 NR Description: hypothetical protein; protein id: At1g09900.1
  misc_feature (117)..(487): Homolog of NCBI NO: 34910106 NR Description: B1100D10.28 [Oryza sativa (japonica
MASLCVHHTSLPLSPPHQVTVPEPSRALPPSSRLPALPSSSNHVSALPRPAAASFAFACHCKAPVRDHDAELLRALRSNGNGTLHGDTALPQVLDSRSDGPGGDGSSKRSRFCARDCAKRIMELPVEERVKVLDLLQRDDAALTVSDYNDILSALARAGDHATAVALFRAMPVAPDAHSFATAVQCLCRQGAPDEAKLALDEMVARGFRPSVATFSAVVGCLCKRGRVTKAMEVLDAMLGLGCEPTIRTYNSLVGGLCYVGRLEEALELLKKLKDSPLTPDIYTFTIVLDGFCKVGRTEEATAIFHDAIGMGLSPTTFTYNALLNGHCKEGNPLKAFALLMEMCGNNDAACLPDKTSFGIVLTALLRAGETSAAWQTYKRMERAGFEVDGRALDTLARGLCRRCATDASALGDAEEVFGKVVASGHEPVSYTYCLMAQALARGGEVDAAVALLEDMVRKGYALRKRAYTDVVRALCDRGRARDALQVLVLVMIVRDFVPGRNAFEALLGELSRQGRWADAMTVYAAAVKRGVVVSWKHLGREAHSPEEPIRLGVPVPQ

SEQ ID NO: 18651 - protein, 437 aa, Zea mays subsp. mays
  peptide (1)..(437): Ceres Seq. ID no. 12387738
  misc_feature (1)..(403): Homolog of NCBI NO: 34906814 NR Description: similar to membrane-associated salt-inducible
  misc_feature (24)..(411): Homolog of NCBI NO: 15221232 NR Description: putative indole-3-acetate beta-glucosyltransferase
  misc_feature (54)..(433): Homolog of NCBI NO: 15231863 NR Description: putative protein
  misc_feature (1)..(418): Homolog of NCBI NO: 37533554 NR Description: putative PPR-repeat protein
  misc_feature (54)..(411): Homolog of NCBI NO: 15237575 NR Description: salt-inducible protein-like; protein id:
  misc_feature (5)..(378): Homolog of NCBI NO: 15231863 NR Description: putative protein
  misc_feature (1)..(416): Homolog of NCBI NO: 34015356 NR Description: putative fertility restorer
  misc_feature (54)..(410): Homolog of NCBI NO: 34896698 NR Description: putative pentatricopeptide repeat protein
  misc_feature (10)..(365): Homolog of NCBI NO: 15218325 NR Description: hypothetical protein; protein id: At1g09900.1
  misc_feature (1)..(366): Homolog of NCBI NO: 34910106 NR Description: B1100D10.28 [Oryza sativa (japonica
MELPVEERVKVLDLLQRDDAALTVSDYNDILSALARAGDHATAVALFRAMPVAPDAHSFATAVQCLCRQGAPDEAKLALDEMVARGFRPSVATFSAVVGCLCKRGRVTKAMEVLDAMLGLGCEPTIRTYNSLVGGLCYVGRLEEALELLKKLKDSPLTPDIYTFTIVLDGFCKVGRTEEATAIFHDAIGMGLSPTTFTYNALLNGHCKEGNPLKAFALLMEMCGNNDAACLPDKTSFGIVLTALLRAGETSAAWQTYKRMERAGFEVDGRALDTLARGLCRRCATDASALGDAEEVFGKVVASGHEPVSYTYCLMAQALARGGEVDAAVALLEDMVRKGYALRKRAYTDVVRALCDRGRARDALQVLVLVMIVRDFVPGRNAFEALLGELSRQGRWADAMTVYAAAVKRGVVVSWKHLGREAHSPEEPIRLGVPVPQ

SEQ ID NO: 18652 - protein, 388 aa, Zea mays subsp. mays
  peptide (1)..(388): Ceres Seq. ID no. 12387739
  misc_feature (1)..(354): Homolog of NCBI NO: 34906814 NR Description: similar to membrane-associated salt-inducible
  misc_feature (1)..(362): Homolog of NCBI NO: 15221232 NR Description: putative indole-3-acetate beta-glucosyltransferase
  misc_feature (5)..(384): Homolog of NCBI NO: 15231863 NR Description: putative protein
  misc_feature (1)..(369): Homolog of NCBI NO: 37533554 NR Description: putative PPR-repeat protein
  misc_feature (5)..(362): Homolog of NCBI NO: 15237575 NR Description: salt-inducible protein-like; protein id:
  misc_feature (1)..(329): Homolog of NCBI NO: 15231863 NR Description: putative protein
  misc_feature (1)..(367): Homolog of NCBI NO: 34015356 NR Description: putative fertility restorer
  misc_feature (5)..(361): Homolog of NCBI NO: 34896698 NR Description: putative pentatricopeptide repeat protein
  misc_feature (1)..(316): Homolog of NCBI NO: 15218325 NR Description: hypothetical protein; protein id: At1g09900.1
  misc_feature (1)..(317): Homolog of NCBI NO: 34910106 NR Description: B1100D10.28 [Oryza sativa (japonica
MPVAPDAHSFATAVQCLCRQGAPDEAKLALDEMVARGFRPSVATFSAVVGCLCKRGRVTKAMEVLDAMLGLGCEPTIRTYNSLVGGLCYVGRLEEALELLKKLKDSPLTPDIYTFTIVLDGFCKVGRTEEATAIFHDAIGMGLSPTTFTYNALLNGHCKEGNPLKAFALLMEMCGNNDAACLPDKTSFGIVLTALLRAGETSAAWQTYKRMERAGFEVDGRALDTLARGLCRRCATDASALGDAEEVFGKVVASGHEPVSYTYCLMAQALARGGEVDAAVALLEDMVRKGYALRKRAYTDVVRALCDRGRARDALQVLVLVMIVRDFVPGRNAFEALLGELSRQGRWADAMTVYAAAVKRGVVVSWKHLGREAHSPEEPIRLGVPVPQ

SEQ ID NO: 18653 - DNA, 458 bp, Zea mays subsp. mays
  misc_feature (1)..(458): Ceres Seq. ID no. 5006268
  misc_feature: MA Experiment ID: 108522 Result: Up-regulated in Transcription
  misc_feature: MA Experiment 108522 PARAMETER Experiment Name: Zm_42deg_Heat_P Parameter: Age (day) Value: 8
  misc_feature: MA Experiment 108522 PARAMETER Experiment Name: Zm_42deg_Heat_P Parameter: Organism Value: Zea mays
  misc_feature: MA Experiment 108522 PARAMETER Experiment Name: Zm_42deg_Heat_P Parameter: Plant Line Value: 35A19
  misc_feature: MA Experiment 108522 PARAMETER Experiment Name: Zm_42deg_Heat_P Parameter: Temperature (deg C) Value: 42 vs. 22
  misc_feature: MA Experiment 108522 PARAMETER Experiment Name: Zm_42deg_Heat_P Parameter: Timepoint (hr) Value: 1
  misc_feature: MA Experiment 108522 PARAMETER Experiment Name: Zm_42deg_Heat_P Parameter: Tissue Value: Aerial
  misc_feature: MA Experiment ID: 108523 Result: Up-regulated in Transcription
  misc_feature: MA Experiment 108523 PARAMETER Experiment Name: Zm_42deg_Heat_P Parameter: Age (day) Value: 8
  misc_feature: MA Experiment 108523 PARAMETER Experiment Name: Zm_42deg_Heat_P Parameter: Organism Value: Zea mays
  misc_feature: MA Experiment 108523 PARAMETER Experiment Name: Zm_42deg_Heat_P Parameter: Plant Line Value: 35A19
  misc_feature: MA Experiment 108523 PARAMETER Experiment Name: Zm_42deg_Heat_P Parameter: Temperature (deg C) Value: 42 vs. 22
  misc_feature: MA Experiment 108523 PARAMETER Experiment Name: Zm_42deg_Heat_P Parameter: Timepoint (hr) Value: 6
  misc_feature: MA Experiment 108523 PARAMETER Experiment Name: Zm_42deg_Heat_P Parameter: Tissue Value: Aerial
  misc_feature: MA Experiment ID: 108559 Result: Up-regulated in Transcription
  misc_feature: MA Experiment 108559 PARAMETER Experiment Name: Zm_5mM_NO_P Parameter: Age (day) Value: 8
  misc_feature: MA Experiment 108559 PARAMETER Experiment Name: Zm_5mM_NO_P Parameter: Organism Value: Zea mays
  misc_feature: MA Experiment 108559 PARAMETER Experiment Name: Zm_5mM_NO_P Parameter: Plant Line Value: 35A19
  misc_feature: MA Experiment 108559 PARAMETER Experiment Name: Zm_5mM_NO_P Parameter: Timepoint (hr) Value: 12
  misc_feature: MA Experiment 108559 PARAMETER Experiment Name: Zm_5mM_NO_P Parameter: Tissue Value: Aerial
  misc_feature: MA Experiment 108559 PARAMETER Experiment Name: Zm_5mM_NO_P Parameter: Treatment Value: 5mM NO vs. No Treatment
  misc_feature: MA Experiment ID: 108688 Result: Down-regulated in Transcription
  misc_feature: MA Experiment 108688 PARAMETER Experiment Name: Zm_Embryos-Flowers__P Parameter: Tissue Value: Immature Flowers vs. Aerial+
  misc_feature: MA Experiment ID: 20000535 Result: Up-regulated in Transcription
  misc_feature: MA Experiment 20000535 PARAMETER Experiment Name: Zm_Hybrid_Seed_Dev_P Parameter: DAP Value: 30 vs. 12
  misc_feature: MA Experiment 20000535 PARAMETER Experiment Name: Zm_Hybrid_Seed_Dev_P Parameter: Organism Value: Zea mays
  misc_feature: MA Experiment 20000535 PARAMETER Experiment Name: Zm_Hybrid_Seed_Dev_P Parameter: Plant Line Value: 35A19
  misc_feature: MA Experiment 20000535 PARAMETER Experiment Name: Zm_Hybrid_Seed_Dev_P Parameter: Tissue Value: Embryo vs. Unfert Floret
ccattgacatcaccgagacctatcgccgcagaaccaccgaatccagggcatcggagagtgtagaggttagtacgaggcggaggtcaagatggtgtgcatccggcaggcgactatcgacgacctgctggcgatgcaggcgtgcaacttgatgtgcctgccggagaactaccagatgaagtactacctctaccacatgctgtcttggccgcagctcctcttcgtcgccgaggactacggcggccgcatcgtcggctacgtgctcgccaagatggaggaggacccctccgagccctgccacggccacatcacctccctcgcggtgctccgctcccaccgcaagctcgggctcgccaccaagctcatgtccgccgcggataacaggctgatgactcccaagagctcttatcgacggagtcgtttggcactcgatgtcgactcatcacatcctggggtngaag

SEQ ID NO: 18654 - protein, 123 aa, Zea mays subsp. mays
  peptide (1)..(123): Ceres Seq. ID no. 5006269
  misc_feature (45)..(95): Pfam Name: Acetyltransferase (GNAT) family Pfam Description: Acetyltransferase (GNAT) family
  misc_feature (4)..(100): Homolog of NCBI NO: 10835057 NR Description: N-acetyltransferase, homolog of S. cerevisiae ARD1
  misc_feature (4)..(100): Homolog of NCBI NO: 9845236 NR Description: N-acetyltransferase similar to S. cerevisiae ARD1
  misc_feature (4)..(100): Homolog of NCBI NO: 37539684 NR Description: hypothetical protein MGC10646 [Homo sapiens]
  misc_feature (4)..(100): Homolog of NCBI NO: 39645307 NR Description: Unknown (protein for IMAGE:3922934) [Homo sapiens]
  misc_feature (4)..(100): Homolog of NCBI NO: 33871453 NR Description: MGC10646 protein [Homo sapiens]
  misc_feature (4)..(119): Homolog of NCBI NO: 28422354 NR Description: Similar to N-acetyltransferase ARD1 homolog (S.
  misc_feature (4)..(100): Homolog of NCBI NO: 30519923 NR Description: DNA segment, Chr 18, Wayne State University 98,
  misc_feature (1)..(95): Homolog of NCBI NO: 15240705 NR Description: putative protein
  misc_feature (1)..(95): Homolog of NCBI NO: 38344807 NR Description: OSJNBa0043L09.27 [Oryza sativa (japonica
  misc_feature (1)..(95): Homolog of NCBI NO: 14550116 NR Description: silencing group B protein [Zea mays]
  misc_feature (122)..(122): Xaa is any aa, unknown or other
MVCIRQATIDDLLAMQACNLMCLPENYQMKYYLYHMLSWPQLLFVAEDYGGRIVGYVLAKMEEDPSEPCHGHITSLAVLRSHRKLGLATKLMSAADNRLMTPKSSYRRSRLALDVDSSHPGXE

SEQ ID NO: 18655 - protein, 109 aa, Zea mays subsp. mays
  peptide (1)..(109): Ceres Seq. ID no. 5006270
  misc_feature (31)..(81): Pfam Name: Acetyltransferase (GNAT) family Pfam Description: Acetyltransferase (GNAT) family
  misc_feature (1)..(86): Homolog of NCBI NO: 37539684 NR Description: hypothetical protein MGC10646 [Homo sapiens]
  misc_feature (1)..(86): Homolog of NCBI NO: 39645307 NR Description: Unknown (protein for IMAGE:3922934) [Homo sapiens]
  misc_feature (1)..(86): Homolog of NCBI NO: 33871453 NR Description: MGC10646 protein [Homo sapiens]
  misc_feature (1)..(105): Homolog of NCBI NO: 28422354 NR Description: Similar to N-acetyltransferase ARD1 homolog (S.
  misc_feature (1)..(86): Homolog of NCBI NO: 26347431 NR Description: unnamed protein product [Mus musculus]
  misc_feature (1)..(86): Homolog of NCBI NO: 9845236 NR Description: N-acetyltransferase similar to S. cerevisiae ARD1
  misc_feature (1)..(86): Homolog of NCBI NO: 30519923 NR Description: DNA segment, Chr 18, Wayne State University 98,
  misc_feature (1)..(81): Homolog of NCBI NO: 15240705 NR Description: putative protein
  misc_feature (1)..(81): Homolog of NCBI NO: 38344807 NR Description: OSJNBa0043L09.27 [Oryza sativa (japonica
  misc_feature (1)..(81): Homolog of NCBI NO: 14550116 NR Description: silencing group B protein [Zea mays]
  misc_feature (108)..(108): Xaa is any aa, unknown or other
MQACNLMCLPENYQMKYYLYHMLSWPQLLFVAEDYGGRIVGYVLAKMEEDPSEPCHGHITSLAVLRSHRKLGLATKLMSAADNRLMTPKSSYRRSRLALDVDSSHPGXE

SEQ ID NO: 18656 - protein, 103 aa, Zea mays subsp. mays
  peptide (1)..(103): Ceres Seq. ID no. 5006271
  misc_feature (25)..(75): Pfam Name: Acetyltransferase (GNAT) family Pfam Description: Acetyltransferase (GNAT) family
  misc_feature (1)..(80): Homolog of NCBI NO: 26347431 NR Description: unnamed protein product [Mus musculus]
  misc_feature (1)..(80): Homolog of NCBI NO: 9845236 NR Description: N-acetyltransferase similar to S. cerevisiae ARD1
  misc_feature (1)..(80): Homolog of NCBI NO: 37539684 NR Description: hypothetical protein MGC10646 [Homo sapiens]
  misc_feature (1)..(80): Homolog of NCBI NO: 39645307 NR Description: Unknown (protein for IMAGE:3922934) [Homo sapiens]
  misc_feature (1)..(80): Homolog of NCBI NO: 33871453 NR Description: MGC10646 protein [Homo sapiens]
  misc_feature (1)..(99): Homolog of NCBI NO: 28422354 NR Description: Similar to N-acetyltransferase ARD1 homolog (S.
  misc_feature (1)..(80): Homolog of NCBI NO: 30519923 NR Description: DNA segment, Chr 18, Wayne State University 98,
  misc_feature (1)..(75): Homolog of NCBI NO: 15240705 NR Description: putative protein
  misc_feature (1)..(75): Homolog of NCBI NO: 38344807 NR Description: OSJNBa0043L09.27 [Oryza sativa (japonica
  misc_feature (1)..(75): Homolog of NCBI NO: 14550116 NR Description: silencing group B protein [Zea mays]
  misc_feature (102)..(102): Xaa is any aa, unknown or other
MCLPENYQMKYYLYHMLSWPQLLFVAEDYGGRIVGYVLAKMEEDPSEPCHGHITSLAVLRSHRKLGLATKLMSAADNRLMTPKSSYRRSRLALDVDSSHPGXE

SEQ ID NO: 18657 - DNA, 1108 bp, Zea mays subsp. mays
  misc_feature (1)..(1108): Ceres Seq. ID no. 12363658
  misc_feature: MA Experiment ID: 108529 Result: Up-regulated in Transcription
  misc_feature: MA Experiment 108529 PARAMETER Experiment Name: Zm_Imbibed_Seeds_P Parameter: Age (day) Value: 5 vs. 2
  misc_feature: MA Experiment 108529 PARAMETER Experiment Name: Zm_Imbibed_Seeds_P Parameter: Organism Value: Zea mays
  misc_feature: MA Experiment 108529 PARAMETER Experiment Name: Zm_Imbibed_Seeds_P Parameter: Plant Line Value: 35A19
  misc_feature: MA Experiment 108529 PARAMETER Experiment Name: Zm_Imbibed_Seeds_P Parameter: Tissue Value: Roots vs. Embryo
  misc_feature: MA Experiment ID: 108543 Result: Up-regulated in Transcription
  misc_feature: MA Experiment ID: 108546 Result: Up-regulated in Transcription
  misc_feature: MA Experiment 108546 PARAMETER Experiment Name: Zm_Imbibed_Seeds_P Parameter: Age (day) Value: 3 vs. 2
  misc_feature: MA Experiment 108546 PARAMETER Experiment Name: Zm_Imbibed_Seeds_P Parameter: Organism Value: Zea mays
  misc_feature: MA Experiment 108546 PARAMETER Experiment Name: Zm_Imbibed_Seeds_P Parameter: Plant Line Value: 35A19
  misc_feature: MA Experiment 108546 PARAMETER Experiment Name: Zm_Imbibed_Seeds_P Parameter: Tissue Value: Roots vs. Embryo
gtgcctccatcttccgattcccatcgcttgtttgctgctgccttttcctttccgccgcggcaaaagtgaggagcgcgcgggcgagttgggggagacgaacccgtcataactccttcgcttaatcgcgtctcgtgctcctgcctcctgcgtatataaacgcggcaatcgcgacgcccggggaggcgttcgttctccttctccatcccacgcgcgcgcagtccaaggccggatcggcggcctctcagatctcgccggccgccgtgagacagagaccgaagggggggttgaccggtgctccggaggaagatgtttagcgggacgcagcagaagtgcaaggtgtgcaccaagacggtgtacccgatggaccagctctccaccgacggcgtcgtcttccaccgctcctgcttcaagtgccagcactgcaagtctaccctctcactgagcaactattcctcgttcgaaggagtgccgtactgcaagacccatttcgagcagctgttcaaggagaccgggagttacaacaagagcttccaatcacagtcacctgcaaagattactccggaaaagttggcccctgagctgaccagatcaccaagcaaagctgcaaggatgttttcaggaacacaagacaagtgtgcgacttgtggtaaaactgcgtatcctcttgagaaggtaacagtcgaagagaagtcctaccataagtcatgcttcaaatgctcccacgggggctgcgcgattacaccttccaactatgcagccttggagggcatcctctactgcaaacaccatttctcccaacttttcaaggagaagggaagctacaaccacttgatcaagtgcgcgtccgtcaagcgcgctgctgaagcacagccagaacaaccggcctctgattcctcctcctgaccacgccatttaaacagtgggggtttggaggcgagagagttgggaagcctcctgtttctacttaaaaccgcgtgatgtatgttattccatctatgccccgaggatactagactactactctattttggtatcctctgctgtgctagctggatcatatcagcgaaccatggaattgctgtcattttcaatgaaactgttgtgcatc

SEQ ID NO: 18658 - protein, 198 aa, Zea mays subsp. mays
  peptide (1)..(198): Ceres Seq. ID no. 12363659
  misc_feature (110)..(167): Pfam Name: LIM domain Pfam Description: LIM domain
  misc_feature (2)..(195): Homolog of NCBI NO: 15225897 NR Description: putative LIM-domain protein; protein id:
  misc_feature (2)..(195): Homolog of NCBI NO: 15223476 NR Description: LIM domain protein, putative; protein id:
  misc_feature (2)..(187): Homolog of NCBI NO: 8515104 NR Description: LIM domain protein PLIM-2 [Nicotiana tabacum]
  misc_feature (1)..(195): Homolog of NCBI NO: 25354704 NR Description: T1N6.19 protein - Arabidopsis thaliana
  misc_feature (2)..(169): Homolog of NCBI NO: 11282608 NR Description: transcription factor L2 [imported] - Arabidopsis
  misc_feature (2)..(187): Homolog of NCBI NO: 15228188 NR Description: transcription factor L2
  misc_feature (2)..(187): Homolog of NCBI NO: 15225592 NR Description: putative LIM-domain protein
  misc_feature (2)..(190): Homolog of NCBI NO: 17227092 NR Description: LIM domain protein [Gossypium hirsutum]
  misc_feature (2)..(190): Homolog of NCBI NO: 7489184 NR Description: probable transcription factor SF3 - common
  misc_feature (1)..(197): Homolog of NCBI NO: 34902012 NR Description: putative LIM-domain protein
MFSGTQQKCKVCTKTVYPMDQLSTDGVVFHRSCFKCQHCKSTLSLSNYSSFEGVPYCKTHFEQLFKETGSYNKSFQSQSPAKITPEKLAPELTRSPSKAARMFSGTQDKCATCGKTAYPLEKVTVEEKSYHKSCFKCSHGGCAITPSNYAALEGILYCKHHFSQLFKEKGSYNHLIKCASVKRAAEAQPEQPASDSSS

SEQ ID NO: 18659 - protein, 180 aa, Zea mays subsp. mays
  peptide (1)..(180): Ceres Seq. ID no. 12363660
  misc_feature (92)..(149): Pfam Name: LIM domain Pfam Description: LIM domain
  misc_feature (1)..(177): Homolog of NCBI NO: 15225897 NR Description: putative LIM-domain protein; protein id:
  misc_feature (1)..(177): Homolog of NCBI NO: 15223476 NR Description: LIM domain protein, putative; protein id:
  misc_feature (1)..(169): Homolog of NCBI NO: 8515104 NR Description: LIM domain protein PLIM-2 [Nicotiana tabacum]
  misc_feature (1)..(177): Homolog of NCBI NO: 25354704 NR Description: T1N6.19 protein - Arabidopsis thaliana
  misc_feature (1)..(151): Homolog of NCBI NO: 11282608 NR Description: transcription factor L2 [imported] - Arabidopsis
  misc_feature (1)..(169): Homolog of NCBI NO: 15228188 NR Description: transcription factor L2
  misc_feature (1)..(169): Homolog of NCBI NO: 15225592 NR Description: putative LIM-domain protein
  misc_feature (1)..(172): Homolog of NCBI NO: 17227092 NR Description: LIM domain protein [Gossypium hirsutum]
  misc_feature (1)..(172): Homolog of NCBI NO: 7489184 NR Description: probable transcription factor SF3 - common
  misc_feature (1)..(179): Homolog of NCBI NO: 34902012 NR Description: putative LIM-domain protein
MDQLSTDGVVFHRSCFKCQHCKSTLSLSNYSSFEGVPYCKTHFEQLFKETGSYNKSFQSQSPAKITPEKLAPELTRSPSKAARMFSGTQDKCATCGKTAYPLEKVTVEEKSYHKSCFKCSHGGCAITPSNYAALEGILYCKHHFSQLFKEKGSYNHLIKCASVKRAAEAQPEQPASDSSS

SEQ ID NO: 18660 - DNA, 1355 bp, Zea mays subsp. mays
  misc_feature (1)..(1355): Ceres Seq. ID no. 12419087
  misc_feature: MA Experiment ID: 108515 Result: Up-regulated in Transcription
  misc_feature: MA Experiment 108515 PARAMETER Experiment Name: Zm_2mM_SA_P Parameter: Age (day) Value: 8
  misc_feature: MA Experiment 108515 PARAMETER Experiment Name: Zm_2mM_SA_P Parameter: Organism Value: Zea mays
  misc_feature: MA Experiment 108515 PARAMETER Experiment Name: Zm_2mM_SA_P Parameter: Plant Line Value: 35A19
  misc_feature: MA Experiment 108515 PARAMETER Experiment Name: Zm_2mM_SA_P Parameter: Timepoint (hr) Value: 12
  misc_feature: MA Experiment 108515 PARAMETER Experiment Name: Zm_2mM_SA_P Parameter: Tissue Value: Aerial
  misc_feature: MA Experiment 108515 PARAMETER Experiment Name: Zm_2mM_SA_P Parameter: Treatment Value: 2mM SA vs. No Treatment
  misc_feature: MA Experiment ID: 108522 Result: Down-regulated in Transcription
  misc_feature: MA Experiment 108522 PARAMETER Experiment Name: Zm_42deg_Heat_P Parameter: Age (day) Value: 8
  misc_feature: MA Experiment 108522 PARAMETER Experiment Name: Zm_42deg_Heat_P Parameter: Organism Value: Zea mays
  misc_feature: MA Experiment 108522 PARAMETER Experiment Name: Zm_42deg_Heat_P Parameter: Plant Line Value: 35A19
  misc_feature: MA Experiment 108522 PARAMETER Experiment Name: Zm_42deg_Heat_P Parameter: Temperature (deg C) Value: 42 vs. 22
  misc_feature: MA Experiment 108522 PARAMETER Experiment Name: Zm_42deg_Heat_P Parameter: Timepoint (hr) Value: 1
  misc_feature: MA Experiment 108522 PARAMETER Experiment Name: Zm_42deg_Heat_P Parameter: Tissue Value: Aerial
  misc_feature: MA Experiment ID: 108523 Result: Up-regulated in Transcription
  misc_feature: MA Experiment 108523 PARAMETER Experiment Name: Zm_42deg_Heat_P Parameter: Age (day) Value: 8
  misc_feature: MA Experiment 108523 PARAMETER Experiment Name: Zm_42deg_Heat_P Parameter: Organism Value: Zea mays
  misc_feature: MA Experiment 108523 PARAMETER Experiment Name: Zm_42deg_Heat_P Parameter: Plant Line Value: 35A19
  misc_feature: MA Experiment 108523 PARAMETER Experiment Name: Zm_42deg_Heat_P Parameter: Temperature (deg C) Value: 42 vs. 22
  misc_feature: MA Experiment 108523 PARAMETER Experiment Name: Zm_42deg_Heat_P Parameter: Timepoint (hr) Value: 6
  misc_feature: MA Experiment 108523 PARAMETER Experiment Name: Zm_42deg_Heat_P Parameter: Tissue Value: Aerial
  misc_feature: MA Experiment ID: 108527 Result: Up-regulated in Transcription
  misc_feature: MA Experiment 108527 PARAMETER Experiment Name: Zm_5mM_NO_P Parameter: Age (day) Value: 8
  misc_feature: MA Experiment 108527 PARAMETER Experiment Name: Zm_5mM_NO_P Parameter: Organism Value: Zea mays
  misc_feature: MA Experiment 108527 PARAMETER Experiment Name: Zm_5mM_NO_P Parameter: Plant Line Value: 35A19
  misc_feature: MA Experiment 108527 PARAMETER Experiment Name: Zm_5mM_NO_P Parameter: Timepoint (hr) Value: 6
  misc_feature: MA Experiment 108527 PARAMETER Experiment Name: Zm_5mM_NO_P Parameter: Tissue Value: Aerial
  misc_feature: MA Experiment 108527 PARAMETER Experiment Name: Zm_5mM_NO_P Parameter: Treatment Value: 5mM NO vs. No Treatment
  misc_feature: MA Experiment ID: 108528 Result: Down-regulated in Transcription
  misc_feature: MA Experiment 108528 PARAMETER Experiment Name: Zm_Imbibed_Seeds_P Parameter: Age (day) Value: 5 vs. 2
  misc_feature: MA Experiment 108528 PARAMETER Experiment Name: Zm_Imbibed_Seeds_P Parameter: Organism Value: Zea mays
  misc_feature: MA Experiment 108528 PARAMETER Experiment Name: Zm_Imbibed_Seeds_P Parameter: Plant Line Value: 35A19
  misc_feature: MA Experiment 108528 PARAMETER Experiment Name: Zm_Imbibed_Seeds_P Parameter: Tissue Value: Aerial vs. Embryo
  misc_feature: MA Experiment ID: 108529 Result: Down-regulated in Transcription
  misc_feature: MA Experiment 108529 PARAMETER Experiment Name: Zm_Imbibed_Seeds_P Parameter: Age (day) Value: 5 vs. 2
  misc_feature: MA Experiment 108529 PARAMETER Experiment Name: Zm_Imbibed_Seeds_P Parameter: Organism Value: Zea mays
  misc_feature: MA Experiment 108529 PARAMETER Experiment Name: Zm_Imbibed_Seeds_P Parameter: Plant Line Value: 35A19
  misc_feature: MA Experiment 108529 PARAMETER Experiment Name: Zm_Imbibed_Seeds_P Parameter: Tissue Value: Roots vs. Embryo
  misc_feature: MA Experiment ID: 108530 Result: Down-regulated in Transcription
  misc_feature: MA Experiment 108530 PARAMETER Experiment Name: Zm_Imbibed_Seeds_P Parameter: Age (day) Value: 6 vs. 2
  misc_feature: MA Experiment 108530 PARAMETER Experiment Name: Zm_Imbibed_Seeds_P Parameter: Organism Value: Zea mays
  misc_feature: MA Experiment 108530 PARAMETER Experiment Name: Zm_Imbibed_Seeds_P Parameter: Plant Line Value: 35A19
  misc_feature: MA Experiment 108530 PARAMETER Experiment Name: Zm_Imbibed_Seeds_P Parameter: Tissue Value: Aerial vs. Embryo
  misc_feature: MA Experiment ID: 108533 Result: Down-regulated in Transcription
  misc_feature: MA Experiment 108533 PARAMETER Experiment Name: Zm_4deg_Cold_P Parameter: Age (hr) Value: 8
  misc_feature: MA Experiment 108533 PARAMETER Experiment Name: Zm_4deg_Cold_P Parameter: Organism Value: Zea mays
  misc_feature: MA Experiment 108533 PARAMETER Experiment Name: Zm_4deg_Cold_P Parameter: Plant Line Value: 35A19
  misc_feature: MA Experiment 108533 PARAMETER Experiment Name: Zm_4deg_Cold_P Parameter: Temperature (deg C) Value: 4 vs. 22
  misc_feature: MA Experiment 108533 PARAMETER Experiment Name: Zm_4deg_Cold_P Parameter: Timepoint (hr) Value: 1
  misc_feature: MA Experiment 108533 PARAMETER Experiment Name: Zm_4deg_Cold_P Parameter: Tissue Value: Aerial
  misc_feature: MA Experiment ID: 108536 Result: Up-regulated in Transcription
  misc_feature: MA Experiment 108536 PARAMETER Experiment Name: Zm_Meristem_P Parameter: Age (day) Value: 8
  misc_feature: MA Experiment 108536 PARAMETER Experiment Name: Zm_Meristem_P Parameter: Organism Value: Zea mays
  misc_feature: MA Experiment 108536 PARAMETER Experiment Name: Zm_Meristem_P Parameter: Plant Line Value: 35A19
  misc_feature: MA Experiment 108536 PARAMETER Experiment Name: Zm_Meristem_P Parameter: Tissue Value: Shoot Meristem vs. Above Shoot Meristem
  misc_feature: MA Experiment ID: 108543 Result: Down-regulated in Transcription
  misc_feature: MA Experiment ID: 108544 Result: Down-regulated in Transcription
  misc_feature: MA Experiment ID: 108545 Result: Down-regulated in Transcription
  misc_feature: MA Experiment 108545 PARAMETER Experiment Name: Zm_Imbibed_Seeds_P Parameter: Age (day) Value: 3 vs. 2
  misc_feature: MA Experiment 108545 PARAMETER Experiment Name: Zm_Imbibed_Seeds_P Parameter: Organism Value: Zea mays
  misc_feature: MA Experiment 108545 PARAMETER Experiment Name: Zm_Imbibed_Seeds_P Parameter: Plant Line Value: 35A19
  misc_feature: MA Experiment 108545 PARAMETER Experiment Name: Zm_Imbibed_Seeds_P Parameter: Tissue Value: Aerial vs. Embryo
  misc_feature: MA Experiment ID: 108546 Result: Down-regulated in Transcription
  misc_feature: MA Experiment 108546 PARAMETER Experiment Name: Zm_Imbibed_Seeds_P Parameter: Age (day) Value: 3 vs. 2
  misc_feature: MA Experiment 108546 PARAMETER Experiment Name: Zm_Imbibed_Seeds_P Parameter: Organism Value: Zea mays
  misc_feature: MA Experiment 108546 PARAMETER Experiment Name: Zm_Imbibed_Seeds_P Parameter: Plant Line Value: 35A19
  misc_feature: MA Experiment 108546 PARAMETER Experiment Name: Zm_Imbibed_Seeds_P Parameter: Tissue Value: Roots vs. Embryo
  misc_feature: MA Experiment ID: 108547 Result: Down-regulated in Transcription
  misc_feature: MA Experiment 108547 PARAMETER Experiment Name: Zm_Imbibed_Seeds_P Parameter: Age (day) Value: 4 vs. 2
  misc_feature: MA Experiment 108547 PARAMETER Experiment Name: Zm_Imbibed_Seeds_P Parameter: Organism Value: Zea mays
  misc_feature: MA Experiment 108547 PARAMETER Experiment Name: Zm_Imbibed_Seeds_P Parameter: Plant Line Value: 35A19
  misc_feature: MA Experiment 108547 PARAMETER Experiment Name: Zm_Imbibed_Seeds_P Parameter: Tissue Value: Aerial vs. Embryo
  misc_feature: MA Experiment ID: 108556 Result: Down-regulated in Transcription
  misc_feature: MA Experiment 108556 PARAMETER Experiment Name: Zm_Drought_P Parameter: Age (day) Value: 9
  misc_feature: MA Experiment 108556 PARAMETER Experiment Name: Zm_Drought_P Parameter: Organism Value: Zea mays
  misc_feature: MA Experiment 108556 PARAMETER Experiment Name: Zm_Drought_P Parameter: Plant Line Value: 35A19
  misc_feature: MA Experiment 108556 PARAMETER Experiment Name: Zm_Drought_P Parameter: Timepoint (hr) Value: 24
  misc_feature: MA Experiment 108556 PARAMETER Experiment Name: Zm_Drought_P Parameter: Tissue Value: Aerial
  misc_feature: MA Experiment 108556 PARAMETER Experiment Name: Zm_Drought_P Parameter: Treatment Value: Drought vs. No Drought
  misc_feature: MA Experiment ID: 108559 Result: Up-regulated in Transcription
  misc_feature: MA Experiment 108559 PARAMETER Experiment Name: Zm_5mM_NO_P Parameter: Age (day) Value: 8
  misc_feature: MA Experiment 108559 PARAMETER Experiment Name: Zm_5mM_NO_P Parameter: Organism Value: Zea mays
  misc_feature: MA Experiment 108559 PARAMETER Experiment Name: Zm_5mM_NO_P Parameter: Plant Line Value: 35A19
  misc_feature: MA Experiment 108559 PARAMETER Experiment Name: Zm_5mM_NO_P Parameter: Timepoint (hr) Value: 12
  misc_feature: MA Experiment 108559 PARAMETER Experiment Name: Zm_5mM_NO_P Parameter: Tissue Value: Aerial
  misc_feature: MA Experiment 108559 PARAMETER Experiment Name: Zm_5mM_NO_P Parameter: Treatment Value: 5mM NO vs. No Treatment
  misc_feature: MA Experiment ID: 108597 Result: Down-regulated in Transcription
  misc_feature: MA Experiment 108597 PARAMETER Experiment Name: Zm_100uM_ABA_P Parameter: Age (day) Value: 9
  misc_feature: MA Experiment 108597 PARAMETER Experiment Name: Zm_100uM_ABA_P Parameter: Organism Value: Zea mays
  misc_feature: MA Experiment 108597 PARAMETER Experiment Name: Zm_100uM_ABA_P Parameter: Plant Line Value: 35A19
  misc_feature: MA Experiment 108597 PARAMETER Experiment Name: Zm_100uM_ABA_P Parameter: Timepoint (hr) Value: 24
  misc_feature: MA Experiment 108597 PARAMETER Experiment Name: Zm_100uM_ABA_P Parameter: Tissue Value: Aerial
  misc_feature: MA Experiment 108597 PARAMETER Experiment Name: Zm_100uM_ABA_P Parameter: Treatment Value: 100uM ABA vs. No Treatment
  misc_feature: MA Experiment ID: 108599 Result: Up-regulated in Transcription
  misc_feature: MA Experiment 108599 PARAMETER Experiment Name: Zm_RT1_P Parameter: Age (day) Value: 11
  misc_feature: MA Experiment 108599 PARAMETER Experiment Name: Zm_RT1_P Parameter: Organism Value: Zea mays
  misc_feature: MA Experiment 108599 PARAMETER Experiment Name: Zm_RT1_P Parameter: Plant Line Value: rt1 mut vs. rt1 wt
  misc_feature: MA Experiment 108599 PARAMETER Experiment Name: Zm_RT1_P Parameter: Tissue Value: Roots
  misc_feature: MA Experiment ID: 108689 Result: Down-regulated in Transcription
  misc_feature: MA Experiment 108689 PARAMETER Experiment Name: Zm_Drought_Roots_P Parameter: Age (day) Value: 9
  misc_feature: MA Experiment 108689 PARAMETER Experiment Name: Zm_Drought_Roots_P Parameter: Organism Value: Zea mays
  misc_feature: MA Experiment 108689 PARAMETER Experiment Name: Zm_Drought_Roots_P Parameter: Plant Line Value: 35A19
  misc_feature: MA Experiment 108689 PARAMETER Experiment Name: Zm_Drought_Roots_P Parameter: Timepoint (hr) Value: 24
  misc_feature: MA Experiment 108689 PARAMETER Experiment Name: Zm_Drought_Roots_P Parameter: Tissue Value: Roots
  misc_feature: MA Experiment 108689 PARAMETER Experiment Name: Zm_Drought_Roots_P Parameter: Treatment Value: Drought vs. No Drought
  misc_feature: MA Experiment ID: 20000477 Result: Down-regulated in Transcription
  misc_feature: MA Experiment 20000477 PARAMETER Experiment Name: Zm_5mM_SA_P Parameter: Age (day) Value: 10
  misc_feature: MA Experiment 20000477 PARAMETER Experiment Name: Zm_5mM_SA_P Parameter: Organism Value: Zea mays
  misc_feature: MA Experiment 20000477 PARAMETER Experiment Name: Zm_5mM_SA_P Parameter: Plant Line Value: 35A19
  misc_feature: MA Experiment 20000477 PARAMETER Experiment Name: Zm_5mM_SA_P Parameter: Timepoint (hr) Value: 48
  misc_feature: MA Experiment 20000477 PARAMETER Experiment Name: Zm_5mM_SA_P Parameter: Tissue Value: Aerial
  misc_feature: MA Experiment 20000477 PARAMETER Experiment Name: Zm_5mM_SA_P Parameter: Treatment Value: 5mM SA vs. No Treatment
  misc_feature: MA Experiment ID: 20000478 Result: Down-regulated in Transcription
  misc_feature: MA Experiment 20000478 PARAMETER Experiment Name: Zm_5mM_SA_P Parameter: Age (day) Value: 11
  misc_feature: MA Experiment 20000478 PARAMETER Experiment Name: Zm_5mM_SA_P Parameter: Organism Value: Zea mays
  misc_feature: MA Experiment 20000478 PARAMETER Experiment Name: Zm_5mM_SA_P Parameter: Plant Line Value: 35A19
  misc_feature: MA Experiment 20000478 PARAMETER Experiment Name: Zm_5mM_SA_P Parameter: Timepoint (hr) Value: 72
  misc_feature: MA Experiment 20000478 PARAMETER Experiment Name: Zm_5mM_SA_P Parameter: Tissue Value: Aerial
  misc_feature: MA Experiment 20000478 PARAMETER Experiment Name: Zm_5mM_SA_P Parameter: Treatment Value: 5mM SA vs. No Treatment
  misc_feature: MA Experiment ID: 20000479 Result: Down-regulated in Transcription
  misc_feature: MA Experiment 20000479 PARAMETER Experiment Name: Zm_Drought_P Parameter: Age (day) Value: 10
  misc_feature: MA Experiment 20000479 PARAMETER Experiment Name: Zm_Drought_P Parameter: Organism Value: Zea mays
  misc_feature: MA Experiment 20000479 PARAMETER Experiment Name: Zm_Drought_P Parameter: Plant Line Value: 35A19
  misc_feature: MA Experiment 20000479 PARAMETER Experiment Name: Zm_Drought_P Parameter: Timepoint (hr) Value: 48
  misc_feature: MA Experiment 20000479 PARAMETER Experiment Name: Zm_Drought_P Parameter: Tissue Value: Aerial
  misc_feature: MA Experiment 20000479 PARAMETER Experiment Name: Zm_Drought_P Parameter: Treatment Value: Drought vs. No Drought
  misc_feature: MA Experiment ID: 20000480 Result: Down-regulated in Transcription
  misc_feature: MA Experiment 20000480 PARAMETER Experiment Name: Zm_Drought_P Parameter: Age (day) Value: 11
  misc_feature: MA Experiment 20000480 PARAMETER Experiment Name: Zm_Drought_P Parameter: Organism Value: Zea mays
  misc_feature: MA Experiment 20000480 PARAMETER Experiment Name: Zm_Drought_P Parameter: Plant Line Value: 35A19
  misc_feature: MA Experiment 20000480 PARAMETER Experiment Name: Zm_Drought_P Parameter: Timepoint (hr) Value: 72
  misc_feature: MA Experiment 20000480 PARAMETER Experiment Name: Zm_Drought_P Parameter: Tissue Value: Aerial
  misc_feature: MA Experiment 20000480 PARAMETER Experiment Name: Zm_Drought_P Parameter: Treatment Value: Drought vs. No Drought
  misc_feature: MA Experiment ID: 20000492 Result: Up-regulated in Transcription
  misc_feature: MA Experiment 20000492 PARAMETER Experiment Name: Zm_Hybrid_Seed_Dev_P Parameter: DAP Value: 12
  misc_feature: MA Experiment 20000492 PARAMETER Experiment Name: Zm_Hybrid_Seed_Dev_P Parameter: Organism Value: Zea mays
  misc_feature: MA Experiment 20000492 PARAMETER Experiment Name: Zm_Hybrid_Seed_Dev_P Parameter: Plant Line Value: 35A19
  misc_feature: MA Experiment 20000492 PARAMETER Experiment Name: Zm_Hybrid_Seed_Dev_P Parameter: Tissue Value: Fert Kernel vs. Unfert Floret
  misc_feature: MA Experiment ID: 20000535 Result: Up-regulated in Transcription
  misc_feature: MA Experiment 20000535 PARAMETER Experiment Name: Zm_Hybrid_Seed_Dev_P Parameter: DAP Value: 30 vs. 12
  misc_feature: MA Experiment 20000535 PARAMETER Experiment Name: Zm_Hybrid_Seed_Dev_P Parameter: Organism Value: Zea mays
  misc_feature: MA Experiment 20000535 PARAMETER Experiment Name: Zm_Hybrid_Seed_Dev_P Parameter: Plant Line Value: 35A19
  misc_feature: MA Experiment 20000535 PARAMETER Experiment Name: Zm_Hybrid_Seed_Dev_P Parameter: Tissue Value: Embryo vs. Unfert Floret
  misc_feature: MA Experiment ID: 20000626 Result: Up-regulated in Transcription
  misc_feature: MA Experiment 20000626 PARAMETER Experiment Name: Zm_Herbicide-Treatments_P Parameter: Timepoint (hr) Value: 12
  misc_feature: MA Experiment 20000626 PARAMETER Experiment Name: Zm_Herbicide-Treatments_P Parameter: Tissue Value: Aerial
  misc_feature: MA Experiment 20000626 PARAMETER Experiment Name: Zm_Herbicide-Treatments_P Parameter: Treatment Value: Roundup vs. No Treatment
gcacgagaccattacctagaacatcctaatcgaaaaaccatccaagccatagcgagcgcccaccgccaacccaaacccaccggccaccaccactacgccacaccgatcgccatggccgccaccacgccggcgcccccctcccacggcggcgggcgcaacggcaccctccctactccgctgccttccaacgagtccttctccaagttcttcgagtcctggatctcggagcagtcccgcgacctcgaggagctgcgcgccgcggcgtccgcggacccgcccgcgcccgaganccgagctccggcgcctcgtgggccaggtgctcggccactacgcgcagtactaccgcgccaaggcggcggccgcggccgacgacgtgctctgcatgttcaccccgtcctggacctccaccaccgagaacctctacctctggtgcggcggctggcgccccaccgccgcgatccagctgctgtacaccaagtccgggatgcagctgcagcaccagctccccgccttcctcgacggcgggggcctcaaggacgacctcggcgacctcggcgccgcgcagctccaggccgccgaccagctgcagcgccgcaccatccggagggagcgcgagatcgaggacgccgccgcgagcgcacaggaagcgctgacgacggcgacgatggtggagctcgcgggcggcggcgggagggaggcgggggccatggaccgggagatgcaggcgaaggcggaggggatgaggcgggtgctggagatggcggacgcgctgcgcctcgagacgatgcgcgaggtggtggcgctgctccgccccgcgcaggccgtgcacttcctcctcgccgccgccgagctccacctcgccgtgcacgacttcgggcgccgcaaggacggccgcgccggcaacgtcgccgccgccgcgccgccggagtgacggacgctggcgcgcgtgaaacgataacgggcttgcctgcctgcctggctgctctgcttttgcttgtgtcgtgtagctggggggctccctgttccaagcggcgcatggctgcgcctgctcgcgcgcgcgcgttcgttgcccctgacgtcgcgctcgtcgcctagctacccatccataaaggctgcggctggtttggtcagcacgagctgtcgcgataagcttctgaccatttgttcctcttgctgtgcctgtgcactgtgcagtcgtgagtcgtgacacatgcctgtctttggagtaaagcgagatcttgtttgggagtagtagagatgttatgcttcagcagtgaaatgaaaataataatttggatttggtttcagcgcgacaatgaaatagatgttggactgacttttgggatcatgtttac

SEQ ID NO: 18661 - protein, 364 aa, Zea mays subsp. mays
  peptide (1)..(364): Ceres Seq. ID no. 12419088
  misc_feature (226)..(364): Pfam Name: MARCKS family Pfam Description: MARCKS family
  misc_feature (185)..(305): Homolog of NCBI NO: 3850816 NR Description: U2 snRNP auxiliary factor, small subunit [Oryza
  misc_feature (100)..(331): Homolog of NCBI NO: 22958408 NR Description: hypothetical protein [Rhodobacter sphaeroides]
  misc_feature (175)..(307): Homolog of NCBI NO: 17221665 NR Description: circumsporozoite protein [Plasmodium vinckei
  misc_feature (23)..(331): Homolog of NCBI NO: 23019271 NR Description: hypothetical protein [Thermobifida fusca]
  misc_feature (93)..(293): Homolog of NCBI NO: 7494125 NR Description: myosin-IA - Acanthamoeba castellanii
  misc_feature (99)..(316): Homolog of NCBI NO: 23018055 NR Description: hypothetical protein [Thermobifida fusca]
  misc_feature (206)..(323): Homolog of NCBI NO: 29367367 NR Description: calmodulin-related protein
  misc_feature (95)..(324): Homolog of NCBI NO: 23018055 NR Description: hypothetical protein [Thermobifida fusca]
  misc_feature (84)..(307): Homolog of NCBI NO: 29247944 NR Description: GLP_26_54603_52153 [Giardia lamblia ATCC 50803]
  misc_feature (167)..(306): Homolog of NCBI NO: 29829093 NR Description: putative translation initiation factor IF-2
  misc_feature (97)..(97): Xaa is any aa, unknown or other
ARDHYLEHPNRKTIQAIASAHRQPKPTGHHHYATPIAMAATTPAPPSHGGGRNGTLPTPLPSNESFSKFFESWISEQSRDLEELRAAASADPPAPEXRAPAPRGPGARPLRAVLPRQGGGRGRRRALHVHPVLDLHHREPLPLVRRLAPHRRDPAAVHQVRDAAAAPAPRLPRRRGPQGRPRRPRRRAAPGRRPAAAPHHPEGARDRGRRRERTGSADDGDDGGARGRRREGGGGHGPGDAGEGGGDEAGAGDGGRAAPRDDARGGGAAPPRAGRALPPRRRRAPPRRARLRAPQGRPRRQRRRRRAAGVTDAGARETITGLPACLAALLLLVSCSWGAPCSKRRMAAPARARAFVAPDVALVA

SEQ ID NO: 18662 - protein, 327 aa, Zea mays subsp. mays
  peptide (1)..(327): Ceres Seq. ID no. 12419089
  misc_feature (189)..(327): Pfam Name: MARCKS family Pfam Description: MARCKS family
  misc_feature (148)..(268): Homolog of NCBI NO: 3850816 NR Description: U2 snRNP auxiliary factor, small subunit [Oryza
  misc_feature (63)..(294): Homolog of NCBI NO: 22958408 NR Description: hypothetical protein [Rhodobacter sphaeroides]
  misc_feature (138)..(270): Homolog of NCBI NO: 17221665 NR Description: circumsporozoite protein [Plasmodium vinckei
  misc_feature (1)..(294): Homolog of NCBI NO: 23019271 NR Description: hypothetical protein [Thermobifida fusca]
  misc_feature (56)..(256): Homolog of NCBI NO: 7494125 NR Description: myosin-IA - Acanthamoeba castellanii
  misc_feature (62)..(279): Homolog of NCBI NO: 23018055 NR Description: hypothetical protein [Thermobifida fusca]
  misc_feature (169)..(286): Homolog of NCBI NO: 29367367 NR Description: calmodulin-related protein
  misc_feature (58)..(287): Homolog of NCBI NO: 23018055 NR Description: hypothetical protein [Thermobifida fusca]
  misc_feature (47)..(270): Homolog of NCBI NO: 29247944 NR Description: GLP_26_54603_52153 [Giardia lamblia ATCC 50803]
  misc_feature (130)..(269): Homolog of NCBI NO: 29829093 NR Description: putative translation initiation factor IF-2
  misc_feature (60)..(60): Xaa is any aa, unknown or other
MAATTPAPPSHGGGRNGTLPTPLPSNESFSKFFESWISEQSRDLEELRAAASADPPAPEXRAPAPRGPGARPLRAVLPRQGGGRGRRRALHVHPVLDLHHREPLPLVRRLAPHRRDPAAVHQVRDAAAAPAPRLPRRRGPQGRPRRPRRRAAPGRRPAAAPHHPEGARDRGRRRERTGSADDGDDGGARGRRREGGGGHGPGDAGEGGGDEAGAGDGGRAAPRDDARGGGAAPPRAGRALPPRRRRAPPRRARLRAPQGRPRRQRRRRRAAGVTDAGARETITGLPACLAALLLLVSCSWGAPCSKRRMAAPARARAFVAPDVALVA

SEQ ID NO: 18663 - protein, 182 aa, Zea mays subsp. mays
  peptide (1)..(182): Ceres Seq. ID no. 12419090
  misc_feature (61)..(173): Homolog of NCBI NO: 34905698 NR Description: P0552C05.19 [Oryza sativa (japonica
  misc_feature (1)..(46): Homolog of NCBI NO: 15233972 NR Description: putative protein; protein id: At4g18660.1
  misc_feature (47)..(171): Homolog of NCBI NO: 15233972 NR Description: putative protein; protein id: At4g18660.1
  misc_feature (1)..(171): Homolog of NCBI NO: 8777471 NR Description: tumor-related protein-like [Arabidopsis thaliana]
  misc_feature (1)..(171): Homolog of NCBI NO: 15231945 NR Description: hypothetical protein; protein id: At3g14880.1
  misc_feature (1)..(179): Homolog of NCBI NO: 15233977 NR Description: putative protein; protein id: At4g18680.1
  misc_feature (1)..(179): Homolog of NCBI NO: 15233979 NR Description: putative protein; protein id: At4g18690.1
  misc_feature (1)..(171): Homolog of NCBI NO: 30694832 NR Description: tumor-related protein-like [Arabidopsis thaliana]
  misc_feature (1)..(177): Homolog of NCBI NO: 688423 NR Description: tumor-related protein [Nicotiana glauca x
  misc_feature (1)..(181): Homolog of NCBI NO: 34896008 NR Description: ESTs AU057825(S21823),AU057072(S21123) correspond a region of the predicted gene.~Similar to Nicotiana glauca X
MFTPSWTSTTENLYLWCGGWRPTAAIQLLYTKSGMQLQHQLPAFLDGGGLKDDLGDLGAAQLQAADQLQRRTIRREREIEDAAASAQEALTTATMVELAGGGGREAGAMDREMQAKAEGMRRVLEMADALRLETMREVVALLRPAQAVHFLLAAAELHLAVHDFGRRKDGRAGNVAAAAPPE

SEQ ID NO: 18664 - DNA, 1651 bp, Zea mays subsp. mays
  misc_feature (1)..(1651): Ceres Seq. ID no. 12435629
  misc_feature: MA Experiment ID: 108527 Result: Down-regulated in Transcription
  misc_feature: MA Experiment 108527 PARAMETER Experiment Name: Zm_5mM_NO_P Parameter: Age (day) Value: 8
  misc_feature: MA Experiment 108527 PARAMETER Experiment Name: Zm_5mM_NO_P Parameter: Organism Value: Zea mays
  misc_feature: MA Experiment 108527 PARAMETER Experiment Name: Zm_5mM_NO_P Parameter: Plant Line Value: 35A19
  misc_feature: MA Experiment 108527 PARAMETER Experiment Name: Zm_5mM_NO_P Parameter: Timepoint (hr) Value: 6
  misc_feature: MA Experiment 108527 PARAMETER Experiment Name: Zm_5mM_NO_P Parameter: Tissue Value: Aerial
  misc_feature: MA Experiment 108527 PARAMETER Experiment Name: Zm_5mM_NO_P Parameter: Treatment Value: 5mM NO vs. No Treatment
  misc_feature: MA Experiment ID: 108535 Result: Up-regulated in Transcription
  misc_feature: MA Experiment 108535 PARAMETER Experiment Name: Zm_Meristem_P Parameter: Age (day) Value: 8
  misc_feature: MA Experiment 108535 PARAMETER Experiment Name: Zm_Meristem_P Parameter: Organism Value: Zea mays
  misc_feature: MA Experiment 108535 PARAMETER Experiment Name: Zm_Meristem_P Parameter: Plant Line Value: 35A19
  misc_feature: MA Experiment 108535 PARAMETER Experiment Name: Zm_Meristem_P Parameter: Tissue Value: Root Meristem vs. Above Root Meristem
  misc_feature: MA Experiment ID: 108559 Result: Down-regulated in Transcription
  misc_feature: MA Experiment 108559 PARAMETER Experiment Name: Zm_5mM_NO_P Parameter: Age (day) Value: 8
  misc_feature: MA Experiment 108559 PARAMETER Experiment Name: Zm_5mM_NO_P Parameter: Organism Value: Zea mays
  misc_feature: MA Experiment 108559 PARAMETER Experiment Name: Zm_5mM_NO_P Parameter: Plant Line Value: 35A19
  misc_feature: MA Experiment 108559 PARAMETER Experiment Name: Zm_5mM_NO_P Parameter: Timepoint (hr) Value: 12
  misc_feature: MA Experiment 108559 PARAMETER Experiment Name: Zm_5mM_NO_P Parameter: Tissue Value: Aerial
  misc_feature: MA Experiment 108559 PARAMETER Experiment Name: Zm_5mM_NO_P Parameter: Treatment Value: 5mM NO vs. No Treatment
gtcaactaaactctagccagtgagtcgatgatgggtcggacgggtgacggccgccgccgcgacgtcgacggccggctggaggcgctgctctctggcgccggcggcgaggagccgtggctccggcgcgtggcgctcgcgacggctctggagctgcggctgctggcgccctggccgcgccggccgtggtggtctacatgctcatcatcgtcatgtcgtcgaccacgcagatcgtgtgcggccagctcggcaacgtccagctcgccgccgcctccctcggcaacaacggcatccaggtcttcgcctacggcatcatgctggggatgggcagcgcggtggagacgctgtgcgggcaggcgtacggcgccgagaagtacgagatgctgggcgtgtacctgcagcgctcgacggtgctgctcacggccaccggcgtgccgctcgccgccgtgtacgcgctgtcggagccgctgctgctgctgctggggcagtcgcctgagatcgccggcgccgccgccgagttcgcctacggcctcgtcccgcagatcttcgcgtacgccgccaacttccccatccagaagttcctgcaggcgcagagcatcgtggcgcccagcgcctacatcctggcggccagcttcgcgctccacgtgccgctcagctggctcgccgtctacgggctgggcctcggcctgctcggggcctcgctcacgctcagcctcacgtggtgggtgctggtcctggcccagttcgcgtacatcgtgtggagcccgcgctgccgggccacctggaccgggtttacgtgggctgccttcgccgacctgcccgggttcgccggcctgtccgcggcgtcggctgtcatgctggcgctcgaggtctggtacttccaggtgctcatcctcctcgccggcgtgctgcctgacccgcagatcgctctggactcgctaacggtctgcacgtcgatccagtcatgggtgttcatgatctctgtgggcttcaatgcagctgccagcgtgagggttgggaatgagctgggcgccggcaaccccaggtccgccgcgttctctgcgtgggtggtcaccgccctgtcggcgttcgtctctgggatagctggcctcgtcactttcctgctcagggacaagctcagctacatcttcaccggtggcgaggccgtctcgcgcgccgtcgtcgacttgtgcccgctgctcgttgggaccattgtgctctgcgggatccagcccgtgctatcaggtgtggccgttggctgcgggtggcaagccatggttgcctacatcaacgtcggatgctactacttcatcggcgtacccctcgggcgtgctcctcggattcaagttcggtttcgggatcaagggactgtggggaggcatgattgggggtaccctcatccaaacacttgctttgatctggatcacgttaagaactgactggaacaaggaggtcgaggaagcgcggaaaagattggataagtgggacgacacaaggcagcctcttctcgcaagcaaggagtgatgtatgatggtacaggagtggatgaagaagattcagtaggcttctgctagctgatccagtctgaaatcatcttgtagtcgccaccgctaactgcaattcagggatgtactaatgcagagcttctctgggc

SEQ ID NO: 18665 - protein, 413 aa, Zea mays subsp. mays
  peptide (1)..(413): Ceres Seq. ID no. 12435630
  misc_feature (1)..(377): Homolog of NCBI NO: 21553843 NR Description: unknown [Arabidopsis thaliana]
  misc_feature (1)..(377): Homolog of NCBI NO: 18415793 NR Description: putative protein; protein id: At4g21910.1
  misc_feature (1)..(377): Homolog of NCBI NO: 18407368 NR Description: expressed protein
  misc_feature (1)..(377): Homolog of NCBI NO: 15081773 NR Description: At1g61890/F8K4_9 [Arabidopsis thaliana]
  misc_feature (1)..(377): Homolog of NCBI NO: 22655139 NR Description: unknown protein [Arabidopsis thaliana]
  misc_feature (1)..(377): Homolog of NCBI NO: 15221073 NR Description: unknown protein; protein id: At1g11670.1
  misc_feature (1)..(377): Homolog of NCBI NO: 20466556 NR Description: integral membrane protein, putative [Arabidopsis
  misc_feature (1)..(377): Homolog of NCBI NO: 15233127 NR Description: integral membrane protein, putative
  misc_feature (333)..(413): Homolog of NCBI NO: 34901880 NR Description: putative Multidrug resistance protein norM
  misc_feature (1)..(377): Homolog of NCBI NO: 34901880 NR Description: putative Multidrug resistance protein norM
MLIIVMSSTTQIVCGQLGNVQLAAASLGNNGIQVFAYGIMLGMGSAVETLCGQAYGAEKYEMLGVYLQRSTVLLTATGVPLAAVYALSEPLLLLLGQSPEIAGAAAEFAYGLVPQIFAYAANFPIQKFLQAQSIVAPSAYILAASFALHVPLSWLAVYGLGLGLLGASLTLSLTWWVLVLAQFAYIVWSPRCRATWTGFTWAAFADLPGFAGLSAASAVMLALEVWYFQVLILLAGVLPDPQIALDSLTVCTSIQSWVFMISVGFNAAASVRVGNELGAGNPRSAAFSAWVVTALSAFVSGIAGLVTFLLRDKLSYIFTGGEAVSRAVVDLCPLLVGTIVLCGIQPVLSGVAVGCGWQAMVAYINVGCYYFIGVPLGRAPRIQVRFRDQGTVGRHDWGYPHPNTCFDLDHVKN

SEQ ID NO: 18666 - protein, 408 aa, Zea mays subsp. mays
  peptide (1)..(408): Ceres Seq. ID no. 12435631
  misc_feature (1)..(372): Homolog of NCBI NO: 21553843 NR Description: unknown [Arabidopsis thaliana]
  misc_feature (1)..(372): Homolog of NCBI NO: 18415793 NR Description: putative protein; protein id: At4g21910.1
  misc_feature (1)..(372): Homolog of NCBI NO: 18407368 NR Description: expressed protein
  misc_feature (1)..(372): Homolog of NCBI NO: 15081773 NR Description: At1g61890/F8K4_9 [Arabidopsis thaliana]
  misc_feature (1)..(372): Homolog of NCBI NO: 22655139 NR Description: unknown protein [Arabidopsis thaliana]
  misc_feature (1)..(372): Homolog of NCBI NO: 15221073 NR Description: unknown protein; protein id: At1g11670.1
  misc_feature (1)..(372): Homolog of NCBI NO: 20466556 NR Description: integral membrane protein, putative [Arabidopsis
  misc_feature (1)..(372): Homolog of NCBI NO: 15233127 NR Description: integral membrane protein, putative
  misc_feature (328)..(408): Homolog of NCBI NO: 34901880 NR Description: putative Multidrug resistance protein norM
  misc_feature (1)..(372): Homolog of NCBI NO: 34901880 NR Description: putative Multidrug resistance protein norM
MSSTTQIVCGQLGNVQLAAASLGNNGIQVFAYGIMLGMGSAVETLCGQAYGAEKYEMLGVYLQRSTVLLTATGVPLAAVYALSEPLLLLLGQSPEIAGAAAEFAYGLVPQIFAYAANFPIQKFLQAQSIVAPSAYILAASFALHVPLSWLAVYGLGLGLLGASLTLSLTWWVLVLAQFAYIVWSPRCRATWTGFTWAAFADLPGFAGLSAASAVMLALEVWYFQVLILLAGVLPDPQIALDSLTVCTSIQSWVFMISVGFNAAASVRVGNELGAGNPRSAAFSAWVVTALSAFVSGIAGLVTFLLRDKLSYIFTGGEAVSRAVVDLCPLLVGTIVLCGIQPVLSGVAVGCGWQAMVAYINVGCYYFIGVPLGRAPRIQVRFRDQGTVGRHDWGYPHPNTCFDLDHVKN

SEQ ID NO: 18667 - protein, 374 aa, Zea mays subsp. mays
  peptide (1)..(374): Ceres Seq. ID no. 12435632
  misc_feature (1)..(338): Homolog of NCBI NO: 15233127 NR Description: integral membrane protein, putative
  misc_feature (294)..(374): Homolog of NCBI NO: 34901880 NR Description: putative Multidrug resistance protein norM
  misc_feature (1)..(338): Homolog of NCBI NO: 34901880 NR Description: putative Multidrug resistance protein norM
  misc_feature (1)..(338): Homolog of NCBI NO: 21553843 NR Description: unknown [Arabidopsis thaliana]
  misc_feature (1)..(338): Homolog of NCBI NO: 18415793 NR Description: putative protein; protein id: At4g21910.1
  misc_feature (1)..(338): Homolog of NCBI NO: 18407368 NR Description: expressed protein
  misc_feature (1)..(338): Homolog of NCBI NO: 15081773 NR Description: At1g61890/F8K4_9 [Arabidopsis thaliana]
  misc_feature (1)..(338): Homolog of NCBI NO: 22655139 NR Description: unknown protein [Arabidopsis thaliana]
  misc_feature (1)..(338): Homolog of NCBI NO: 15221073 NR Description: unknown protein; protein id: At1g11670.1
  misc_feature (1)..(338): Homolog of NCBI NO: 20466556 NR Description: integral membrane protein, putative [Arabidopsis
MLGMGSAVETLCGQAYGAEKYEMLGVYLQRSTVLLTATGVPLAAVYALSEPLLLLLGQSPEIAGAAAEFAYGLVPQIFAYAANFPIQKFLQAQSIVAPSAYILAASFALHVPLSWLAVYGLGLGLLGASLTLSLTWWVLVLAQFAYIVWSPRCRATWTGFTWAAFADLPGFAGLSAASAVMLALEVWYFQVLILLAGVLPDPQIALDSLTVCTSIQSWVFMISVGFNAAASVRVGNELGAGNPRSAAFSAWVVTALSAFVSGIAGLVTFLLRDKLSYIFTGGEAVSRAVVDLCPLLVGTIVLCGIQPVLSGVAVGCGWQAMVAYINVGCYYFIGVPLGRAPRIQVRFRDQGTVGRHDWGYPHPNTCFDLDHVKN

SEQ ID NO: 18668 - DNA, 1784 bp, Zea mays subsp. mays
  misc_feature (1)..(1784): Ceres Seq. ID no. 15180518
  misc_feature: MA Experiment ID: 20000477 Result: Down-regulated in Transcription
  misc_feature: MA Experiment 20000477 PARAMETER Experiment Name: Zm_5mM_SA_P Parameter: Age (day) Value: 10
  misc_feature: MA Experiment 20000477 PARAMETER Experiment Name: Zm_5mM_SA_P Parameter: Organism Value: Zea mays
  misc_feature: MA Experiment 20000477 PARAMETER Experiment Name: Zm_5mM_SA_P Parameter: Plant Line Value: 35A19
  misc_feature: MA Experiment 20000477 PARAMETER Experiment Name: Zm_5mM_SA_P Parameter: Timepoint (hr) Value: 48
  misc_feature: MA Experiment 20000477 PARAMETER Experiment Name: Zm_5mM_SA_P Parameter: Tissue Value: Aerial
  misc_feature: MA Experiment 20000477 PARAMETER Experiment Name: Zm_5mM_SA_P Parameter: Treatment Value: 5mM SA vs. No Treatment
  misc_feature: MA Experiment ID: 20000492 Result: Down-regulated in Transcription
  misc_feature: MA Experiment 20000492 PARAMETER Experiment Name: Zm_Hybrid_Seed_Dev_P Parameter: DAP Value: 12
  misc_feature: MA Experiment 20000492 PARAMETER Experiment Name: Zm_Hybrid_Seed_Dev_P Parameter: Organism Value: Zea mays
  misc_feature: MA Experiment 20000492 PARAMETER Experiment Name: Zm_Hybrid_Seed_Dev_P Parameter: Plant Line Value: 35A19
  misc_feature: MA Experiment 20000492 PARAMETER Experiment Name: Zm_Hybrid_Seed_Dev_P Parameter: Tissue Value: Fert Kernel vs. Unfert Floret
actttcccagggagcgtttaattgcctccgcctgcctcgctctcgcttccttcggatgccgctctgcctctgccgcgcccgccagctgcacgcagttcagcaacgcgcgcgccacggcccgcgacgcgatgagcgagaggaggaggcgggcgagcgctgcttccctcgggggtggaggtggcggcggcgttggtggtgttgcgcctgcgcgggccgaggaggacaaggtcgcggcgccgggtaaagcgcctccgccgacggtgtggttcgcgttcaagcggtcgctgcactgccgctccgagccgtcggaggtccacgtgccgcgtgccaaggccggtcccgtcgcgggcgggggcgccggcgcggctgtcggcggcggccacctgtcgtcgatcgtcaccaagcgcgccgcgcggtcggggtgctcgcgctccatcgccaacctccgggacgtcatccacgggagcaagcgccacccggggcagccgcccagctgcagcccgcggtccatcggcagcagcgagttcctcaaccccattgcacacgaggtcgtgctcagcaccaactcccgctgcgagctcaagatcaccggcttcggcggctgcggggggctggcggccgtcggggtggggaccggcgccgcgaacgacgccgacggcgggggcgacggcggcgtcgtgtcgtcgttcgtcggcacgctccgccctggcacgccgggcccagcgtgggccggacacggactgccgtacagcggctccgtgcggggcagcgtgcgctgcacgccgccgaggtcgccgaacgtgatgctcgagaggaatggctcagtggtgaacggccaccgcgcgtcatgcgacgaaaccgctaaaaacggcgccagcaagggctccggtgggctcagctgccacaagtgcggcgagcagttcagcaagtgggaggcgctggaggcgcaccacctctccaaacacgcagtgacggagctggtggaaggggactcgtcgcggaagatcgtggagatcatctgccggacgagcctgctcaagtcggagagcagctgcgtccggatcgagcgcgtgttcaaggtgcacaacacgcagcggacgctgtcccgcttcgaggagtaccgcgaggccgtgaagctcaaggcgagcaagctagccaagaagcacccgcgctgcctcgccgacggcaacgagctgctgcgcttccacggcgccacgctctcgtgcgcgctcggcggcggctccggctcttccagcctctgcgcctccgacaagtgcgccgtgtgccgcatcatccggcacggcttctccgccaggaaggagggcaagggcggcgtgggcgtgttcaccacgtccaccagcggccgcgcgttcgagtccatcgttgaggcgccccccgccatcggcgtcggcgacgacgacggagcgggccagctgggcctgggcaccgcgcgcagggcgctgctggtgtgcagggtcatcgccggccgcgtgcacaagccgctggacaacctcaaggagttcgtggggcagacgggcttcgattcgctcgccggcaaggtcggaccctactccaacatcgaggagctgtacctgctgaacccgagggcgctgctcccgtgcttcgtcgtcatctgtagaccgtagcctactactagctaaacacaccgtctcattcttctctcttcccacttttctctttcgattgctactctagtgtacgtagttaacacggacacggcatagctatcgcctatcggttggaaggtcggatggatttgtcct

SEQ ID NO: 18669 - protein, 547 aa, Zea mays subsp. mays
  peptide (1)..(547): Ceres Seq. ID no. 15180519
  misc_feature (298)..(321): Pfam Name: Zinc finger, C2H2 type Pfam Description: Zinc finger, C2H2 type
  misc_feature (299)..(546): Homolog of NCBI NO: 5777616 NR Description: CAA30374.1 protein [Oryza sativa]
  misc_feature (299)..(544): Homolog of NCBI NO: 15220992 NR Description: reverse transcriptase-related [Arabidopsis
  misc_feature (294)..(520): Homolog of NCBI NO: 6554199 NR Description: T23J18.16 [Arabidopsis thaliana]
  misc_feature (299)..(544): Homolog of NCBI NO: 9802582 NR Description: T2E6.3 [Arabidopsis thaliana]
  misc_feature (299)..(544): Homolog of NCBI NO: 15222333 NR Description: expressed protein [Arabidopsis thaliana]
  misc_feature (294)..(547): Homolog of NCBI NO: 15220394 NR Description: hypothetical protein [Arabidopsis thaliana]
  misc_feature (85)..(211): Homolog of NCBI NO: 18416951 NR Description: expressed protein [Arabidopsis thaliana]
  misc_feature (227)..(547): Homolog of NCBI NO: 18416951 NR Description: expressed protein [Arabidopsis thaliana]
  misc_feature (85)..(547): Homolog of NCBI NO: 15239695 NR Description: expressed protein [Arabidopsis thaliana]
  misc_feature (43)..(546): Homolog of NCBI NO: 34910152 NR Description: B1070A12.19 [Oryza sativa (japonica
FPRERLIASACLALASFGCRSASAAPASCTQFSNARATARDAMSERRRRASAASLGGGGGGGVGGVAPARAEEDKVAAPGKAPPPTVWFAFKRSLHCRSEPSEVHVPRAKAGPVAGGGAGAAVGGGHLSSIVTKRAARSGCSRSIANLRDVIHGSKRHPGQPPSCSPRSIGSSEFLNPIAHEVVLSTNSRCELKITGFGGCGGLAAVGVGTGAANDADGGGDGGVVSSFVGTLRPGTPGPAWAGHGLPYSGSVRGSVRCTPPRSPNVMLERNGSVVNGHRASCDETAKNGASKGSGGLSCHKCGEQFSKWEALEAHHLSKHAVTELVEGDSSRKIVEIICRTSLLKSESSCVRIERVFKVHNTQRTLSRFEEYREAVKLKASKLAKKHPRCLADGNELLRFHGATLSCALGGGSGSSSLCASDKCAVCRIIRHGFSARKEGKGGVGVFTTSTSGRAFESIVEAPPAIGVGDDDGAGQLGLGTARRALLVCRVIAGRVHKPLDNLKEFVGQTGFDSLAGKVGPYSNIEELYLLNPRALLPCFVVICRP

SEQ ID NO: 18670 - protein, 505 aa, Zea mays subsp. mays
  peptide (1)..(505): Ceres Seq. ID no. 15180520
  misc_feature (256)..(279): Pfam Name: Zinc finger, C2H2 type Pfam Description: Zinc finger, C2H2 type
  misc_feature (257)..(504): Homolog of NCBI NO: 5777616 NR Description: CAA30374.1 protein [Oryza sativa]
  misc_feature (257)..(502): Homolog of NCBI NO: 15220992 NR Description: reverse transcriptase-related [Arabidopsis
  misc_feature (252)..(478): Homolog of NCBI NO: 6554199 NR Description: T23J18.16 [Arabidopsis thaliana]
  misc_feature (257)..(502): Homolog of NCBI NO: 9802582 NR Description: T2E6.3 [Arabidopsis thaliana]
  misc_feature (257)..(502): Homolog of NCBI NO: 15222333 NR Description: expressed protein [Arabidopsis thaliana]
  misc_feature (252)..(505): Homolog of NCBI NO: 15220394 NR Description: hypothetical protein [Arabidopsis thaliana]
  misc_feature (43)..(169): Homolog of NCBI NO: 18416951 NR Description: expressed protein [Arabidopsis thaliana]
  misc_feature (185)..(505): Homolog of NCBI NO: 18416951 NR Description: expressed protein [Arabidopsis thaliana]
  misc_feature (43)..(505): Homolog of NCBI NO: 15239695 NR Description: expressed protein [Arabidopsis thaliana]
  misc_feature (1)..(504): Homolog of NCBI NO: 34910152 NR Description: B1070A12.19 [Oryza sativa (japonica
MSERRRRASAASLGGGGGGGVGGVAPARAEEDKVAAPGKAPPPTVWFAFKRSLHCRSEPSEVHVPRAKAGPVAGGGAGAAVGGGHLSSIVTKRAARSGCSRSIANLRDVIHGSKRHPGQPPSCSPRSIGSSEFLNPIAHEVVLSTNSRCELKITGFGGCGGLAAVGVGTGAANDADGGGDGGVVSSFVGTLRPGTPGPAWAGHGLPYSGSVRGSVRCTPPRSPNVMLERNGSVVNGHRASCDETAKNGASKGSGGLSCHKCGEQFSKWEALEAHHLSKHAVTELVEGDSSRKIVEIICRTSLLKSESSCVRIERVFKVHNTQRTLSRFEEYREAVKLKASKLAKKHPRCLADGNELLRFHGATLSCALGGGSGSSSLCASDKCAVCRIIRHGFSARKEGKGGVGVFTTSTSGRAFESIVEAPPAIGVGDDDGAGQLGLGTARRALLVCRVIAGRVHKPLDNLKEFVGQTGFDSLAGKVGPYSNIEELYLLNPRALLPCFVVICRP

SEQ ID NO: 18671 - protein, 280 aa, Zea mays subsp. mays
  peptide (1)..(280): Ceres Seq. ID no. 15180521
  misc_feature (31)..(54): Pfam Name: Zinc finger, C2H2 type Pfam Description: Zinc finger, C2H2 type
  misc_feature (56)..(280): Homolog of NCBI NO: 38346001 NR Description: OSJNBa0073L13.11 [Oryza sativa (japonica
  misc_feature (32)..(279): Homolog of NCBI NO: 5777616 NR Description: CAA30374.1 protein [Oryza sativa]
  misc_feature (32)..(277): Homolog of NCBI NO: 15220992 NR Description: reverse transcriptase-related [Arabidopsis
  misc_feature (27)..(253): Homolog of NCBI NO: 6554199 NR Description: T23J18.16 [Arabidopsis thaliana]
  misc_feature (32)..(277): Homolog of NCBI NO: 9802582 NR Description: T2E6.3 [Arabidopsis thaliana]
  misc_feature (32)..(277): Homolog of NCBI NO: 15222333 NR Description: expressed protein [Arabidopsis thaliana]
  misc_feature (27)..(280): Homolog of NCBI NO: 15220394 NR Description: hypothetical protein [Arabidopsis thaliana]
  misc_feature (1)..(280): Homolog of NCBI NO: 18416951 NR Description: expressed protein [Arabidopsis thaliana]
  misc_feature (1)..(280): Homolog of NCBI NO: 15239695 NR Description: expressed protein [Arabidopsis thaliana]
  misc_feature (1)..(279): Homolog of NCBI NO: 34910152 NR Description: B1070A12.19 [Oryza sativa (japonica
MLERNGSVVNGHRASCDETAKNGASKGSGGLSCHKCGEQFSKWEALEAHHLSKHAVTELVEGDSSRKIVEIICRTSLLKSESSCVRIERVFKVHNTQRTLSRFEEYREAVKLKASKLAKKHPRCLADGNELLRFHGATLSCALGGGSGSSSLCASDKCAVCRIIRHGFSARKEGKGGVGVFTTSTSGRAFESIVEAPPAIGVGDDDGAGQLGLGTARRALLVCRVIAGRVHKPLDNLKEFVGQTGFDSLAGKVGPYSNIEELYLLNPRALLPCFVVICRP

SEQ ID NO: 18672 - DNA, 1483 bp, Zea mays subsp. mays
  misc_feature (1)..(1483): Ceres Seq. ID no. 12391498
  misc_feature: MA Experiment ID: 108529 Result: Down-regulated in Transcription
  misc_feature: MA Experiment 108529 PARAMETER Experiment Name: Zm_Imbibed_Seeds_P Parameter: Age (day) Value: 5 vs. 2
  misc_feature: MA Experiment 108529 PARAMETER Experiment Name: Zm_Imbibed_Seeds_P Parameter: Organism Value: Zea mays
  misc_feature: MA Experiment 108529 PARAMETER Experiment Name: Zm_Imbibed_Seeds_P Parameter: Plant Line Value: 35A19
  misc_feature: MA Experiment 108529 PARAMETER Experiment Name: Zm_Imbibed_Seeds_P Parameter: Tissue Value: Roots vs. Embryo
  misc_feature: MA Experiment ID: 108536 Result: Down-regulated in Transcription
  misc_feature: MA Experiment 108536 PARAMETER Experiment Name: Zm_Meristem_P Parameter: Age (day) Value: 8
  misc_feature: MA Experiment 108536 PARAMETER Experiment Name: Zm_Meristem_P Parameter: Organism Value: Zea mays
  misc_feature: MA Experiment 108536 PARAMETER Experiment Name: Zm_Meristem_P Parameter: Plant Line Value: 35A19
  misc_feature: MA Experiment 108536 PARAMETER Experiment Name: Zm_Meristem_P Parameter: Tissue Value: Shoot Meristem vs. Above Shoot Meristem
  misc_feature: MA Experiment ID: 108543 Result: Up-regulated in Transcription
  misc_feature: MA Experiment ID: 20000535 Result: Up-regulated in Transcription
  misc_feature: MA Experiment 20000535 PARAMETER Experiment Name: Zm_Hybrid_Seed_Dev_P Parameter: DAP Value: 30 vs. 12
  misc_feature: MA Experiment 20000535 PARAMETER Experiment Name: Zm_Hybrid_Seed_Dev_P Parameter: Organism Value: Zea mays
  misc_feature: MA Experiment 20000535 PARAMETER Experiment Name: Zm_Hybrid_Seed_Dev_P Parameter: Plant Line Value: 35A19
  misc_feature: MA Experiment 20000535 PARAMETER Experiment Name: Zm_Hybrid_Seed_Dev_P Parameter: Tissue Value: Embryo vs. Unfert Floret
atgttggccgccaatcgcagtatcggcaccgttcttccccgcttctccagtccagctcaccagccgccccccctccgctgctgacactgcgaagtgcgaatcaaagccaccaccgcgcagaaaccatggcaccggtggaagcggagcagcaccggcggagggcgctggcgctcgcggcgcacgacgcctccggcgccgtctcccccatccgcatctcgcgaagggacactggagatgacgatgttgccatacagatactgtactgcgggatatgccactctgacctgcacaccatcaagaacgagtggaagaacgccaactatcctgttgtccctgggcacgagatcgccgggctgatcaccgaggttggcaagaatgtgaagaggttcaacgtcggagacaaggttggcgtcgggtgcatggtcaacacatgccagtcctgcgagagctgcgagggagggcacgagaactactgctccaagatcatcttcacctacaactcccacgacagggacggcaccgtcacctacggtggctactctgacatggttgtcgtcgacgagcgcttcgtcatccggttccctgatggcatgcccctcgacagaggcgcgccgctgctctgcgctgggataaccgtgtacaaccccatgaagcaccacgggctgaacgaggcaggcaagcacatcggcgtggttggacttggggggcttgggcatgtcgccgtgaagttcgcgaaggcgttcgggatgagggtgaccgtgatcagcacgtccccggggaagagggaggaagctatggagacgcttggtgcggacgcctttgttgtcagcagtgatgctaaccagatgaaggcggcgaagggcacaatggatggcattatgaacacggcctccgcaagcatgtccatgtacgcttaccttgctctcctcaagccccagggcaagatgatcctgcttggcctgcctgagaagcctctgcagatctccgccttctctttggttactgggggcaagactctggccgggagctgcatggggagcatcagggacacgcaggagatgatggacttcgcagccaagcacgggttgacagcggacatcgaactgatcggcaccgaagaagttaatgaggccatggaacgcctcgccaagggcgaggtcaggtaccgcttcgtcatcgacatcggcaacaccatcagcgcggcatcactagggagctcgccggtcccagctctgtagctgcgacacttgttcctgcttggatatatcgtgcgataagcaagtatatttggaataaaaaggaactcaatttaaacgcaagtaatactgtttgtctttggtcctatttgggctttggtttattgggtactgcatagttttgccctcctcttgtagtctagtagtaacggatcaaacgttttttactgagagagacaaaaccagtccgtgctgctgaattaaggacacaaatttaaaaatccctt

SEQ ID NO: 18673 - protein, 411 aa, Zea mays subsp. mays
  peptide (1)..(411): Ceres Seq. ID no. 12391499
  misc_feature (42)..(399): Homolog of NCBI NO: 15235022 NR Description: cinnamyl-alcohol dehydrogenase CAD1
  misc_feature (53)..(400): Homolog of NCBI NO: 10720088 NR Description: Probable mannitol dehydrogenase (NAD-dependent
  misc_feature (48)..(403): Homolog of NCBI NO: 22475166 NR Description: putative sinapyl alcohol dehydrogenase
  misc_feature (42)..(400): Homolog of NCBI NO: 33519154 NR Description: 10-hydroxygeraniol oxidoreductase [Camptotheca
  misc_feature (50)..(400): Homolog of NCBI NO: 10720090 NR Description: Probable mannitol dehydrogenase (NAD-dependent
  misc_feature (42)..(400): Homolog of NCBI NO: 14279694 NR Description: sinapyl alcohol dehydrogenase [Populus
  misc_feature (45)..(402): Homolog of NCBI NO: 37534606 NR Description: putative cinnamyl alcohol dehydrogenase
  misc_feature (42)..(398): Homolog of NCBI NO: 19849248 NR Description: cinnamyl alcohol dehydrogenase [Lolium perenne]
  misc_feature (283)..(398): Homolog of NCBI NO: 38568021 NR Description: OSJNBa0070C17.13 [Oryza sativa (japonica
  misc_feature (49)..(283): Homolog of NCBI NO: 38568021 NR Description: OSJNBa0070C17.13 [Oryza sativa (japonica
VGRQSQYRHRSSPLLQSSSPAAPPPLLTLRSANQSHHRAETMAPVEAEQHRRRALALAAHDASGAVSPIRISRRDTGDDDVAIQILYCGICHSDLHTIKNEWKNANYPVVPGHEIAGLITEVGKNVKRFNVGDKVGVGCMVNTCQSCESCEGGHENYCSKIIFTYNSHDRDGTVTYGGYSDMVVVDERFVIRFPDGMPLDRGAPLLCAGITVYNPMKHHGLNEAGKHIGVVGLGGLGHVAVKFAKAFGMRVTVISTSPGKREEAMETLGADAFVVSSDANQMKAAKGTMDGIMNTASASMSMYAYLALLKPQGKMILLGLPEKPLQISAFSLVTGGKTLAGSCMGSIRDTQEMMDFAAKHGLTADIELIGTEEVNEAMERLAKGEVRYRFVIDIGNTISAASLGSSPVPAL

SEQ ID NO: 18674 - protein, 370 aa, Zea mays subsp. mays
  peptide (1)..(370): Ceres Seq. ID no. 12391500
  misc_feature (1)..(358): Homolog of NCBI NO: 15235022 NR Description: cinnamyl-alcohol dehydrogenase CAD1
  misc_feature (12)..(359): Homolog of NCBI NO: 10720088 NR Description: Probable mannitol dehydrogenase (NAD-dependent
  misc_feature (7)..(362): Homolog of NCBI NO: 22475166 NR Description: putative sinapyl alcohol dehydrogenase
  misc_feature (1)..(359): Homolog of NCBI NO: 33519154 NR Description: 10-hydroxygeraniol oxidoreductase [Camptotheca
  misc_feature (9)..(359): Homolog of NCBI NO: 10720090 NR Description: Probable mannitol dehydrogenase (NAD-dependent
  misc_feature (1)..(359): Homolog of NCBI NO: 14279694 NR Description: sinapyl alcohol dehydrogenase [Populus
  misc_feature (4)..(361): Homolog of NCBI NO: 37534606 NR Description: putative cinnamyl alcohol dehydrogenase
  misc_feature (1)..(357): Homolog of NCBI NO: 19849248 NR Description: cinnamyl alcohol dehydrogenase [Lolium perenne]
  misc_feature (242)..(357): Homolog of NCBI NO: 38568021 NR Description: OSJNBa0070C17.13 [Oryza sativa (japonica
  misc_feature (8)..(242): Homolog of NCBI NO: 38568021 NR Description: OSJNBa0070C17.13 [Oryza sativa (japonica
MAPVEAEQHRRRALALAAHDASGAVSPIRISRRDTGDDDVAIQILYCGICHSDLHTIKNEWKNANYPVVPGHEIAGLITEVGKNVKRFNVGDKVGVGCMVNTCQSCESCEGGHENYCSKIIFTYNSHDRDGTVTYGGYSDMVVVDERFVIRFPDGMPLDRGAPLLCAGITVYNPMKHHGLNEAGKHIGVVGLGGLGHVAVKFAKAFGMRVTVISTSPGKREEAMETLGADAFVVSSDANQMKAAKGTMDGIMNTASASMSMYAYLALLKPQGKMILLGLPEKPLQISAFSLVTGGKTLAGSCMGSIRDTQEMMDFAAKHGLTADIELIGTEEVNEAMERLAKGEVRYRFVIDIGNTISAASLGSSPVPAL

SEQ ID NO: 18675 - protein, 272 aa, Zea mays subsp. mays
  peptide (1)..(272): Ceres Seq. ID no. 12391501
  misc_feature (1)..(260): Homolog of NCBI NO: 15235022 NR Description: cinnamyl-alcohol dehydrogenase CAD1
  misc_feature (1)..(261): Homolog of NCBI NO: 10720088 NR Description: Probable mannitol dehydrogenase (NAD-dependent
  misc_feature (1)..(264): Homolog of NCBI NO: 22475166 NR Description: putative sinapyl alcohol dehydrogenase
  misc_feature (1)..(261): Homolog of NCBI NO: 33519154 NR Description: 10-hydroxygeraniol oxidoreductase [Camptotheca
  misc_feature (1)..(261): Homolog of NCBI NO: 10720090 NR Description: Probable mannitol dehydrogenase (NAD-dependent
  misc_feature (1)..(261): Homolog of NCBI NO: 14279694 NR Description: sinapyl alcohol dehydrogenase [Populus
  misc_feature (1)..(263): Homolog of NCBI NO: 37534606 NR Description: putative cinnamyl alcohol dehydrogenase
  misc_feature (1)..(259): Homolog of NCBI NO: 19849248 NR Description: cinnamyl alcohol dehydrogenase [Lolium perenne]
  misc_feature (144)..(259): Homolog of NCBI NO: 38568021 NR Description: OSJNBa0070C17.13 [Oryza sativa (japonica
  misc_feature (1)..(144): Homolog of NCBI NO: 38568021 NR Description: OSJNBa0070C17.13 [Oryza sativa (japonica
MVNTCQSCESCEGGHENYCSKIIFTYNSHDRDGTVTYGGYSDMVVVDERFVIRFPDGMPLDRGAPLLCAGITVYNPMKHHGLNEAGKHIGVVGLGGLGHVAVKFAKAFGMRVTVISTSPGKREEAMETLGADAFVVSSDANQMKAAKGTMDGIMNTASASMSMYAYLALLKPQGKMILLGLPEKPLQISAFSLVTGGKTLAGSCMGSIRDTQEMMDFAAKHGLTADIELIGTEEVNEAMERLAKGEVRYRFVIDIGNTISAASLGSSPVPAL

SEQ ID NO: 18676 - DNA, 599 bp, Zea mays subsp. mays; identical to SEQ ID NO: 8827
  misc_feature (1)..(599): Ceres Seq. ID no. 12381635
  misc_feature: MA Experiment ID: 108523 Result: Down-regulated in Transcription
  misc_feature: MA Experiment 108523 PARAMETER Experiment Name: Zm_42deg_Heat_P Parameter: Age (day) Value: 8
  misc_feature: MA Experiment 108523 PARAMETER Experiment Name: Zm_42deg_Heat_P Parameter: Organism Value: Zea mays
  misc_feature: MA Experiment 108523 PARAMETER Experiment Name: Zm_42deg_Heat_P Parameter: Plant Line Value: 35A19
  misc_feature: MA Experiment 108523 PARAMETER Experiment Name: Zm_42deg_Heat_P Parameter: Temperature (deg C) Value: 42 vs. 22
  misc_feature: MA Experiment 108523 PARAMETER Experiment Name: Zm_42deg_Heat_P Parameter: Timepoint (hr) Value: 6
  misc_feature: MA Experiment 108523 PARAMETER Experiment Name: Zm_42deg_Heat_P Parameter: Tissue Value: Aerial
  misc_feature: MA Experiment ID: 108528 Result: Down-regulated in Transcription
  misc_feature: MA Experiment 108528 PARAMETER Experiment Name: Zm_Imbibed_Seeds_P Parameter: Age (day) Value: 5 vs. 2
  misc_feature: MA Experiment 108528 PARAMETER Experiment Name: Zm_Imbibed_Seeds_P Parameter: Organism Value: Zea mays
  misc_feature: MA Experiment 108528 PARAMETER Experiment Name: Zm_Imbibed_Seeds_P Parameter: Plant Line Value: 35A19
  misc_feature: MA Experiment 108528 PARAMETER Experiment Name: Zm_Imbibed_Seeds_P Parameter: Tissue Value: Aerial vs. Embryo
  misc_feature: MA Experiment ID: 108529 Result: Up-regulated in Transcription
  misc_feature: MA Experiment 108529 PARAMETER Experiment Name: Zm_Imbibed_Seeds_P Parameter: Age (day) Value: 5 vs. 2
  misc_feature: MA Experiment 108529 PARAMETER Experiment Name: Zm_Imbibed_Seeds_P Parameter: Organism Value: Zea mays
  misc_feature: MA Experiment 108529 PARAMETER Experiment Name: Zm_Imbibed_Seeds_P Parameter: Plant Line Value: 35A19
  misc_feature: MA Experiment 108529 PARAMETER Experiment Name: Zm_Imbibed_Seeds_P Parameter: Tissue Value: Roots vs. Embryo
  misc_feature: MA Experiment ID: 108530 Result: Down-regulated in Transcription
  misc_feature: MA Experiment 108530 PARAMETER Experiment Name: Zm_Imbibed_Seeds_P Parameter: Age (day) Value: 6 vs. 2
  misc_feature: MA Experiment 108530 PARAMETER Experiment Name: Zm_Imbibed_Seeds_P Parameter: Organism Value: Zea mays
  misc_feature: MA Experiment 108530 PARAMETER Experiment Name: Zm_Imbibed_Seeds_P Parameter: Plant Line Value: 35A19
  misc_feature: MA Experiment 108530 PARAMETER Experiment Name: Zm_Imbibed_Seeds_P Parameter: Tissue Value: Aerial vs. Embryo
  misc_feature: MA Experiment ID: 108535 Result: Down-regulated in Transcription
  misc_feature: MA Experiment 108535 PARAMETER Experiment Name: Zm_Meristem_P Parameter: Age (day) Value: 8
  misc_feature: MA Experiment 108535 PARAMETER Experiment Name: Zm_Meristem_P Parameter: Organism Value: Zea mays
  misc_feature: MA Experiment 108535 PARAMETER Experiment Name: Zm_Meristem_P Parameter: Plant Line Value: 35A19
  misc_feature: MA Experiment 108535 PARAMETER Experiment Name: Zm_Meristem_P Parameter: Tissue Value: Root Meristem vs. Above Root Meristem
  misc_feature: MA Experiment ID: 108543 Result: Up-regulated in Transcription
  misc_feature: MA Experiment ID: 108544 Result: Up-regulated in Transcription
  misc_feature: MA Experiment ID: 108546 Result: Up-regulated in Transcription
  misc_feature: MA Experiment 108546 PARAMETER Experiment Name: Zm_Imbibed_Seeds_P Parameter: Age (day) Value: 3 vs. 2
  misc_feature: MA Experiment 108546 PARAMETER Experiment Name: Zm_Imbibed_Seeds_P Parameter: Organism Value: Zea mays
  misc_feature: MA Experiment 108546 PARAMETER Experiment Name: Zm_Imbibed_Seeds_P Parameter: Plant Line Value: 35A19
  misc_feature: MA Experiment 108546 PARAMETER Experiment Name: Zm_Imbibed_Seeds_P Parameter: Tissue Value: Roots vs. Embryo
  misc_feature: MA Experiment ID: 108689 Result: Up-regulated in Transcription
  misc_feature: MA Experiment 108689 PARAMETER Experiment Name: Zm_Drought_Roots_P Parameter: Age (day) Value: 9
  misc_feature: MA Experiment 108689 PARAMETER Experiment Name: Zm_Drought_Roots_P Parameter: Organism Value: Zea mays
  misc_feature: MA Experiment 108689 PARAMETER Experiment Name: Zm_Drought_Roots_P Parameter: Plant Line Value: 35A19
  misc_feature: MA Experiment 108689 PARAMETER Experiment Name: Zm_Drought_Roots_P Parameter: Timepoint (hr) Value: 24
  misc_feature: MA Experiment 108689 PARAMETER Experiment Name: Zm_Drought_Roots_P Parameter: Tissue Value: Roots
  misc_feature: MA Experiment 108689 PARAMETER Experiment Name: Zm_Drought_Roots_P Parameter: Treatment Value: Drought vs. No Drought
  misc_feature: MA Experiment ID: 20000108 Result: Down-regulated in Transcription
  misc_feature: MA Experiment 20000108 PARAMETER Experiment Name: Zm_Root-Tips_P Parameter: Age (day) Value: 12
  misc_feature: MA Experiment 20000108 PARAMETER Experiment Name: Zm_Root-Tips_P Parameter: Organism Value: Zea mays
  misc_feature: MA Experiment 20000108 PARAMETER Experiment Name: Zm_Root-Tips_P Parameter: Tissue Value: Root tips vs. Root mid region    35
  misc_feature: MA Experiment 20000108 PARAMETER Experiment Name: Zm_Root-Tips_P Parameter: Tissue Value: Root tips vs. Root mid region   Sequence Listing-Misc Features (4)
  misc_feature: MA Experiment ID: 20000492 Result: Down-regulated in Transcription
  misc_feature: MA Experiment 20000492 PARAMETER Experiment Name: Zm_Hybrid_Seed_Dev_P Parameter: DAP Value: 12
  misc_feature: MA Experiment 20000492 PARAMETER Experiment Name: Zm_Hybrid_Seed_Dev_P Parameter: Organism Value: Zea mays
  misc_feature: MA Experiment 20000492 PARAMETER Experiment Name: Zm_Hybrid_Seed_Dev_P Parameter: Plant Line Value: 35A19
  misc_feature: MA Experiment 20000492 PARAMETER Experiment Name: Zm_Hybrid_Seed_Dev_P Parameter: Tissue Value: Fert Kernel vs. Unfert Floret

SEQ ID NO: 18677 - protein, 199 aa, Zea mays subsp. mays; identical to SEQ ID NO: 8828
  peptide (1)..(199): Ceres Seq. ID no. 12381636
  misc_feature (38)..(198): Pfam Name: Protein kinase domain Pfam Description: Protein kinase domain
  misc_feature (34)..(198): Homolog of NCBI NO: 7446429 NR Description: probable serine/threonine-specific protein kinase
  misc_feature (34)..(198): Homolog of NCBI NO: 37536914 NR Description: protein kinase REK [Oryza sativa (japonica
  misc_feature (34)..(198): Homolog of NCBI NO: 7446428 NR Description: probable serine/threonine-specific protein kinase
  misc_feature (34)..(198): Homolog of NCBI NO: 1362050 NR Description: serine/threonine-specific protein kinase SPK-1
  misc_feature (34)..(198): Homolog of NCBI NO: 3811293 NR Description: putative serine/threonine protein kinase
  misc_feature (34)..(198): Homolog of NCBI NO: 310580 NR Description: protein kinase 2

SEQ ID NO: 18678 - protein, 166 aa, Zea mays subsp. mays; identical to SEQ ID NO: 8829
  peptide (1)..(166): Ceres Seq. ID no. 12381637
  misc_feature (5)..(165): Pfam Name: Protein kinase domain Pfam Description: Protein kinase domain
  misc_feature (1)..(165): Homolog of NCBI NO: 7446429 NR Description: probable serine/threonine-specific protein kinase
  misc_feature (1)..(165): Homolog of NCBI NO: 37536914 NR Description: protein kinase REK [Oryza sativa (japonica
  misc_feature (1)..(165): Homolog of NCBI NO: 7446428 NR Description: probable serine/threonine-specific protein kinase
  misc_feature (1)..(165): Homolog of NCBI NO: 1362050 NR Description: serine/threonine-specific protein kinase SPK-1
  misc_feature (1)..(165): Homolog of NCBI NO: 3811293 NR Description: putative serine/threonine protein kinase
  misc_feature (1)..(165): Homolog of NCBI NO: 310580 NR Description: protein kinase 2

SEQ ID NO: 18679 - DNA, 1675 bp, Zea mays subsp. mays
  misc_feature (1)..(1675): Ceres Seq. ID no. 12369580
  misc_feature: MA Experiment ID: 108527 Result: Up-regulated in Transcription
  misc_feature: MA Experiment 108527 PARAMETER Experiment Name: Zm_5mM_NO_P Parameter: Age (day) Value: 8
  misc_feature: MA Experiment 108527 PARAMETER Experiment Name: Zm_5mM_NO_P Parameter: Organism Value: Zea mays
  misc_feature: MA Experiment 108527 PARAMETER Experiment Name: Zm_5mM_NO_P Parameter: Plant Line Value: 35A19
  misc_feature: MA Experiment 108527 PARAMETER Experiment Name: Zm_5mM_NO_P Parameter: Timepoint (hr) Value: 6
  misc_feature: MA Experiment 108527 PARAMETER Experiment Name: Zm_5mM_NO_P Parameter: Tissue Value: Aerial
  misc_feature: MA Experiment 108527 PARAMETER Experiment Name: Zm_5mM_NO_P Parameter: Treatment Value: 5mM NO vs. No Treatment
  misc_feature: MA Experiment ID: 108528 Result: Down-regulated in Transcription
  misc_feature: MA Experiment 108528 PARAMETER Experiment Name: Zm_Imbibed_Seeds_P Parameter: Age (day) Value: 5 vs. 2
  misc_feature: MA Experiment 108528 PARAMETER Experiment Name: Zm_Imbibed_Seeds_P Parameter: Organism Value: Zea mays
  misc_feature: MA Experiment 108528 PARAMETER Experiment Name: Zm_Imbibed_Seeds_P Parameter: Plant Line Value: 35A19
  misc_feature: MA Experiment 108528 PARAMETER Experiment Name: Zm_Imbibed_Seeds_P Parameter: Tissue Value: Aerial vs. Embryo
  misc_feature: MA Experiment ID: 108530 Result: Down-regulated in Transcription
  misc_feature: MA Experiment 108530 PARAMETER Experiment Name: Zm_Imbibed_Seeds_P Parameter: Age (day) Value: 6 vs. 2
  misc_feature: MA Experiment 108530 PARAMETER Experiment Name: Zm_Imbibed_Seeds_P Parameter: Organism Value: Zea mays
  misc_feature: MA Experiment 108530 PARAMETER Experiment Name: Zm_Imbibed_Seeds_P Parameter: Plant Line Value: 35A19
  misc_feature: MA Experiment 108530 PARAMETER Experiment Name: Zm_Imbibed_Seeds_P Parameter: Tissue Value: Aerial vs. Embryo
  misc_feature: MA Experiment ID: 108532 Result: Up-regulated in Transcription
  misc_feature: MA Experiment 108532 PARAMETER Experiment Name: Zm_20uM_KNO3_H-to-L_P Parameter: Age (day) Value: 11
  misc_feature: MA Experiment 108532 PARAMETER Experiment Name: Zm_20uM_KNO3_H-to-L_P Parameter: Organism Value: Zea mays
  misc_feature: MA Experiment 108532 PARAMETER Experiment Name: Zm_20uM_KNO3_H-to-L_P Parameter: Plant Line Value: 35A19
  misc_feature: MA Experiment 108532 PARAMETER Experiment Name: Zm_20uM_KNO3_H-to-L_P Parameter: Timepoint (hr) Value: 16
  misc_feature: MA Experiment 108532 PARAMETER Experiment Name: Zm_20uM_KNO3_H-to-L_P Parameter: Tissue Value: Roots
  misc_feature: MA Experiment 108532 PARAMETER Experiment Name: Zm_20uM_KNO3_H-to-L_P Parameter: Treatment Value: 20uM KNO3 vs. 60mM KNO3
  misc_feature: MA Experiment ID: 108535 Result: Up-regulated in Transcription
  misc_feature: MA Experiment 108535 PARAMETER Experiment Name: Zm_Meristem_P Parameter: Age (day) Value: 8
  misc_feature: MA Experiment 108535 PARAMETER Experiment Name: Zm_Meristem_P Parameter: Organism Value: Zea mays
  misc_feature: MA Experiment 108535 PARAMETER Experiment Name: Zm_Meristem_P Parameter: Plant Line Value: 35A19
  misc_feature: MA Experiment 108535 PARAMETER Experiment Name: Zm_Meristem_P Parameter: Tissue Value: Root Meristem vs. Above Root Meristem
  misc_feature: MA Experiment ID: 108543 Result: Up-regulated in Transcription
  misc_feature: MA Experiment ID: 108544 Result: Down-regulated in Transcription
  misc_feature: MA Experiment ID: 108556 Result: Down-regulated in Transcription
  misc_feature: MA Experiment 108556 PARAMETER Experiment Name: Zm_Drought_P Parameter: Age (day) Value: 9
  misc_feature: MA Experiment 108556 PARAMETER Experiment Name: Zm_Drought_P Parameter: Organism Value: Zea mays
  misc_feature: MA Experiment 108556 PARAMETER Experiment Name: Zm_Drought_P Parameter: Plant Line Value: 35A19
  misc_feature: MA Experiment 108556 PARAMETER Experiment Name: Zm_Drought_P Parameter: Timepoint (hr) Value: 24
  misc_feature: MA Experiment 108556 PARAMETER Experiment Name: Zm_Drought_P Parameter: Tissue Value: Aerial
  misc_feature: MA Experiment 108556 PARAMETER Experiment Name: Zm_Drought_P Parameter: Treatment Value: Drought vs. No Drought
  misc_feature: MA Experiment ID: 108689 Result: Down-regulated in Transcription
  misc_feature: MA Experiment 108689 PARAMETER Experiment Name: Zm_Drought_Roots_P Parameter: Age (day) Value: 9
  misc_feature: MA Experiment 108689 PARAMETER Experiment Name: Zm_Drought_Roots_P Parameter: Organism Value: Zea mays
  misc_feature: MA Experiment 108689 PARAMETER Experiment Name: Zm_Drought_Roots_P Parameter: Plant Line Value: 35A19
  misc_feature: MA Experiment 108689 PARAMETER Experiment Name: Zm_Drought_Roots_P Parameter: Timepoint (hr) Value: 24
  misc_feature: MA Experiment 108689 PARAMETER Experiment Name: Zm_Drought_Roots_P Parameter: Tissue Value: Roots
  misc_feature: MA Experiment 108689 PARAMETER Experiment Name: Zm_Drought_Roots_P Parameter: Treatment Value: Drought vs. No Drought
  misc_feature: MA Experiment ID: 20000477 Result: Down-regulated in Transcription
  misc_feature: MA Experiment 20000477 PARAMETER Experiment Name: Zm_5mM_SA_P Parameter: Age (day) Value: 10
  misc_feature: MA Experiment 20000477 PARAMETER Experiment Name: Zm_5mM_SA_P Parameter: Organism Value: Zea mays
  misc_feature: MA Experiment 20000477 PARAMETER Experiment Name: Zm_5mM_SA_P Parameter: Plant Line Value: 35A19
  misc_feature: MA Experiment 20000477 PARAMETER Experiment Name: Zm_5mM_SA_P Parameter: Timepoint (hr) Value: 48
  misc_feature: MA Experiment 20000477 PARAMETER Experiment Name: Zm_5mM_SA_P Parameter: Tissue Value: Aerial
  misc_feature: MA Experiment 20000477 PARAMETER Experiment Name: Zm_5mM_SA_P Parameter: Treatment Value: 5mM SA vs. No Treatment
  misc_feature: MA Experiment ID: 20000478 Result: Down-regulated in Transcription
  misc_feature: MA Experiment 20000478 PARAMETER Experiment Name: Zm_5mM_SA_P Parameter: Age (day) Value: 11
  misc_feature: MA Experiment 20000478 PARAMETER Experiment Name: Zm_5mM_SA_P Parameter: Organism Value: Zea mays
  misc_feature: MA Experiment 20000478 PARAMETER Experiment Name: Zm_5mM_SA_P Parameter: Plant Line Value: 35A19
  misc_feature: MA Experiment 20000478 PARAMETER Experiment Name: Zm_5mM_SA_P Parameter: Timepoint (hr) Value: 72
  misc_feature: MA Experiment 20000478 PARAMETER Experiment Name: Zm_5mM_SA_P Parameter: Tissue Value: Aerial
  misc_feature: MA Experiment 20000478 PARAMETER Experiment Name: Zm_5mM_SA_P Parameter: Treatment Value: 5mM SA vs. No Treatment
  misc_feature: MA Experiment ID: 20000479 Result: Down-regulated in Transcription
  misc_feature: MA Experiment 20000479 PARAMETER Experiment Name: Zm_Drought_P Parameter: Age (day) Value: 10
  misc_feature: MA Experiment 20000479 PARAMETER Experiment Name: Zm_Drought_P Parameter: Organism Value: Zea mays
  misc_feature: MA Experiment 20000479 PARAMETER Experiment Name: Zm_Drought_P Parameter: Plant Line Value: 35A19
  misc_feature: MA Experiment 20000479 PARAMETER Experiment Name: Zm_Drought_P Parameter: Timepoint (hr) Value: 48
  misc_feature: MA Experiment 20000479 PARAMETER Experiment Name: Zm_Drought_P Parameter: Tissue Value: Aerial
  misc_feature: MA Experiment 20000479 PARAMETER Experiment Name: Zm_Drought_P Parameter: Treatment Value: Drought vs. No Drought
  misc_feature: MA Experiment ID: 20000480 Result: Down-regulated in Transcription
  misc_feature: MA Experiment 20000480 PARAMETER Experiment Name: Zm_Drought_P Parameter: Age (day) Value: 11
  misc_feature: MA Experiment 20000480 PARAMETER Experiment Name: Zm_Drought_P Parameter: Organism Value: Zea mays
  misc_feature: MA Experiment 20000480 PARAMETER Experiment Name: Zm_Drought_P Parameter: Plant Line Value: 35A19
  misc_feature: MA Experiment 20000480 PARAMETER Experiment Name: Zm_Drought_P Parameter: Timepoint (hr) Value: 72
  misc_feature: MA Experiment 20000480 PARAMETER Experiment Name: Zm_Drought_P Parameter: Tissue Value: Aerial
  misc_feature: MA Experiment 20000480 PARAMETER Experiment Name: Zm_Drought_P Parameter: Treatment Value: Drought vs. No Drought
  misc_feature: MA Experiment ID: 20000492 Result: Down-regulated in Transcription
  misc_feature: MA Experiment 20000492 PARAMETER Experiment Name: Zm_Hybrid_Seed_Dev_P Parameter: DAP Value: 12
  misc_feature: MA Experiment 20000492 PARAMETER Experiment Name: Zm_Hybrid_Seed_Dev_P Parameter: Organism Value: Zea mays
  misc_feature: MA Experiment 20000492 PARAMETER Experiment Name: Zm_Hybrid_Seed_Dev_P Parameter: Plant Line Value: 35A19
  misc_feature: MA Experiment 20000492 PARAMETER Experiment Name: Zm_Hybrid_Seed_Dev_P Parameter: Tissue Value: Fert Kernel vs. Unfert Floret
  misc_feature: MA Experiment ID: 20000535 Result: Down-regulated in Transcription
  misc_feature: MA Experiment 20000535 PARAMETER Experiment Name: Zm_Hybrid_Seed_Dev_P Parameter: DAP Value: 30 vs. 12
  misc_feature: MA Experiment 20000535 PARAMETER Experiment Name: Zm_Hybrid_Seed_Dev_P Parameter: Organism Value: Zea mays
  misc_feature: MA Experiment 20000535 PARAMETER Experiment Name: Zm_Hybrid_Seed_Dev_P Parameter: Plant Line Value: 35A19
  misc_feature: MA Experiment 20000535 PARAMETER Experiment Name: Zm_Hybrid_Seed_Dev_P Parameter: Tissue Value: Embryo vs. Unfert Floret
  misc_feature: MA Experiment ID: 20000626 Result: Down-regulated in Transcription
  misc_feature: MA Experiment 20000626 PARAMETER Experiment Name: Zm_Herbicide-Treatments_P Parameter: Timepoint (hr) Value: 12
  misc_feature: MA Experiment 20000626 PARAMETER Experiment Name: Zm_Herbicide-Treatments_P Parameter: Tissue Value: Aerial
  misc_feature: MA Experiment 20000626 PARAMETER Experiment Name: Zm_Herbicide-Treatments_P Parameter: Treatment Value: Roundup vs. No Treatment
cttggtcaatgggagtggctgaggctggcgtgcggacctaaaatccccactgatatatctgcccatgcccaggcattggatctcgtccccaatggcaatgcgtcaccagttcggggcttcggtgctgctgcatctactggtgttagcgggggcgggggccatggtcactgctgaccaggagagcgaccggatccgcgagctcccgggccagccgccgaacgtggggttctcgcagtactccggctacgtcaccgtcaacccggcgcgggggcgcgcgctcttctactggctcgtggaggcggtgccggcggccgggcccatcgcgccgctcgtcctctggctcaacggcggccctggatgctcgtcagtcggctacggcgcgtccgaggaggtcggcccgttccgcatcaggccggacggccagactctctacctcaaccccaattcttggaacaaggcggccaatttgctcttcctggagtcgccggccggcgtggggttctcgtactcgaactcgtcgctggatctgtacaccgcaggagatgcaaagacagcactggatgcctacgcttttcttgtgaactggttggagagattcccacagtacaagtacagggagttctatattgctggggaaagttacgcgggtcactacgttccacagttagcccagctcatatatgaaaagaacaagggcattcagaatccaacaattaatttcaaaggattcatggtgggcaatgcagtcactgatgactaccatgattaccttggtacctttgagttttggtggactcatggtctgatctctgacaagacttatcacaacttgaaggcgacatgtttgcttgaatcctcacagcacccttcacctgactgtgtcaagaacttgaatctagccagtgctgaagaaggcaatattgatccttatagtctgaatacaaagccatgcaatgacaccgcctctctcaagcttggcttgggtggacgctacccttggttgtccagagcctatgatccttgtactgaaagatatgcaagtatttactacaacaggccagaagtgcagatggcattgcatgcaaatacaactggaattcattacccttggcaaacatgcagcgatattgttggatcctactgggctgattccccaagatctatgcttccaatctaccaagaactgatagcagctggtatcaagatctgggttttcagtggggacacggatgctgtagttcctgtaactgcgacaaggtactcaatagatgctctcaagcttccaacactggtaaattggtacccttggtatgaccatgggaaggttggaggttggagccaagtttacaaaggactaacccttataaccatagcaggtgcaggacatgaagtgccactgcaccggcctcgacaagctttgatcatgttcagacacttcttgcagaacaaaccgatgccagcacaatagccagtcgaagcagaaatatagtgtaaactaccacagtcatgtttaatattttttaaattcttttttacttgatttgattgttattgttacaacatattgttcaattatctcgattgaatgtatgtacgcccagtagcaaatagggatacctgaaatttgtactgctggagctaaagagctccgctgtatatgataatgatgatcttt

SEQ ID NO: 18680 - protein, 467 aa, Zea mays subsp. mays
  peptide (1)..(467): Ceres Seq. ID no. 12369581
  misc_feature (2)..(415): Homolog of NCBI NO: 4539657 NR Description: serine-type carboxypeptidase [Sorghum bicolor]
  misc_feature (10)..(465): Homolog of NCBI NO: 15232847 NR Description: putative serine carboxypeptidase II
  misc_feature (10)..(465): Homolog of NCBI NO: 15234795 NR Description: SERINE CARBOXYPEPTIDASE II-like protein
  misc_feature (10)..(465): Homolog of NCBI NO: 13877871 NR Description: putative serine carboxypeptidase II [Arabidopsis
  misc_feature (51)..(467): Homolog of NCBI NO: 7428205 NR Description: carboxypeptidase D (EC 3.4.16.6) - wheat
  misc_feature (22)..(467): Homolog of NCBI NO: 20455471 NR Description: Serine carboxypeptidase II precursor
  misc_feature (22)..(467): Homolog of NCBI NO: 7428204 NR Description: carboxypeptidase D (EC 3.4.16.6) precursor -
  misc_feature (25)..(465): Homolog of NCBI NO: 15227493 NR Description: putative serine carboxypeptidase II
  misc_feature (37)..(465): Homolog of NCBI NO: 15231911 NR Description: putative serine carboxypeptidase II; protein id:
  misc_feature (10)..(467): Homolog of NCBI NO: 34908012 NR Description: putative carboxypeptidase D
MPRHWISSPMAMRHQFGASVLLHLLVLAGAGAMVTADQESDRIRELPGQPPNVGFSQYSGYVTVNPARGRALFYWLVEAVPAAGPIAPLVLWLNGGPGCSSVGYGASEEVGPFRIRPDGQTLYLNPNSWNKAANLLFLESPAGVGFSYSNSSLDLYTAGDAKTALDAYAFLVNWLERFPQYKYREFYIAGESYAGHYVPQLAQLIYEKNKGIQNPTINFKGFMVGNAVTDDYHDYLGTFEFWWTHGLISDKTYHNLKATCLLESSQHPSPDCVKNLNLASAEEGNIDPYSLNTKPCNDTASLKLGLGGRYPWLSRAYDPCTERYASIYYNRPEVQMALHANTTGIHYPWQTCSDIVGSYWADSPRSMLPIYQELIAAGIKIWVFSGDTDAVVPVTATRYSIDALKLPTLVNWYPWYDHGKVGGWSQVYKGLTLITIAGAGHEVPLHRPRQALIMFRHFLQNKPMPAQ

SEQ ID NO: 18681 - protein, 458 aa, Zea mays subsp. mays
  peptide (1)..(458): Ceres Seq. ID no. 12369582
  misc_feature (1)..(406): Homolog of NCBI NO: 4539657 NR Description: serine-type carboxypeptidase [Sorghum bicolor]
  misc_feature (1)..(456): Homolog of NCBI NO: 15232847 NR Description: putative serine carboxypeptidase II
  misc_feature (1)..(456): Homolog of NCBI NO: 15234795 NR Description: SERINE CARBOXYPEPTIDASE II-like protein
  misc_feature (1)..(456): Homolog of NCBI NO: 13877871 NR Description: putative serine carboxypeptidase II [Arabidopsis
  misc_feature (42)..(458): Homolog of NCBI NO: 7428205 NR Description: carboxypeptidase D (EC 3.4.16.6) - wheat
  misc_feature (13)..(458): Homolog of NCBI NO: 20455471 NR Description: Serine carboxypeptidase II precursor
  misc_feature (13)..(458): Homolog of NCBI NO: 7428204 NR Description: carboxypeptidase D (EC 3.4.16.6) precursor -
  misc_feature (16)..(456): Homolog of NCBI NO: 15227493 NR Description: putative serine carboxypeptidase II
  misc_feature (28)..(456): Homolog of NCBI NO: 15231911 NR Description: putative serine carboxypeptidase II; protein id:
  misc_feature (1)..(458): Homolog of NCBI NO: 34908012 NR Description: putative carboxypeptidase D
MAMRHQFGASVLLHLLVLAGAGAMVTADQESDRIRELPGQPPNVGFSQYSGYVTVNPARGRALFYWLVEAVPAAGPIAPLVLWLNGGPGCSSVGYGASEEVGPFRIRPDGQTLYLNPNSWNKAANLLFLESPAGVGFSYSNSSLDLYTAGDAKTALDAYAFLVNWLERFPQYKYREFYIAGESYAGHYVPQLAQLIYEKNKGIQNPTINFKGFMVGNAVTDDYHDYLGTFEFWWTHGLISDKTYHNLKATCLLESSQHPSPDCVKNLNLASAEEGNIDPYSLNTKPCNDTASLKLGLGGRYPWLSRAYDPCTERYASIYYNRPEVQMALHANTTGIHYPWQTCSDIVGSYWADSPRSMLPIYQELIAAGIKIWVFSGDTDAVVPVTATRYSIDALKLPTLVNWYPWYDHGKVGGWSQVYKGLTLITIAGAGHEVPLHRPRQALIMFRHFLQNKPMPAQ

SEQ ID NO: 18682 - protein, 456 aa, Zea mays subsp. mays
  peptide (1)..(456): Ceres Seq. ID no. 12369583
  misc_feature (1)..(404): Homolog of NCBI NO: 4539657 NR Description: serine-type carboxypeptidase [Sorghum bicolor]
  misc_feature (1)..(454): Homolog of NCBI NO: 15232847 NR Description: putative serine carboxypeptidase II
  misc_feature (1)..(454): Homolog of NCBI NO: 15234795 NR Description: SERINE CARBOXYPEPTIDASE II-like protein
  misc_feature (1)..(454): Homolog of NCBI NO: 13877871 NR Description: putative serine carboxypeptidase II [Arabidopsis
  misc_feature (40)..(456): Homolog of NCBI NO: 7428205 NR Description: carboxypeptidase D (EC 3.4.16.6) - wheat
  misc_feature (11)..(456): Homolog of NCBI NO: 20455471 NR Description: Serine carboxypeptidase II precursor
  misc_feature (11)..(456): Homolog of NCBI NO: 7428204 NR Description: carboxypeptidase D (EC 3.4.16.6) precursor -
  misc_feature (14)..(454): Homolog of NCBI NO: 15227493 NR Description: putative serine carboxypeptidase II
  misc_feature (26)..(454): Homolog of NCBI NO: 15231911 NR Description: putative serine carboxypeptidase II; protein id:
  misc_feature (1)..(456): Homolog of NCBI NO: 34908012 NR Description: putative carboxypeptidase D
MRHQFGASVLLHLLVLAGAGAMVTADQESDRIRELPGQPPNVGFSQYSGYVTVNPARGRALFYWLVEAVPAAGPIAPLVLWLNGGPGCSSVGYGASEEVGPFRIRPDGQTLYLNPNSWNKAANLLFLESPAGVGFSYSNSSLDLYTAGDAKTALDAYAFLVNWLERFPQYKYREFYIAGESYAGHYVPQLAQLIYEKNKGIQNPTINFKGFMVGNAVTDDYHDYLGTFEFWWTHGLISDKTYHNLKATCLLESSQHPSPDCVKNLNLASAEEGNIDPYSLNTKPCNDTASLKLGLGGRYPWLSRAYDPCTERYASIYYNRPEVQMALHANTTGIHYPWQTCSDIVGSYWADSPRSMLPIYQELIAAGIKIWVFSGDTDAVVPVTATRYSIDALKLPTLVNWYPWYDHGKVGGWSQVYKGLTLITIAGAGHEVPLHRPRQALIMFRHFLQNKPMPAQ

SEQ ID NO: 18683 - DNA, 1542 bp, Zea mays subsp. mays
  misc_feature (1)..(1542): Ceres Seq. ID no. 12418920
  misc_feature: MA Experiment ID: 108528 Result: Down-regulated in Transcription
  misc_feature: MA Experiment 108528 PARAMETER Experiment Name: Zm_Imbibed_Seeds_P Parameter: Age (day) Value: 5 vs. 2
  misc_feature: MA Experiment 108528 PARAMETER Experiment Name: Zm_Imbibed_Seeds_P Parameter: Organism Value: Zea mays
  misc_feature: MA Experiment 108528 PARAMETER Experiment Name: Zm_Imbibed_Seeds_P Parameter: Plant Line Value: 35A19
  misc_feature: MA Experiment 108528 PARAMETER Experiment Name: Zm_Imbibed_Seeds_P Parameter: Tissue Value: Aerial vs. Embryo
  misc_feature: MA Experiment ID: 108530 Result: Down-regulated in Transcription
  misc_feature: MA Experiment 108530 PARAMETER Experiment Name: Zm_Imbibed_Seeds_P Parameter: Age (day) Value: 6 vs. 2
  misc_feature: MA Experiment 108530 PARAMETER Experiment Name: Zm_Imbibed_Seeds_P Parameter: Organism Value: Zea mays
  misc_feature: MA Experiment 108530 PARAMETER Experiment Name: Zm_Imbibed_Seeds_P Parameter: Plant Line Value: 35A19
  misc_feature: MA Experiment 108530 PARAMETER Experiment Name: Zm_Imbibed_Seeds_P Parameter: Tissue Value: Aerial vs. Embryo
  misc_feature: MA Experiment ID: 108543 Result: Down-regulated in Transcription
  misc_feature: MA Experiment ID: 108545 Result: Down-regulated in Transcription
  misc_feature: MA Experiment 108545 PARAMETER Experiment Name: Zm_Imbibed_Seeds_P Parameter: Age (day) Value: 3 vs. 2
  misc_feature: MA Experiment 108545 PARAMETER Experiment Name: Zm_Imbibed_Seeds_P Parameter: Organism Value: Zea mays
  misc_feature: MA Experiment 108545 PARAMETER Experiment Name: Zm_Imbibed_Seeds_P Parameter: Plant Line Value: 35A19
  misc_feature: MA Experiment 108545 PARAMETER Experiment Name: Zm_Imbibed_Seeds_P Parameter: Tissue Value: Aerial vs. Embryo
gcacgagaccattacctagaacatcctaatcgaaaaacctaactagttgctacctagcctcgaccaggtggagcaatgggctccacggcggcggcgccctgccacatcgtggccgtgccgtacccgggccgtggtcacgtcaacgcgatgctgaacctatgccgcctcctggcagctcgagacggcgtcaccatcaccatcatcgtgaccgaggagtggctcagcctcctcggcgccccggcggcgctgccggacctcggcctgcgcgttcgctttgaggccattccaaacgtgatcccctccgagcacggccgcgccaacgacatggtcggcttcatggaggccgtgtacaccaagatggcgtcgccgttcgagcagcttctcgacaggctcgcgccgccggcgcccgcggctattgtggccgacatgttcgtgccgtggaccgtaggcgtcggcgagcggaggggcgtgcctgtgtgcatcatgtgcccgattagcgccaccatgttcgcggtgcagtacaacttccacctgctaccacccgcggcggccggcggcggcgcgtctccggatatcactggttcttgttttgttgaaaactacattcctggcacgaaatcaatcaggttcgccgatcttgcgcctacacacaccgatgcgttacttctagacaaaatccttgaagcccactcctctgtaaagaaagcacaatgtatcgtcttcaccaccttccaagagctcgagagcgacgccatcggcgctatgaggcaaaactgcccagtgtacgcagttgggccctgcgtccccttcatggcactgcaagagcacaaggccagcccagacggtgacgactacatggcgtggctggacgcacagcccgcgggctcggtgatctacgtctcgctcggcagcttcctctcggtgtccgccgcccagttcgacgagatcgccgctggcctggccgagagcaaggccaggtttctgtgggtgctccgcgacgccgacgcatgctcccgcgtgcgaggcctgatccgcgatcccgacgccggcctcatcgtgccatggacgaaccagctgagggtgctgtgccacccttcggtcggggggttcttcacccactgcggcatgaactcgacgctcgaggcggtgtacgccggcgtgcccatgctcaccctgcccatcgcgttcgaccagccgaccaatagccggctcgtcaccgaggtgtggaagaatggcattggcctcagggacatggcccgcgccgacggcgtcatcgggagaggtgagatagcctcggccgtggacaggctgatgctccctgacgcggcggagttccaggacatgaggaagcgagtgacactgtggaaggacgcggctcggactgcgtctgaagagggtggatcctcgtggaaagatgttacgtctttcatcaacttcgtttcacgttgagatctccgaatgtttacggagtcagctgtagtgaattgtgatcgattctcacggagttagtgtgatatctgaatgttagcagaatctttcggc

SEQ ID NO: 18684 - protein, 457 aa, Zea mays subsp. mays
  peptide (1)..(457): Ceres Seq. ID no. 12418921
  misc_feature (9)..(455): Pfam Name: UDP-glucoronosyl and UDP-glucosyl transferase Pfam Description: UDP-glucoronosyl and UDP-glucosyl transferase
  misc_feature (263)..(455): Homolog of NCBI NO: 15218268 NR Description: UDP-glucose glucosyltransferase, putative
  misc_feature (2)..(306): Homolog of NCBI NO: 15218268 NR Description: UDP-glucose glucosyltransferase, putative
  misc_feature (10)..(457): Homolog of NCBI NO: 13431605 NR Description: Limonoid UDP-glucosyltransferase (Limonoid
  misc_feature (10)..(453): Homolog of NCBI NO: 15221233 NR Description: putative indole-3-acetate beta-glucosyltransferase
  misc_feature (25)..(282): Homolog of NCBI NO: 37532078 NR Description: putative glucosyltransferase
  misc_feature (10)..(453): Homolog of NCBI NO: 7385017 NR Description: UDP-glucose:salicylic acid glucosyltransferase
  misc_feature (14)..(457): Homolog of NCBI NO: 15227717 NR Description: putative glucosyltransferase; protein id:
  misc_feature (10)..(456): Homolog of NCBI NO: 15227716 NR Description: putative glucosyltransferase
  misc_feature (1)..(452): Homolog of NCBI NO: 34909046 NR Description: putative glucosyltransferase
  misc_feature (9)..(455): Homolog of NCBI NO: 34909048 NR Description: putative glucosyltransferase
MGSTAAAPCHIVAVPYPGRGHVNAMLNLCRLLAARDGVTITIIVTEEWLSLLGAPAALPDLGLRVRFEAIPNVIPSEHGRANDMVGFMEAVYTKMASPFEQLLDRLAPPAPAAIVADMFVPWTVGVGERRGVPVCIMCPISATMFAVQYNFHLLPPAAAGGGASPDITGSCFVENYIPGTKSIRFADLAPTHTDALLLDKILEAHSSVKKAQCIVFTTFQELESDAIGAMRQNCPVYAVGPCVPFMALQEHKASPDGDDYMAWLDAQPAGSVIYVSLGSFLSVSAAQFDEIAAGLAESKARFLWVLRDADACSRVRGLIRDPDAGLIVPWTNQLRVLCHPSVGGFFTHCGMNSTLEAVYAGVPMLTLPIAFDQPTNSRLVTEVWKNGIGLRDMARADGVIGRGEIASAVDRLMLPDAAEFQDMRKRVTLWKDAARTASEEGGSSWKDVTSFINFVSR

SEQ ID NO: 18685 - protein, 433 aa, Zea mays subsp. mays
  peptide (1)..(433): Ceres Seq. ID no. 12418922
  misc_feature (1)..(431): Pfam Name: UDP-glucoronosyl and UDP-glucosyl transferase Pfam Description: UDP-glucoronosyl and UDP-glucosyl transferase
  misc_feature (239)..(431): Homolog of NCBI NO: 15218268 NR Description: UDP-glucose glucosyltransferase, putative
  misc_feature (1)..(282): Homolog of NCBI NO: 15218268 NR Description: UDP-glucose glucosyltransferase, putative
  misc_feature (1)..(433): Homolog of NCBI NO: 13431605 NR Description: Limonoid UDP-glucosyltransferase (Limonoid
  misc_feature (1)..(429): Homolog of NCBI NO: 15221233 NR Description: putative indole-3-acetate beta-glucosyltransferase
  misc_feature (1)..(258): Homolog of NCBI NO: 37532078 NR Description: putative glucosyltransferase
  misc_feature (1)..(429): Homolog of NCBI NO: 7385017 NR Description: UDP-glucose:salicylic acid glucosyltransferase
  misc_feature (1)..(433): Homolog of NCBI NO: 15227717 NR Description: putative glucosyltransferase; protein id:
  misc_feature (1)..(432): Homolog of NCBI NO: 15227716 NR Description: putative glucosyltransferase
  misc_feature (1)..(428): Homolog of NCBI NO: 34909046 NR Description: putative glucosyltransferase
  misc_feature (1)..(431): Homolog of NCBI NO: 34909048 NR Description: putative glucosyltransferase
MLNLCRLLAARDGVTITIIVTEEWLSLLGAPAALPDLGLRVRFEAIPNVIPSEHGRANDMVGFMEAVYTKMASPFEQLLDRLAPPAPAAIVADMFVPWTVGVGERRGVPVCIMCPISATMFAVQYNFHLLPPAAAGGGASPDITGSCFVENYIPGTKSIRFADLAPTHTDALLLDKILEAHSSVKKAQCIVFTTFQELESDAIGAMRQNCPVYAVGPCVPFMALQEHKASPDGDDYMAWLDAQPAGSVIYVSLGSFLSVSAAQFDEIAAGLAESKARFLWVLRDADACSRVRGLIRDPDAGLIVPWTNQLRVLCHPSVGGFFTHCGMNSTLEAVYAGVPMLTLPIAFDQPTNSRLVTEVWKNGIGLRDMARADGVIGRGEIASAVDRLMLPDAAEFQDMRKRVTLWKDAARTASEEGGSSWKDVTSFINFVSR

SEQ ID NO: 18686 - protein, 374 aa, Zea mays subsp. mays
  peptide (1)..(374): Ceres Seq. ID no. 12418923
  misc_feature (1)..(372): Pfam Name: UDP-glucoronosyl and UDP-glucosyl transferase Pfam Description: UDP-glucoronosyl and UDP-glucosyl transferase
  misc_feature (180)..(372): Homolog of NCBI NO: 15218268 NR Description: UDP-glucose glucosyltransferase, putative
  misc_feature (1)..(223): Homolog of NCBI NO: 15218268 NR Description: UDP-glucose glucosyltransferase, putative
  misc_feature (1)..(374): Homolog of NCBI NO: 13431605 NR Description: Limonoid UDP-glucosyltransferase (Limonoid
  misc_feature (1)..(370): Homolog of NCBI NO: 15221233 NR Description: putative indole-3-acetate beta-glucosyltransferase
  misc_feature (1)..(199): Homolog of NCBI NO: 37532078 NR Description: putative glucosyltransferase
  misc_feature (1)..(370): Homolog of NCBI NO: 7385017 NR Description: UDP-glucose:salicylic acid glucosyltransferase
  misc_feature (1)..(374): Homolog of NCBI NO: 15227717 NR Description: putative glucosyltransferase; protein id:
  misc_feature (1)..(373): Homolog of NCBI NO: 15227716 NR Description: putative glucosyltransferase
  misc_feature (1)..(369): Homolog of NCBI NO: 34909046 NR Description: putative glucosyltransferase
  misc_feature (1)..(372): Homolog of NCBI NO: 34909048 NR Description: putative glucosyltransferase
MVGFMEAVYTKMASPFEQLLDRLAPPAPAAIVADMFVPWTVGVGERRGVPVCIMCPISATMFAVQYNFHLLPPAAAGGGASPDITGSCFVENYIPGTKSIRFADLAPTHTDALLLDKILEAHSSVKKAQCIVFTTFQELESDAIGAMRQNCPVYAVGPCVPFMALQEHKASPDGDDYMAWLDAQPAGSVIYVSLGSFLSVSAAQFDEIAAGLAESKARFLWVLRDADACSRVRGLIRDPDAGLIVPWTNQLRVLCHPSVGGFFTHCGMNSTLEAVYAGVPMLTLPIAFDQPTNSRLVTEVWKNGIGLRDMARADGVIGRGEIASAVDRLMLPDAAEFQDMRKRVTLWKDAARTASEEGGSSWKDVTSFINFVSR

SEQ ID NO: 18687 - DNA, 1606 bp, Zea mays subsp. mays
  misc_feature (1)..(1606): Ceres Seq. ID no. 12361067
  misc_feature: MA Experiment ID: 108522 Result: Up-regulated in Transcription
  misc_feature: MA Experiment 108522 PARAMETER Experiment Name: Zm_42deg_Heat_P Parameter: Age (day) Value: 8
  misc_feature: MA Experiment 108522 PARAMETER Experiment Name: Zm_42deg_Heat_P Parameter: Organism Value: Zea mays
  misc_feature: MA Experiment 108522 PARAMETER Experiment Name: Zm_42deg_Heat_P Parameter: Plant Line Value: 35A19
  misc_feature: MA Experiment 108522 PARAMETER Experiment Name: Zm_42deg_Heat_P Parameter: Temperature (deg C) Value: 42 vs. 22
  misc_feature: MA Experiment 108522 PARAMETER Experiment Name: Zm_42deg_Heat_P Parameter: Timepoint (hr) Value: 1
  misc_feature: MA Experiment 108522 PARAMETER Experiment Name: Zm_42deg_Heat_P Parameter: Tissue Value: Aerial
  misc_feature: MA Experiment ID: 108527 Result: Up-regulated in Transcription
  misc_feature: MA Experiment 108527 PARAMETER Experiment Name: Zm_5mM_NO_P Parameter: Age (day) Value: 8
  misc_feature: MA Experiment 108527 PARAMETER Experiment Name: Zm_5mM_NO_P Parameter: Organism Value: Zea mays
  misc_feature: MA Experiment 108527 PARAMETER Experiment Name: Zm_5mM_NO_P Parameter: Plant Line Value: 35A19
  misc_feature: MA Experiment 108527 PARAMETER Experiment Name: Zm_5mM_NO_P Parameter: Timepoint (hr) Value: 6
  misc_feature: MA Experiment 108527 PARAMETER Experiment Name: Zm_5mM_NO_P Parameter: Tissue Value: Aerial
  misc_feature: MA Experiment 108527 PARAMETER Experiment Name: Zm_5mM_NO_P Parameter: Treatment Value: 5mM NO vs. No Treatment
  misc_feature: MA Experiment ID: 108529 Result: Up-regulated in Transcription
  misc_feature: MA Experiment 108529 PARAMETER Experiment Name: Zm_Imbibed_Seeds_P Parameter: Age (day) Value: 5 vs. 2
  misc_feature: MA Experiment 108529 PARAMETER Experiment Name: Zm_Imbibed_Seeds_P Parameter: Organism Value: Zea mays
  misc_feature: MA Experiment 108529 PARAMETER Experiment Name: Zm_Imbibed_Seeds_P Parameter: Plant Line Value: 35A19
  misc_feature: MA Experiment 108529 PARAMETER Experiment Name: Zm_Imbibed_Seeds_P Parameter: Tissue Value: Roots vs. Embryo
  misc_feature: MA Experiment ID: 108535 Result: Down-regulated in Transcription
  misc_feature: MA Experiment 108535 PARAMETER Experiment Name: Zm_Meristem_P Parameter: Age (day) Value: 8
  misc_feature: MA Experiment 108535 PARAMETER Experiment Name: Zm_Meristem_P Parameter: Organism Value: Zea mays
  misc_feature: MA Experiment 108535 PARAMETER Experiment Name: Zm_Meristem_P Parameter: Plant Line Value: 35A19
  misc_feature: MA Experiment 108535 PARAMETER Experiment Name: Zm_Meristem_P Parameter: Tissue Value: Root Meristem vs. Above Root Meristem
  misc_feature: MA Experiment ID: 108546 Result: Up-regulated in Transcription
  misc_feature: MA Experiment 108546 PARAMETER Experiment Name: Zm_Imbibed_Seeds_P Parameter: Age (day) Value: 3 vs. 2
  misc_feature: MA Experiment 108546 PARAMETER Experiment Name: Zm_Imbibed_Seeds_P Parameter: Organism Value: Zea mays
  misc_feature: MA Experiment 108546 PARAMETER Experiment Name: Zm_Imbibed_Seeds_P Parameter: Plant Line Value: 35A19
  misc_feature: MA Experiment 108546 PARAMETER Experiment Name: Zm_Imbibed_Seeds_P Parameter: Tissue Value: Roots vs. Embryo
  misc_feature: MA Experiment ID: 108556 Result: Up-regulated in Transcription
  misc_feature: MA Experiment 108556 PARAMETER Experiment Name: Zm_Drought_P Parameter: Age (day) Value: 9
  misc_feature: MA Experiment 108556 PARAMETER Experiment Name: Zm_Drought_P Parameter: Organism Value: Zea mays
  misc_feature: MA Experiment 108556 PARAMETER Experiment Name: Zm_Drought_P Parameter: Plant Line Value: 35A19
  misc_feature: MA Experiment 108556 PARAMETER Experiment Name: Zm_Drought_P Parameter: Timepoint (hr) Value: 24
  misc_feature: MA Experiment 108556 PARAMETER Experiment Name: Zm_Drought_P Parameter: Tissue Value: Aerial
  misc_feature: MA Experiment 108556 PARAMETER Experiment Name: Zm_Drought_P Parameter: Treatment Value: Drought vs. No Drought
gcacgagaccattacctagaacatcctaatcgaaaaaagcaagccttcatctatcgagtcgcccgtcaccacagctgatattgaggcgacgcgccggccgtccagatcaaccaaaaaagagaaaaaaaaacagtagccatgtcgcggctcctcctcctcggggccgccgtgctgctgctcgcgtcggccgccacggcgcaggactgcctgtccgcgacgttcagcggcgggcggaccttcgggcggtgcaacaacctgccgtcgctgatcgccagcctgcactggacgtaccacccggagaacggcaccgcggacgtggcgttccgcgcgccgtcggacgccagcggctgggtcgcctggggcatcaaccccgaccgcggcggcagcatgggcggcagcagcgtcttcgtggcctcgccctcgcaggacggcagcggcgcggtgtccatcctcatgacccacctggagagcacgtcgcccagcctaaccaacaacaccctcaagttcaaggtgcccgtcggccccgccgccgagtactccaacggcgcctacaccatcttcgccatggtggagcttcccggcaactccacgcagcagttcacggtgtggcaggccggcgcgaccagcaacggtgccatctcccctcacccgacggcgccggccaacttggccagcacccagaggctggacttcctctccgggtccagcaccgccgcctcaaactccaggcttcaccgccgtaacatccacggcatgctgaacgcgatcgcctggggcgtcctgatccccgtcggcgccatcatcgcgcggtacctgcgcgtgttcgagtccgcggacccggcgtggttctacctgcacatcgcgtgccagtgctccggctacatcctgggcgtggccggctggggcctggggctgaagctcggcagcgagtcggccggcgtcacctaccagccgcaccgcagcatcggcatcgccatcttctgcctggccacgctgcaggtgttcgcgctgctgctccggcccgacaagaagaacaggtacaggctgtactggaacatctaccaccactccgtcggctactccgtcatcgtcctcggcgccgtcaacatcttcaaggggctcgacatcctcaagccggccagcggctacaagaccgcctacattgtcgtcctggccacgctcggcggcgtcgcgctntgcctcgaggccatcacgtggcccatcgccatccggaagcgcaggcgtaacgccgccgacaaggcgtccaacggcaacggcaacggctggcagcagggtgcgtaggggcctgatcgctgggcttgtgcgcgtgcgtgtgtttgtgctatagttttgatgcgagagagaggtctgatatcgatgtgctgatgccgttgttcagagagacatcgttgctgatgtgtttctttcctgttactactgcctctgtagtctgtactcctacctagaagagtagctcctttgattttttttcttctgttttgttgttgaattttattagggttctatagtgccatttgtacacattttttcccttcttattgatgtacgtacgactgctttgattactgtatggtttcagtcagtc

SEQ ID NO: 18688 - protein, 387 aa, Zea mays subsp. mays
  peptide (1)..(387): Ceres Seq. ID no. 12361068
  misc_feature (84)..(211): Pfam Name: Protein of unknown function (DUF568) Pfam Description: Protein of unknown function (DUF568)
  misc_feature (1)..(380): Homolog of NCBI NO: 13785213 NR Description: putative membrane protein [Solanum tuberosum]
  misc_feature (1)..(380): Homolog of NCBI NO: 13785211 NR Description: putative membrane protein [Solanum tuberosum]
  misc_feature (1)..(382): Homolog of NCBI NO: 18086563 NR Description: AT4g17280/dl4675c [Arabidopsis thaliana]
  misc_feature (1)..(380): Homolog of NCBI NO: 13785207 NR Description: putative membrane protein [Solanum tuberosum]
  misc_feature (3)..(371): Homolog of NCBI NO: 18404500 NR Description: expressed protein
  misc_feature (10)..(367): Homolog of NCBI NO: 21593814 NR Description: unknown [Arabidopsis thaliana]
  misc_feature (1)..(381): Homolog of NCBI NO: 15238124 NR Description: putative protein; protein id: At5g47530.1
  misc_feature (10)..(367): Homolog of NCBI NO: 15235545 NR Description: putative protein
  misc_feature (2)..(383): Homolog of NCBI NO: 13785209 NR Description: putative membrane protein [Solanum tuberosum]
  misc_feature (1)..(380): Homolog of NCBI NO: 24414270 NR Description: Putative membrane protein [Oryza sativa (japonica
  misc_feature (353)..(353): Xaa is any aa, unknown or other
MSRLLLLGAAVLLLASAATAQDCLSATFSGGRTFGRCNNLPSLIASLHWTYHPENGTADVAFRAPSDASGWVAWGINPDRGGSMGGSSVFVASPSQDGSGAVSILMTHLESTSPSLTNNTLKFKVPVGPAAEYSNGAYTIFAMVELPGNSTQQFTVWQAGATSNGAISPHPTAPANLASTQRLDFLSGSSTAASNSRLHRRNIHGMLNAIAWGVLIPVGAIIARYLRVFESADPAWFYLHIACQCSGYILGVAGWGLGLKLGSESAGVTYQPHRSIGIAIFCLATLQVFALLLRPDKKNRYRLYWNIYHHSVGYSVIVLGAVNIFKGLDILKPASGYKTAYIVVLATLGGVAXCLEAITWPIAIRKRRRNAADKASNGNGNGWQQGA

SEQ ID NO: 18689 - protein, 304 aa, Zea mays subsp. mays
  peptide (1)..(304): Ceres Seq. ID no. 12361069
  misc_feature (1)..(128): Pfam Name: Protein of unknown function (DUF568) Pfam Description: Protein of unknown function (DUF568)
  misc_feature (1)..(297): Homolog of NCBI NO: 13785213 NR Description: putative membrane protein [Solanum tuberosum]
  misc_feature (1)..(297): Homolog of NCBI NO: 13785211 NR Description: putative membrane protein [Solanum tuberosum]
  misc_feature (1)..(299): Homolog of NCBI NO: 18086563 NR Description: AT4g17280/dl4675c [Arabidopsis thaliana]
  misc_feature (1)..(297): Homolog of NCBI NO: 13785207 NR Description: putative membrane protein [Solanum tuberosum]
  misc_feature (1)..(288): Homolog of NCBI NO: 18404500 NR Description: expressed protein
  misc_feature (1)..(284): Homolog of NCBI NO: 21593814 NR Description: unknown [Arabidopsis thaliana]
  misc_feature (1)..(298): Homolog of NCBI NO: 15238124 NR Description: putative protein; protein id: At5g47530.1
  misc_feature (1)..(284): Homolog of NCBI NO: 15235545 NR Description: putative protein
  misc_feature (1)..(300): Homolog of NCBI NO: 13785209 NR Description: putative membrane protein [Solanum tuberosum]
  misc_feature (1)..(297): Homolog of NCBI NO: 24414270 NR Description: Putative membrane protein [Oryza sativa (japonica
  misc_feature (270)..(270): Xaa is any aa, unknown or other
MGGSSVFVASPSQDGSGAVSILMTHLESTSPSLTNNTLKFKVPVGPAAEYSNGAYTIFAMVELPGNSTQQFTVWQAGATSNGAISPHPTAPANLASTQRLDFLSGSSTAASNSRLHRRNIHGMLNAIAWGVLIPVGAIIARYLRVFESADPAWFYLHIACQCSGYILGVAGWGLGLKLGSESAGVTYQPHRSIGIAIFCLATLQVFALLLRPDKKNRYRLYWNIYHHSVGYSVIVLGAVNIFKGLDILKPASGYKTAYIVVLATLGGVAXCLEAITWPIAIRKRRRNAADKASNGNGNGWQQGA

SEQ ID NO: 18690 - protein, 282 aa, Zea mays subsp. mays
  peptide (1)..(282): Ceres Seq. ID no. 12361070
  misc_feature (1)..(106): Pfam Name: Protein of unknown function (DUF568) Pfam Description: Protein of unknown function (DUF568)
  misc_feature (1)..(278): Homolog of NCBI NO: 13785209 NR Description: putative membrane protein [Solanum tuberosum]
  misc_feature (1)..(275): Homolog of NCBI NO: 13785213 NR Description: putative membrane protein [Solanum tuberosum]
  misc_feature (1)..(277): Homolog of NCBI NO: 18086563 NR Description: AT4g17280/dl4675c [Arabidopsis thaliana]
  misc_feature (1)..(266): Homolog of NCBI NO: 18404500 NR Description: expressed protein
  misc_feature (1)..(276): Homolog of NCBI NO: 15238124 NR Description: putative protein; protein id: At5g47530.1
  misc_feature (1)..(262): Homolog of NCBI NO: 15235545 NR Description: putative protein
  misc_feature (1)..(262): Homolog of NCBI NO: 21593814 NR Description: unknown [Arabidopsis thaliana]
  misc_feature (1)..(275): Homolog of NCBI NO: 13785207 NR Description: putative membrane protein [Solanum tuberosum]
  misc_feature (1)..(275): Homolog of NCBI NO: 13785211 NR Description: putative membrane protein [Solanum tuberosum]
  misc_feature (1)..(275): Homolog of NCBI NO: 24414270 NR Description: Putative membrane protein [Oryza sativa (japonica
  misc_feature (248)..(248): Xaa is any aa, unknown or other
MTHLESTSPSLTNNTLKFKVPVGPAAEYSNGAYTIFAMVELPGNSTQQFTVWQAGATSNGAISPHPTAPANLASTQRLDFLSGSSTAASNSRLHRRNIHGMLNAIAWGVLIPVGAIIARYLRVFESADPAWFYLHIACQCSGYILGVAGWGLGLKLGSESAGVTYQPHRSIGIAIFCLATLQVFALLLRPDKKNRYRLYWNIYHHSVGYSVIVLGAVNIFKGLDILKPASGYKTAYIVVLATLGGVAXCLEAITWPIAIRKRRRNAADKASNGNGNGWQQGA

SEQ ID NO: 18691 - DNA, 1676 bp, Zea mays subsp. mays
  misc_feature (1)..(1676): Ceres Seq. ID no. 12375592
  misc_feature: MA Experiment ID: 108529 Result: Up-regulated in Transcription
  misc_feature: MA Experiment 108529 PARAMETER Experiment Name: Zm_Imbibed_Seeds_P Parameter: Age (day) Value: 5 vs. 2
  misc_feature: MA Experiment 108529 PARAMETER Experiment Name: Zm_Imbibed_Seeds_P Parameter: Organism Value: Zea mays
  misc_feature: MA Experiment 108529 PARAMETER Experiment Name: Zm_Imbibed_Seeds_P Parameter: Plant Line Value: 35A19
  misc_feature: MA Experiment 108529 PARAMETER Experiment Name: Zm_Imbibed_Seeds_P Parameter: Tissue Value: Roots vs. Embryo
  misc_feature: MA Experiment ID: 108556 Result: Down-regulated in Transcription
  misc_feature: MA Experiment 108556 PARAMETER Experiment Name: Zm_Drought_P Parameter: Age (day) Value: 9
  misc_feature: MA Experiment 108556 PARAMETER Experiment Name: Zm_Drought_P Parameter: Organism Value: Zea mays
  misc_feature: MA Experiment 108556 PARAMETER Experiment Name: Zm_Drought_P Parameter: Plant Line Value: 35A19
  misc_feature: MA Experiment 108556 PARAMETER Experiment Name: Zm_Drought_P Parameter: Timepoint (hr) Value: 24
  misc_feature: MA Experiment 108556 PARAMETER Experiment Name: Zm_Drought_P Parameter: Tissue Value: Aerial
  misc_feature: MA Experiment 108556 PARAMETER Experiment Name: Zm_Drought_P Parameter: Treatment Value: Drought vs. No Drought
  misc_feature: MA Experiment ID: 108689 Result: Down-regulated in Transcription
  misc_feature: MA Experiment 108689 PARAMETER Experiment Name: Zm_Drought_Roots_P Parameter: Age (day) Value: 9
  misc_feature: MA Experiment 108689 PARAMETER Experiment Name: Zm_Drought_Roots_P Parameter: Organism Value: Zea mays
  misc_feature: MA Experiment 108689 PARAMETER Experiment Name: Zm_Drought_Roots_P Parameter: Plant Line Value: 35A19
  misc_feature: MA Experiment 108689 PARAMETER Experiment Name: Zm_Drought_Roots_P Parameter: Timepoint (hr) Value: 24
  misc_feature: MA Experiment 108689 PARAMETER Experiment Name: Zm_Drought_Roots_P Parameter: Tissue Value: Roots
  misc_feature: MA Experiment 108689 PARAMETER Experiment Name: Zm_Drought_Roots_P Parameter: Treatment Value: Drought vs. No Drought
  misc_feature: MA Experiment ID: 20000534 Result: Up-regulated in Transcription
  misc_feature: MA Experiment 20000534 PARAMETER Experiment Name: Zm_Hybrid_Pollen_P Parameter: Age (day) Value: 8
  misc_feature: MA Experiment 20000534 PARAMETER Experiment Name: Zm_Hybrid_Pollen_P Parameter: Organism Value: Zea mays
  misc_feature: MA Experiment 20000534 PARAMETER Experiment Name: Zm_Hybrid_Pollen_P Parameter: Plant Line Value: 35A19
  misc_feature: MA Experiment 20000534 PARAMETER Experiment Name: Zm_Hybrid_Pollen_P Parameter: Tissue Value: Pollen vs. Aerial
gcacgagaccattacctagaacatcctaatcgaaaacacgcccacttcgccactcggacagtgctcggctcggatcggtcgcacggacacgccccgcgcgtcgcgggctctctctcacctctctcctcctcctttgcctgattggcgtgcccccatgcggatgcggtggctccgacccagctagccccaggctggggctgcgcccgcggcggcgatgaagcggccgctgcggcgctccttcgcggtgctcatcttcgtcgggctcgtcggcgcggcctccttctccaccgcgctccgtcgcgccgtggcgcccccgcccgcgcaggagcccccgccgctcgacccggcgcgcctcaacgctacgctgctccgcctggccgcagccgatccgtcggaagcgtcgctgcgccgggacgtggacggactcctcgagggccgcctcccggcctccgcggcgcgggcccgcgcgtggcgccgcgaccgcctcctccacccgctccacctccaccgccaccgcagcttcccgctcccgcgccgcggccgctacccggacgacgaccacgacatcctgctccacccgctcccgcgccacgagcagctccgcatcgaccccgccctgcgccgcgacctccgctcctggcaccgcctccgccgctacgaccctgccgtcctcgccgccctcccctccctgctctccatccccgggcgcatcccctcctgcgccgtcgtcggcaacagcggcatcctcctgcgcgcgaaccatggagccctcatcgattcccacgcagccgtgttccgcctcaacaacgcccgcgtctcaggctacgccgcgcacgttggcagcaagaccaacttctccttcatcaacagcaacgttcttcacctctgcgcgcgccggcccggctgcttctgccacccttacggccacggcgtccccatcctgctctacatctgccaggccgcccatttcgtcgacgtcgccgcctgcaacgccacctcgtcctcccgccacggctcccccatctccgtcaccgacgcccgcctcgacgtcctctgcgcgcgcatcgtcaagtactactccctccgccgattcgtcgccgagaccggccgcgcgcccgaggagtgggaccgcgcgcacgacgccgccatgttccattactcgtccgggatgcaagccatcatggtcgccgtgggagtgtgcgacagagtcagcgtgtttggcttcagcaagtcttccgacgccaagcatcattaccacagcaaccaaaaggcggagctagacctccacgactacgatgcggagtacgccttctaccacgacctctccgagcgaccgcaggtagtcccgttcctcaaggattccgggttcgccgtcccgcccgtcgtcttctaccattaggccagcttcgtagagcgcgcgccatgtgctcgacgttatgtggaacggctgttttcctcgcttatttttccggttttgattagtgggtacgacatagtaaaattttcgtgtgctgttggagttggaaggtgtatattagggtttagcctactccactggtatagaagaagggatcgtttgcccttttggtttcagcacgacagtaggcagtgcctggaattgtaacttcagactgatattttaatttattaagaaacagaatgtatatcttaccagc

SEQ ID NO: 18692 - protein, 394 aa, Zea mays subsp. mays
  peptide (1)..(394): Ceres Seq. ID no. 12375593
  misc_feature (100)..(382): Pfam Name: Glycosyltransferase family 29 (sialyltransferase) Pfam Description: Glycosyltransferase family 29
  misc_feature (280)..(394): Homolog of NCBI NO: 28416597 NR Description: At1g08280 [Arabidopsis thaliana]
  misc_feature (1)..(394): Homolog of NCBI NO: 15223174 NR Description: sialyltransferase family; protein id: At1g08280.1
  misc_feature (1)..(394): Homolog of NCBI NO: 34908454 NR Description: P0683F02.18 [Oryza sativa (japonica
MKRPLRRSFAVLIFVGLVGAASFSTALRRAVAPPPAQEPPPLDPARLNATLLRLAAADPSEASLRRDVDGLLEGRLPASAARARAWRRDRLLHPLHLHRHRSFPLPRRGRYPDDDHDILLHPLPRHEQLRIDPALRRDLRSWHRLRRYDPAVLAALPSLLSIPGRIPSCAVVGNSGILLRANHGALIDSHAAVFRLNNARVSGYAAHVGSKTNFSFINSNVLHLCARRPGCFCHPYGHGVPILLYICQAAHFVDVAACNATSSSRHGSPISVTDARLDVLCARIVKYYSLRRFVAETGRAPEEWDRAHDAAMFHYSSGMQAIMVAVGVCDRVSVFGFSKSSDAKHHYHSNQKAELDLHDYDAEYAFYHDLSERPQVVPFLKDSGFAVPPVVFYH

SEQ ID NO: 18693 - DNA, 1370 bp, Zea mays subsp. mays
  misc_feature (1)..(1370): Ceres Seq. ID no. 12376881
  misc_feature: MA Experiment ID: 108523 Result: Down-regulated in Transcription
  misc_feature: MA Experiment 108523 PARAMETER Experiment Name: Zm_42deg_Heat_P Parameter: Age (day) Value: 8
  misc_feature: MA Experiment 108523 PARAMETER Experiment Name: Zm_42deg_Heat_P Parameter: Organism Value: Zea mays
  misc_feature: MA Experiment 108523 PARAMETER Experiment Name: Zm_42deg_Heat_P Parameter: Plant Line Value: 35A19
  misc_feature: MA Experiment 108523 PARAMETER Experiment Name: Zm_42deg_Heat_P Parameter: Temperature (deg C) Value: 42 vs. 22
  misc_feature: MA Experiment 108523 PARAMETER Experiment Name: Zm_42deg_Heat_P Parameter: Timepoint (hr) Value: 6
  misc_feature: MA Experiment 108523 PARAMETER Experiment Name: Zm_42deg_Heat_P Parameter: Tissue Value: Aerial
  misc_feature: MA Experiment ID: 108527 Result: Down-regulated in Transcription
  misc_feature: MA Experiment 108527 PARAMETER Experiment Name: Zm_5mM_NO_P Parameter: Age (day) Value: 8
  misc_feature: MA Experiment 108527 PARAMETER Experiment Name: Zm_5mM_NO_P Parameter: Organism Value: Zea mays
  misc_feature: MA Experiment 108527 PARAMETER Experiment Name: Zm_5mM_NO_P Parameter: Plant Line Value: 35A19
  misc_feature: MA Experiment 108527 PARAMETER Experiment Name: Zm_5mM_NO_P Parameter: Timepoint (hr) Value: 6
  misc_feature: MA Experiment 108527 PARAMETER Experiment Name: Zm_5mM_NO_P Parameter: Tissue Value: Aerial
  misc_feature: MA Experiment 108527 PARAMETER Experiment Name: Zm_5mM_NO_P Parameter: Treatment Value: 5mM NO vs. No Treatment
  misc_feature: MA Experiment ID: 108528 Result: Up-regulated in Transcription
  misc_feature: MA Experiment 108528 PARAMETER Experiment Name: Zm_Imbibed_Seeds_P Parameter: Age (day) Value: 5 vs. 2
  misc_feature: MA Experiment 108528 PARAMETER Experiment Name: Zm_Imbibed_Seeds_P Parameter: Organism Value: Zea mays
  misc_feature: MA Experiment 108528 PARAMETER Experiment Name: Zm_Imbibed_Seeds_P Parameter: Plant Line Value: 35A19
  misc_feature: MA Experiment 108528 PARAMETER Experiment Name: Zm_Imbibed_Seeds_P Parameter: Tissue Value: Aerial vs. Embryo
  misc_feature: MA Experiment ID: 108530 Result: Up-regulated in Transcription
  misc_feature: MA Experiment 108530 PARAMETER Experiment Name: Zm_Imbibed_Seeds_P Parameter: Age (day) Value: 6 vs. 2
  misc_feature: MA Experiment 108530 PARAMETER Experiment Name: Zm_Imbibed_Seeds_P Parameter: Organism Value: Zea mays
  misc_feature: MA Experiment 108530 PARAMETER Experiment Name: Zm_Imbibed_Seeds_P Parameter: Plant Line Value: 35A19
  misc_feature: MA Experiment 108530 PARAMETER Experiment Name: Zm_Imbibed_Seeds_P Parameter: Tissue Value: Aerial vs. Embryo
  misc_feature: MA Experiment ID: 108536 Result: Down-regulated in Transcription
  misc_feature: MA Experiment 108536 PARAMETER Experiment Name: Zm_Meristem_P Parameter: Age (day) Value: 8
  misc_feature: MA Experiment 108536 PARAMETER Experiment Name: Zm_Meristem_P Parameter: Organism Value: Zea mays
  misc_feature: MA Experiment 108536 PARAMETER Experiment Name: Zm_Meristem_P Parameter: Plant Line Value: 35A19
  misc_feature: MA Experiment 108536 PARAMETER Experiment Name: Zm_Meristem_P Parameter: Tissue Value: Shoot Meristem vs. Above Shoot Meristem
  misc_feature: MA Experiment ID: 108545 Result: Up-regulated in Transcription
  misc_feature: MA Experiment 108545 PARAMETER Experiment Name: Zm_Imbibed_Seeds_P Parameter: Age (day) Value: 3 vs. 2
  misc_feature: MA Experiment 108545 PARAMETER Experiment Name: Zm_Imbibed_Seeds_P Parameter: Organism Value: Zea mays
  misc_feature: MA Experiment 108545 PARAMETER Experiment Name: Zm_Imbibed_Seeds_P Parameter: Plant Line Value: 35A19
  misc_feature: MA Experiment 108545 PARAMETER Experiment Name: Zm_Imbibed_Seeds_P Parameter: Tissue Value: Aerial vs. Embryo
  misc_feature: MA Experiment ID: 108547 Result: Up-regulated in Transcription
  misc_feature: MA Experiment 108547 PARAMETER Experiment Name: Zm_Imbibed_Seeds_P Parameter: Age (day) Value: 4 vs. 2
  misc_feature: MA Experiment 108547 PARAMETER Experiment Name: Zm_Imbibed_Seeds_P Parameter: Organism Value: Zea mays
  misc_feature: MA Experiment 108547 PARAMETER Experiment Name: Zm_Imbibed_Seeds_P Parameter: Plant Line Value: 35A19
  misc_feature: MA Experiment 108547 PARAMETER Experiment Name: Zm_Imbibed_Seeds_P Parameter: Tissue Value: Aerial vs. Embryo
  misc_feature: MA Experiment ID: 108556 Result: Down-regulated in Transcription
  misc_feature: MA Experiment 108556 PARAMETER Experiment Name: Zm_Drought_P Parameter: Age (day) Value: 9
  misc_feature: MA Experiment 108556 PARAMETER Experiment Name: Zm_Drought_P Parameter: Organism Value: Zea mays
  misc_feature: MA Experiment 108556 PARAMETER Experiment Name: Zm_Drought_P Parameter: Plant Line Value: 35A19
  misc_feature: MA Experiment 108556 PARAMETER Experiment Name: Zm_Drought_P Parameter: Timepoint (hr) Value: 24
  misc_feature: MA Experiment 108556 PARAMETER Experiment Name: Zm_Drought_P Parameter: Tissue Value: Aerial
  misc_feature: MA Experiment 108556 PARAMETER Experiment Name: Zm_Drought_P Parameter: Treatment Value: Drought vs. No Drought
  misc_feature: MA Experiment ID: 108559 Result: Down-regulated in Transcription
  misc_feature: MA Experiment 108559 PARAMETER Experiment Name: Zm_5mM_NO_P Parameter: Age (day) Value: 8
  misc_feature: MA Experiment 108559 PARAMETER Experiment Name: Zm_5mM_NO_P Parameter: Organism Value: Zea mays
  misc_feature: MA Experiment 108559 PARAMETER Experiment Name: Zm_5mM_NO_P Parameter: Plant Line Value: 35A19
  misc_feature: MA Experiment 108559 PARAMETER Experiment Name: Zm_5mM_NO_P Parameter: Timepoint (hr) Value: 12
  misc_feature: MA Experiment 108559 PARAMETER Experiment Name: Zm_5mM_NO_P Parameter: Tissue Value: Aerial
  misc_feature: MA Experiment 108559 PARAMETER Experiment Name: Zm_5mM_NO_P Parameter: Treatment Value: 5mM NO vs. No Treatment
  misc_feature: MA Experiment ID: 20000477 Result: Down-regulated in Transcription
  misc_feature: MA Experiment 20000477 PARAMETER Experiment Name: Zm_5mM_SA_P Parameter: Age (day) Value: 10
  misc_feature: MA Experiment 20000477 PARAMETER Experiment Name: Zm_5mM_SA_P Parameter: Organism Value: Zea mays
  misc_feature: MA Experiment 20000477 PARAMETER Experiment Name: Zm_5mM_SA_P Parameter: Plant Line Value: 35A19
  misc_feature: MA Experiment 20000477 PARAMETER Experiment Name: Zm_5mM_SA_P Parameter: Timepoint (hr) Value: 48
  misc_feature: MA Experiment 20000477 PARAMETER Experiment Name: Zm_5mM_SA_P Parameter: Tissue Value: Aerial
  misc_feature: MA Experiment 20000477 PARAMETER Experiment Name: Zm_5mM_SA_P Parameter: Treatment Value: 5mM SA vs. No Treatment
  misc_feature: MA Experiment ID: 20000479 Result: Down-regulated in Transcription
  misc_feature: MA Experiment 20000479 PARAMETER Experiment Name: Zm_Drought_P Parameter: Age (day) Value: 10
  misc_feature: MA Experiment 20000479 PARAMETER Experiment Name: Zm_Drought_P Parameter: Organism Value: Zea mays
  misc_feature: MA Experiment 20000479 PARAMETER Experiment Name: Zm_Drought_P Parameter: Plant Line Value: 35A19
  misc_feature: MA Experiment 20000479 PARAMETER Experiment Name: Zm_Drought_P Parameter: Timepoint (hr) Value: 48
  misc_feature: MA Experiment 20000479 PARAMETER Experiment Name: Zm_Drought_P Parameter: Tissue Value: Aerial
  misc_feature: MA Experiment 20000479 PARAMETER Experiment Name: Zm_Drought_P Parameter: Treatment Value: Drought vs. No Drought
  misc_feature: MA Experiment ID: 20000480 Result: Down-regulated in Transcription
  misc_feature: MA Experiment 20000480 PARAMETER Experiment Name: Zm_Drought_P Parameter: Age (day) Value: 11
  misc_feature: MA Experiment 20000480 PARAMETER Experiment Name: Zm_Drought_P Parameter: Organism Value: Zea mays
  misc_feature: MA Experiment 20000480 PARAMETER Experiment Name: Zm_Drought_P Parameter: Plant Line Value: 35A19
  misc_feature: MA Experiment 20000480 PARAMETER Experiment Name: Zm_Drought_P Parameter: Timepoint (hr) Value: 72
  misc_feature: MA Experiment 20000480 PARAMETER Experiment Name: Zm_Drought_P Parameter: Tissue Value: Aerial
  misc_feature: MA Experiment 20000480 PARAMETER Experiment Name: Zm_Drought_P Parameter: Treatment Value: Drought vs. No Drought
gcacgagaccattacctagaacatcctaatcgaaaaattttccaagctttctccagatcaaatcagaaaggggaagggaagaacggcccagcaatgccgctctgcagcttctacgcctccacctccgttcccgtcgtcaagccccagcagtccgtcgcctcgtccaagccccccaccacggcggtggcctccgtggcgacaactgtgccgatgcgcagtgcagcgacggtgacgccagccgtggccacaacaacgagcctagcgctgtctctgcacctgccggagctgccgtcgcaggtgaaggacaagatcctgagcctggagctgatgggcgtggactatgggcgcgcgctggagcagaacccggcgctccgcgacgcggcgccggagtccatccacgcggtggtgtcgttcctccagtcccgcgggctccagttcaaggacctgggccgcgtcttcggcatgtgcccgtccgtgctgaccgccagcgtccgcgccgacctccgccccgtgttcgccttcctctccgcggacctgggcgtgccggagtcggcgcaccgggcgcgtggtgatcaagtgcccgcgcgtgctggcctgcagcgtccgcgaccagctccgccccgcgctcatctacctccgccgcctgggcttccgggacagccgcgcgctggcgctgcaggacccgatcctcctcgtctccagcgtggagcgcaccctggcgccgaagctggagtacctggccgggctcggcatgtcccgcgacgacgcggtcgccatggtgctgcgctgcccggcgctcttcaccttcagcatcgagcggaactaccggcccaagttcgagtacctggtggacgccatgggcggcggcgtcgaggacgtcaaggccttcccgcagtacttcgccttcagcctcgagaagcggatcgcgccgcgccaccgcgccgcggaggacgccggcgtcgcgctgccgcttccggacatgctcaaggccaccgacgaggagttcagggagatgctcgacaaggagcgggagctgcacgagcaggcagcgacgacggactgatcgatcggggggctagtacagcggtttgcacctgatccgactatccgaagcatccaaccgccgtcttcgtggcgatcgagtgtcctggccatgacggtagccagcacatgtagtcatttgatttgagtaattagtagcctgtacatatatgcattgacattatttgctatagtcacgattcgtagctcatgagagaatatgtctgttctttctccattattccaagtgaataagcaccgagctggaagtcgtgtctttatgtacacacgtgtaccaagtttacaggaatgaatgtaccaagttcatt

SEQ ID NO: 18694 - protein, 365 aa, Zea mays subsp. mays
  peptide (1)..(365): Ceres Seq. ID no. 12376882
  misc_feature (99)..(187): Pfam Name: mTERF Pfam Description: mTERF
  misc_feature (182)..(328): Homolog of NCBI NO: 27375632 NR Description: blr0521 [Bradyrhizobium japonicum]
  misc_feature (95)..(175): Homolog of NCBI NO: 18406426 NR Description: expressed protein
  misc_feature (90)..(184): Homolog of NCBI NO: 15240542 NR Description: putative protein
  misc_feature (104)..(184): Homolog of NCBI NO: 27817836 NR Description: OJ1127_E01.4 [Oryza sativa (japonica
  misc_feature (54)..(181): Homolog of NCBI NO: 21537209 NR Description: unknown [Arabidopsis thaliana]
  misc_feature (101)..(183): Homolog of NCBI NO: 28204784 NR Description: hypothetical protein [Arabidopsis thaliana]
  misc_feature (101)..(183): Homolog of NCBI NO: 15227524 NR Description: predicted by genefinder and genscan; protein id:
  misc_feature (109)..(187): Homolog of NCBI NO: 28392870 NR Description: unknown protein [Arabidopsis thaliana]
  misc_feature (99)..(187): Homolog of NCBI NO: 15226787 NR Description: hypothetical protein; protein id: At2g34620.1
ARDHYLEHPNRKIFQAFSRSNQKGEGKNGPAMPLCSFYASTSVPVVKPQQSVASSKPPTTAVASVATTVPMRSAATVTPAVATTTSLALSLHLPELPSQVKDKILSLELMGVDYGRALEQNPALRDAAPESIHAVVSFLQSRGLQFKDLGRVFGMCPSVLTASVRADLRPVFAFLSADLGVPESAHRARGDQVPARAGLQRPRPAPPRAHLPPPPGLPGQPRAGAAGPDPPRLQRGAHPGAEAGVPGRARHVPRRRGRHGAALPGALHLQHRAELPAQVRVPGGRHGRRRRGRQGLPAVLRLQPREADRAAPPRRGGRRRRAAASGHAQGHRRGVQGDARQGAGAARAGSDDGLIDRGASTAVCT

SEQ ID NO: 18695 - protein, 334 aa, Zea mays subsp. mays
  peptide (1)..(334): Ceres Seq. ID no. 12376883
  misc_feature (68)..(156): Pfam Name: mTERF Pfam Description: mTERF
  misc_feature (151)..(297): Homolog of NCBI NO: 27375632 NR Description: blr0521 [Bradyrhizobium japonicum]
  misc_feature (64)..(144): Homolog of NCBI NO: 18406426 NR Description: expressed protein
  misc_feature (59)..(153): Homolog of NCBI NO: 15240542 NR Description: putative protein
  misc_feature (73)..(153): Homolog of NCBI NO: 27817836 NR Description: OJ1127_E01.4 [Oryza sativa (japonica
  misc_feature (23)..(150): Homolog of NCBI NO: 21537209 NR Description: unknown [Arabidopsis thaliana]
  misc_feature (70)..(152): Homolog of NCBI NO: 28204784 NR Description: hypothetical protein [Arabidopsis thaliana]
  misc_feature (70)..(152): Homolog of NCBI NO: 15227524 NR Description: predicted by genefinder and genscan; protein id:
  misc_feature (78)..(156): Homolog of NCBI NO: 28392870 NR Description: unknown protein [Arabidopsis thaliana]
  misc_feature (68)..(156): Homolog of NCBI NO: 15226787 NR Description: hypothetical protein; protein id: At2g34620.1
MPLCSFYASTSVPVVKPQQSVASSKPPTTAVASVATTVPMRSAATVTPAVATTTSLALSLHLPELPSQVKDKILSLELMGVDYGRALEQNPALRDAAPESIHAVVSFLQSRGLQFKDLGRVFGMCPSVLTASVRADLRPVFAFLSADLGVPESAHRARGDQVPARAGLQRPRPAPPRAHLPPPPGLPGQPRAGAAGPDPPRLQRGAHPGAEAGVPGRARHVPRRRGRHGAALPGALHLQHRAELPAQVRVPGGRHGRRRRGRQGLPAVLRLQPREADRAAPPRRGGRRRRAAASGHAQGHRRGVQGDARQGAGAARAGSDDGLIDRGASTAVCT

SEQ ID NO: 18696 - protein, 295 aa, Zea mays subsp. mays
  peptide (1)..(295): Ceres Seq. ID no. 12376884
  misc_feature (29)..(117): Pfam Name: mTERF Pfam Description: mTERF
  misc_feature (112)..(258): Homolog of NCBI NO: 27375632 NR Description: blr0521 [Bradyrhizobium japonicum]
  misc_feature (25)..(105): Homolog of NCBI NO: 18406426 NR Description: expressed protein
  misc_feature (20)..(114): Homolog of NCBI NO: 15240542 NR Description: putative protein
  misc_feature (34)..(114): Homolog of NCBI NO: 27817836 NR Description: OJ1127_E01.4 [Oryza sativa (japonica
  misc_feature (1)..(111): Homolog of NCBI NO: 21537209 NR Description: unknown [Arabidopsis thaliana]
  misc_feature (31)..(113): Homolog of NCBI NO: 28204784 NR Description: hypothetical protein [Arabidopsis thaliana]
  misc_feature (31)..(113): Homolog of NCBI NO: 15227524 NR Description: predicted by genefinder and genscan; protein id:
  misc_feature (39)..(117): Homolog of NCBI NO: 28392870 NR Description: unknown protein [Arabidopsis thaliana]
  misc_feature (29)..(117): Homolog of NCBI NO: 15226787 NR Description: hypothetical protein; protein id: At2g34620.1
MRSAATVTPAVATTTSLALSLHLPELPSQVKDKILSLELMGVDYGRALEQNPALRDAAPESIHAVVSFLQSRGLQFKDLGRVFGMCPSVLTASVRADLRPVFAFLSADLGVPESAHRARGDQVPARAGLQRPRPAPPRAHLPPPPGLPGQPRAGAAGPDPPRLQRGAHPGAEAGVPGRARHVPRRRGRHGAALPGALHLQHRAELPAQVRVPGGRHGRRRRGRQGLPAVLRLQPREADRAAPPRRGGRRRRAAASGHAQGHRRGVQGDARQGAGAARAGSDDGLIDRGASTAVCT

SEQ ID NO: 18697 - DNA, 1375 bp, Zea mays subsp. mays
  misc_feature (1)..(1375): Ceres Seq. ID no. 12368133
  misc_feature: MA Experiment ID: 108535 Result: Up-regulated in Transcription
  misc_feature: MA Experiment 108535 PARAMETER Experiment Name: Zm_Meristem_P Parameter: Age (day) Value: 8
  misc_feature: MA Experiment 108535 PARAMETER Experiment Name: Zm_Meristem_P Parameter: Organism Value: Zea mays
  misc_feature: MA Experiment 108535 PARAMETER Experiment Name: Zm_Meristem_P Parameter: Plant Line Value: 35A19
  misc_feature: MA Experiment 108535 PARAMETER Experiment Name: Zm_Meristem_P Parameter: Tissue Value: Root Meristem vs. Above Root Meristem
  misc_feature: MA Experiment ID: 108536 Result: Up-regulated in Transcription
  misc_feature: MA Experiment 108536 PARAMETER Experiment Name: Zm_Meristem_P Parameter: Age (day) Value: 8
  misc_feature: MA Experiment 108536 PARAMETER Experiment Name: Zm_Meristem_P Parameter: Organism Value: Zea mays
  misc_feature: MA Experiment 108536 PARAMETER Experiment Name: Zm_Meristem_P Parameter: Plant Line Value: 35A19
  misc_feature: MA Experiment 108536 PARAMETER Experiment Name: Zm_Meristem_P Parameter: Tissue Value: Shoot Meristem vs. Above Shoot Meristem
  misc_feature: MA Experiment ID: 20000108 Result: Up-regulated in Transcription
  misc_feature: MA Experiment 20000108 PARAMETER Experiment Name: Zm_Root-Tips_P Parameter: Age (day) Value: 12
  misc_feature: MA Experiment 20000108 PARAMETER Experiment Name: Zm_Root-Tips_P Parameter: Organism Value: Zea mays
  misc_feature: MA Experiment 20000108 PARAMETER Experiment Name: Zm_Root-Tips_P Parameter: Tissue Value: Root tips vs. Root mid region    35
  misc_feature: MA Experiment 20000108 PARAMETER Experiment Name: Zm_Root-Tips_P Parameter: Tissue Value: Root tips vs. Root mid region   Sequence Listing-Misc Features (4)
  misc_feature: MA Experiment ID: 20000477 Result: Down-regulated in Transcription
  misc_feature: MA Experiment 20000477 PARAMETER Experiment Name: Zm_5mM_SA_P Parameter: Age (day) Value: 10
  misc_feature: MA Experiment 20000477 PARAMETER Experiment Name: Zm_5mM_SA_P Parameter: Organism Value: Zea mays
  misc_feature: MA Experiment 20000477 PARAMETER Experiment Name: Zm_5mM_SA_P Parameter: Plant Line Value: 35A19
  misc_feature: MA Experiment 20000477 PARAMETER Experiment Name: Zm_5mM_SA_P Parameter: Timepoint (hr) Value: 48
  misc_feature: MA Experiment 20000477 PARAMETER Experiment Name: Zm_5mM_SA_P Parameter: Tissue Value: Aerial
  misc_feature: MA Experiment 20000477 PARAMETER Experiment Name: Zm_5mM_SA_P Parameter: Treatment Value: 5mM SA vs. No Treatment
  misc_feature: MA Experiment ID: 20000478 Result: Down-regulated in Transcription
  misc_feature: MA Experiment 20000478 PARAMETER Experiment Name: Zm_5mM_SA_P Parameter: Age (day) Value: 11
  misc_feature: MA Experiment 20000478 PARAMETER Experiment Name: Zm_5mM_SA_P Parameter: Organism Value: Zea mays
  misc_feature: MA Experiment 20000478 PARAMETER Experiment Name: Zm_5mM_SA_P Parameter: Plant Line Value: 35A19
  misc_feature: MA Experiment 20000478 PARAMETER Experiment Name: Zm_5mM_SA_P Parameter: Timepoint (hr) Value: 72
  misc_feature: MA Experiment 20000478 PARAMETER Experiment Name: Zm_5mM_SA_P Parameter: Tissue Value: Aerial
  misc_feature: MA Experiment 20000478 PARAMETER Experiment Name: Zm_5mM_SA_P Parameter: Treatment Value: 5mM SA vs. No Treatment
  misc_feature: MA Experiment ID: 20000535 Result: Up-regulated in Transcription
  misc_feature: MA Experiment 20000535 PARAMETER Experiment Name: Zm_Hybrid_Seed_Dev_P Parameter: DAP Value: 30 vs. 12
  misc_feature: MA Experiment 20000535 PARAMETER Experiment Name: Zm_Hybrid_Seed_Dev_P Parameter: Organism Value: Zea mays
  misc_feature: MA Experiment 20000535 PARAMETER Experiment Name: Zm_Hybrid_Seed_Dev_P Parameter: Plant Line Value: 35A19
  misc_feature: MA Experiment 20000535 PARAMETER Experiment Name: Zm_Hybrid_Seed_Dev_P Parameter: Tissue Value: Embryo vs. Unfert Floret
gcacgagaccattacctagaacatcctaatcgaaaaggatctgcatgctgctccctgcggcgcttaacgtttgtgtgagaagatgaggtttctgtctagctctcttctgcctgcctgcctttctttgtatcccccttgtcagcttcgaaacttctctgctcatgagctatggccagtcctgctgccactgtagatttttttaagtgcggaggaaatctcttccccccccccctccctccctggttattgtgcatacatagctatcctgctgaacgaagcacaaataaatacaaaccaagaaacgccagtgctttctcgatcacgtactggcacgagctagcgagcagactcactcgaacacacactgaccaaccgctcctctctccttccgttccgtcattccgtgtgcagcagacgcggcgttctgcgtgtgcaagacgggcgtgcccgaccaggcgatgcaggcggcgatcgactacgcctgcgccaagggggccgactgcgcctccgcctccaagggcgcgccctgctacggcaacggcaacaaggtggccgtctgctcctacatctgcaacagctactaccagagccgcagcgccacgggcgccacctgcgacttcaacggcgtcgccacgctcaccggcaccgaccccagctccggcacctgcaagttcgcctccggccccagcgcaggcaccggcggtggcatgggcgctggcgcgggtaccggcggtggcatgggcgctggcgctggcaccggcgccgggacaggcgttggcaccggagcaggcacgggcatgggcaccgggacggggaccagcaccggcaccggcgccggcgcaggggtcgcgacccccgggagcgccctgagcccaccgttcggcggcactggcgcgtacggcccgtcaggggcaggcagcacggactacaacgacgccgtcgccccgcgcgccgccgggctgcacgtggtggctgccctcgctctcgccgtcgccgtcgccgcacctctccaccgctaggggcggtgccatggcaactgggagctggcgggcacgacactcgcagacgggatcccgcctcggcggcccgccagcgcgggctctggtcgatgtccggcgttagtgcgtgcgcgtacctgatgaagtgatgatgggttttgatcgaccagccgtcagcgtagtgcggtcacggggtttacagtgttattcgaactgacctctctgcttcctcgtgctagtagtggtggctgccatgtgtgtgtgctgctggtagagaactagggattctttttttttcttctgtcgcttccttgcttatatgtcccgtcgtgttaggctgtgtttactatgcagtgtttttggtggtggccgctttc

SEQ ID NO: 18698 - protein, 233 aa, Zea mays subsp. mays
  peptide (1)..(233): Ceres Seq. ID no. 12368134
  misc_feature (69)..(231): Pfam Name: Glycoprotein GG/GX Pfam Description: Glycoprotein GG/GX
  misc_feature (105)..(233): Homolog of NCBI NO: 71400 NR Description: dermal gland protein APEG precursor - African
  misc_feature (105)..(233): Homolog of NCBI NO: 731172 NR Description: SKIN SECRETORY PROTEIN XP2 PRECURSOR (APEG
  misc_feature (105)..(233): Homolog of NCBI NO: 71400 NR Description: dermal gland protein APEG precursor - African
  misc_feature (99)..(233): Homolog of NCBI NO: 28972556 NR Description: mKIAA0975 protein [Mus musculus]
  misc_feature (46)..(230): Homolog of NCBI NO: 27379673 NR Description: blr4562 [Bradyrhizobium japonicum]
  misc_feature (92)..(233): Homolog of NCBI NO: 27375632 NR Description: blr0521 [Bradyrhizobium japonicum]
  misc_feature (89)..(233): Homolog of NCBI NO: 27375632 NR Description: blr0521 [Bradyrhizobium japonicum]
  misc_feature (67)..(233): Homolog of NCBI NO: 12313873 NR Description: nischarin; imidazoline receptor I-1-like protein
  misc_feature (105)..(233): Homolog of NCBI NO: 731172 NR Description: SKIN SECRETORY PROTEIN XP2 PRECURSOR (APEG
  misc_feature (105)..(233): Homolog of NCBI NO: 71400 NR Description: dermal gland protein APEG precursor - African
MASPAATVDFFKCGGNLFPPPLPPWLLCIHSYPAERSTNKYKPRNASAFSITYWHELASRLTRTHTDQPLLSPSVPSFRVQQTRRSACARRACPTRRCRRRSTTPAPRGPTAPPPPRARPATATATRWPSAPTSATATTRAAAPRAPPATSTASPRSPAPTPAPAPASSPPAPAQAPAVAWALARVPAVAWALALAPAPGQALAPEQARAWAPGRGPAPAPAPAQGSRPPGAP

SEQ ID NO: 18699 - protein, 186 aa, Zea mays subsp. mays
  peptide (1)..(186): Ceres Seq. ID no. 12368135
  misc_feature (76)..(129): Pfam Name: Serglycin Pfam Description: Serglycin
  misc_feature (1)..(182): Homolog of NCBI NO: 34912962 NR Description: beta-1,3 glucanase-like protein
  misc_feature (1)..(153): Homolog of NCBI NO: 25404810 NR Description: unknown protein, 45065-49536 [imported] -
  misc_feature (1)..(138): Homolog of NCBI NO: 15241485 NR Description: glycosyl hydrolase family 17
  misc_feature (1)..(138): Homolog of NCBI NO: 21592859 NR Description: unknown [Arabidopsis thaliana]
  misc_feature (1)..(140): Homolog of NCBI NO: 33146901 NR Description: beta-1,3-glucanase-like protein
  misc_feature (1)..(138): Homolog of NCBI NO: 30697478 NR Description: glycosyl hydrolase family 17 [Arabidopsis
  misc_feature (1)..(72): Homolog of NCBI NO: 34909796 NR Description: P0403C05.4 [Oryza sativa (japonica
  misc_feature (1)..(184): Homolog of NCBI NO: 18409239 NR Description: unknown protein
  misc_feature (1)..(184): Homolog of NCBI NO: 21553768 NR Description: unknown [Arabidopsis thaliana]
  misc_feature (1)..(129): Homolog of NCBI NO: 22775658 NR Description: contains ESTs
MQAAIDYACAKGADCASASKGAPCYGNGNKVAVCSYICNSYYQSRSATGATCDFNGVATLTGTDPSSGTCKFASGPSAGTGGGMGAGAGTGGGMGAGAGTGAGTGVGTGAGTGMGTGTGTSTGTGAGAGVATPGSALSPPFGGTGAYGPSGAGSTDYNDAVAPRAAGLHVVAALALAVAVAAPLHR

SEQ ID NO: 18700 - DNA, 644 bp, Zea mays subsp. mays
  misc_feature (1)..(644): Ceres Seq. ID no. 12418062
  misc_feature: MA Experiment ID: 108544 Result: Down-regulated in Transcription
  misc_feature: MA Experiment ID: 20000492 Result: Up-regulated in Transcription
  misc_feature: MA Experiment 20000492 PARAMETER Experiment Name: Zm_Hybrid_Seed_Dev_P Parameter: DAP Value: 12
  misc_feature: MA Experiment 20000492 PARAMETER Experiment Name: Zm_Hybrid_Seed_Dev_P Parameter: Organism Value: Zea mays
  misc_feature: MA Experiment 20000492 PARAMETER Experiment Name: Zm_Hybrid_Seed_Dev_P Parameter: Plant Line Value: 35A19
  misc_feature: MA Experiment 20000492 PARAMETER Experiment Name: Zm_Hybrid_Seed_Dev_P Parameter: Tissue Value: Fert Kernel vs. Unfert Floret
cattggagactctttggacttggtacctattgctgccttctacggtagaggaaaacgaacaggtgtctttggatcattcctcctcgcatgctatgatgagcagaacgaagaatatcaaacaatatgcaacataggtactggattttctgagcaacagcttgaagaacgttctgcgagccttcgaagtaaagtgatagaaaaaccaaaggcatactatagatttggcgacacaatgaaccccgatgtgtggtttgagccatcagaggtctgggaggtcaaagctgccgatctgagcataagccctgtacatcgtgctgccaatggtatagtcgatccaaataagggtatctctctaagattccctcgcctattgagattacgtgacgataaaagcccagaacaagccaccacgtctgaccaagtcgctgacatgtaccgggtctcaaaagatcaaccacggntataaccaggaggatgaggacgatgactgatgttgacttaattctttgttgctggatgggatggttcactgtgtaaacactagtcttcgcagtttccagcttgttctcaaccgtaacctgttgatttaccggttcctgtttctatgatcaaatgaacaggtattgaccggagattgcattttc

SEQ ID NO: 18701 - protein, 154 aa, Zea mays subsp. mays
  peptide (1)..(154): Ceres Seq. ID no. 12418063
  misc_feature (19)..(84): Pfam Name: ATP dependent DNA ligase C terminal region Pfam Description: ATP dependent DNA ligase C terminal region
  misc_feature (1)..(146): Homolog of NCBI NO: 1706480 NR Description: DNA LIGASE I (POLYDEOXYRIBONUCLEOTIDE SYNTHASE
  misc_feature (3)..(149): Homolog of NCBI NO: 28830036 NR Description: similar to Xenopus laevis (African clawed frog).
  misc_feature (88)..(149): Homolog of NCBI NO: 8778834 NR Description: T6D22.23 [Arabidopsis thaliana]
  misc_feature (1)..(88): Homolog of NCBI NO: 8778834 NR Description: T6D22.23 [Arabidopsis thaliana]
  misc_feature (88)..(149): Homolog of NCBI NO: 6579215 NR Description: T23G18.1 [Arabidopsis thaliana]
  misc_feature (1)..(89): Homolog of NCBI NO: 6579215 NR Description: T23G18.1 [Arabidopsis thaliana]
  misc_feature (1)..(152): Homolog of NCBI NO: 15222077 NR Description: hypothetical protein; protein id: At1g49250.1
  misc_feature (1)..(149): Homolog of NCBI NO: 2129574 NR Description: DNA ligase (ATP) (EC 6.5.1.1) - Arabidopsis
  misc_feature (1)..(149): Homolog of NCBI NO: 30680522 NR Description: ligase I -related [Arabidopsis thaliana]
  misc_feature (1)..(149): Homolog of NCBI NO: 37535574 NR Description: putative DNA ligase [Oryza sativa (japonica
  misc_feature (154)..(154): Xaa is any aa, unknown or other
IGDSLDLVPIAAFYGRGKRTGVFGSFLLACYDEQNEEYQTICNIGTGFSEQQLEERSASLRSKVIEKPKAYYRFGDTMNPDVWFEPSEVWEVKAADLSISPVHRAANGIVDPNKGISLRFPRLLRLRDDKSPEQATTSDQVADMYRVSKDQPRX

SEQ ID NO: 18702 - protein, 77 aa, Zea mays subsp. mays
  peptide (1)..(77): Ceres Seq. ID no. 12418064
  misc_feature (1)..(69): Homolog of NCBI NO: 1706480 NR Description: DNA LIGASE I (POLYDEOXYRIBONUCLEOTIDE SYNTHASE
  misc_feature (1)..(72): Homolog of NCBI NO: 28830036 NR Description: similar to Xenopus laevis (African clawed frog).
  misc_feature (11)..(72): Homolog of NCBI NO: 8778834 NR Description: T6D22.23 [Arabidopsis thaliana]
  misc_feature (1)..(11): Homolog of NCBI NO: 8778834 NR Description: T6D22.23 [Arabidopsis thaliana]
  misc_feature (11)..(72): Homolog of NCBI NO: 6579215 NR Description: T23G18.1 [Arabidopsis thaliana]
  misc_feature (1)..(12): Homolog of NCBI NO: 6579215 NR Description: T23G18.1 [Arabidopsis thaliana]
  misc_feature (1)..(75): Homolog of NCBI NO: 15222077 NR Description: hypothetical protein; protein id: At1g49250.1
  misc_feature (1)..(72): Homolog of NCBI NO: 2129574 NR Description: DNA ligase (ATP) (EC 6.5.1.1) - Arabidopsis
  misc_feature (1)..(72): Homolog of NCBI NO: 30680522 NR Description: ligase I -related [Arabidopsis thaliana]
  misc_feature (1)..(72): Homolog of NCBI NO: 37535574 NR Description: putative DNA ligase [Oryza sativa (japonica
  misc_feature (77)..(77): Xaa is any aa, unknown or other
MNPDVWFEPSEVWEVKAADLSISPVHRAANGIVDPNKGISLRFPRLLRLRDDKSPEQATTSDQVADMYRVSKDQPRX

SEQ ID NO: 18703 - DNA, 1475 bp, Zea mays subsp. mays
  misc_feature (1)..(1475): Ceres Seq. ID no. 12375615
  misc_feature: MA Experiment ID: 108535 Result: Up-regulated in Transcription
  misc_feature: MA Experiment 108535 PARAMETER Experiment Name: Zm_Meristem_P Parameter: Age (day) Value: 8
  misc_feature: MA Experiment 108535 PARAMETER Experiment Name: Zm_Meristem_P Parameter: Organism Value: Zea mays
  misc_feature: MA Experiment 108535 PARAMETER Experiment Name: Zm_Meristem_P Parameter: Plant Line Value: 35A19
  misc_feature: MA Experiment 108535 PARAMETER Experiment Name: Zm_Meristem_P Parameter: Tissue Value: Root Meristem vs. Above Root Meristem
  misc_feature: MA Experiment ID: 108543 Result: Up-regulated in Transcription
  misc_feature: MA Experiment ID: 108544 Result: Down-regulated in Transcription
  misc_feature: MA Experiment ID: 20000477 Result: Down-regulated in Transcription
  misc_feature: MA Experiment 20000477 PARAMETER Experiment Name: Zm_5mM_SA_P Parameter: Age (day) Value: 10
  misc_feature: MA Experiment 20000477 PARAMETER Experiment Name: Zm_5mM_SA_P Parameter: Organism Value: Zea mays
  misc_feature: MA Experiment 20000477 PARAMETER Experiment Name: Zm_5mM_SA_P Parameter: Plant Line Value: 35A19
  misc_feature: MA Experiment 20000477 PARAMETER Experiment Name: Zm_5mM_SA_P Parameter: Timepoint (hr) Value: 48
  misc_feature: MA Experiment 20000477 PARAMETER Experiment Name: Zm_5mM_SA_P Parameter: Tissue Value: Aerial
  misc_feature: MA Experiment 20000477 PARAMETER Experiment Name: Zm_5mM_SA_P Parameter: Treatment Value: 5mM SA vs. No Treatment
  misc_feature: MA Experiment ID: 20000478 Result: Down-regulated in Transcription
  misc_feature: MA Experiment 20000478 PARAMETER Experiment Name: Zm_5mM_SA_P Parameter: Age (day) Value: 11
  misc_feature: MA Experiment 20000478 PARAMETER Experiment Name: Zm_5mM_SA_P Parameter: Organism Value: Zea mays
  misc_feature: MA Experiment 20000478 PARAMETER Experiment Name: Zm_5mM_SA_P Parameter: Plant Line Value: 35A19
  misc_feature: MA Experiment 20000478 PARAMETER Experiment Name: Zm_5mM_SA_P Parameter: Timepoint (hr) Value: 72
  misc_feature: MA Experiment 20000478 PARAMETER Experiment Name: Zm_5mM_SA_P Parameter: Tissue Value: Aerial
  misc_feature: MA Experiment 20000478 PARAMETER Experiment Name: Zm_5mM_SA_P Parameter: Treatment Value: 5mM SA vs. No Treatment
  misc_feature: MA Experiment ID: 20000488 Result: Down-regulated in Transcription
  misc_feature: MA Experiment 20000488 PARAMETER Experiment Name: Zm_50mM_NH4NO3_L_to_H_P Parameter: Organism Value: Zea mays
  misc_feature: MA Experiment 20000488 PARAMETER Experiment Name: Zm_50mM_NH4NO3_L_to_H_P Parameter: Timepoint (hr) Value: 8
  misc_feature: MA Experiment 20000488 PARAMETER Experiment Name: Zm_50mM_NH4NO3_L_to_H_P Parameter: Tissue Value: Leaves
  misc_feature: MA Experiment 20000488 PARAMETER Experiment Name: Zm_50mM_NH4NO3_L_to_H_P Parameter: Treatment Value: 50mM NH4NO3 vs. 100mM Mannitol
gcacgagaccattacctagaacatcctaatcgaaaaaggagcttcatccaacagcccaagtgtccctgctacccccactggatcagcaagctagctacccagtggagagccacagccgaagccgaagccgaagctagagctagcaagcaatggctgcggcggctcctcctgcgcgtcctactagcagcatcagcagctgctgctgctgcatctcgcggcgcgccgccgccgtcgtgccggcgctgctgctgctggcggcgatggccgcctcctccggcgacgcgcagccttccccggggtactacccgagctccaggttcaggccggtgccgttcaaccgggcgtacaccaacaagtggggcccgcagcaccagacgctctccggcgaccattccgccctcaccatctggctcgacaagacctgcgggagtggtttcaagtcgaagcacgcgtacaggaacggctacttctccactcgcatcaagctccccgcccggatacaccgcgggcaccaacaccgccttctatctctccaacaacgaggcgcaccctggtttctacgacgagatcgacatggagttcctgggcaccatcccgggggagccctacacgctgcagacgaacgtgtacgtgcgcggcagcggcgacgggcgcatcgtggggcgggagatgcggttccacctgtggttcgaccccacggcggcctaccacacctacgccatcctgtggaaccccgacgccatcaccttcttcgtggacgacgtgcccgtccgccgctacgagcgccgcaccgagctcaccttcccggaccgccccatgtgggtctacggctccatctgggacgcctccgactgggccaccgacgacggccgccaccgcgccgactaccgctaccagcccttcgtcgcgcgcctcgaccgcttcgtcgtcgccggctgctccgccagcgccccgcccgcgtgcaggcccgtgccggcgtcccccgcgggggccgggctcacgccgcggcagtacgcggccatgcgctgggcgcagcagggccacatggtctactactactgcaacgacttccgcagggaccactcgctcacgcccgagtgctagcgagcgtgcctgtctgctgtgttgcgtcgtcgtcgtcgtccttgttgctttgtgctttgtttcgttgttgatgaaaaggtcgctaggcgtggctgccctactaccgcccgcgcccgccgctgctctctctgcttgcggtgactgaggcgcccgcgcgagccggtggttgaggcgttggtcgttggcttatcgccagcaaactcgtgtcgtcgctcgtctacgtacgcgtacggcgtacccattgcatttcttccggttgttgctttccatttggtctcgcatgcatcacacgaggcgccccaaaggggcaagcttccatgattcatacggatacactatgtataccatatatacatattatatatatattt

SEQ ID NO: 18704 - protein, 367 aa, Zea mays subsp. mays
  peptide (1)..(367): Ceres Seq. ID no. 12375616
  misc_feature (142)..(298): Pfam Name: Glycosyl hydrolases family 16 Pfam Description: Glycosyl hydrolases family 16
  misc_feature (103)..(367): Homolog of NCBI NO: 1769907 NR Description: xyloglucan endo-transglycosylase [Arabidopsis
  misc_feature (165)..(367): Homolog of NCBI NO: 15228047 NR Description: xyloglucan endotransglycosylase, putative
  misc_feature (138)..(367): Homolog of NCBI NO: 1362078 NR Description: xyloglucan endo-1,4-beta-D-glucanase (EC 3.2.1.-)
  misc_feature (138)..(367): Homolog of NCBI NO: 17402583 NR Description: Xyloglucan endo-transglycosylase [Vitis labrusca
  misc_feature (177)..(367): Homolog of NCBI NO: 1084391 NR Description: xyloglucan endo-1,4-beta-D-glucanase (EC 3.2.1.-)
  misc_feature (103)..(367): Homolog of NCBI NO: 15230574 NR Description: xyloglucan endotransglycosylase, putative
  misc_feature (138)..(367): Homolog of NCBI NO: 14029149 NR Description: xyloglucan endo-transglycosylase [Carica papaya]
  misc_feature (142)..(367): Homolog of NCBI NO: 34902398 NR Description: Putative cellulase [Oryza sativa (japonica
  misc_feature (142)..(367): Homolog of NCBI NO: 37536586 NR Description: putative cellulase [Oryza sativa (japonica
  misc_feature (142)..(367): Homolog of NCBI NO: 34901732 NR Description: putative xyloglucan endo-transglycosylase
ARDHYLEHPNRKRSFIQQPKCPCYPHWISKLATQWRATAEAEAEARASKQWLRRLLLRVLLAASAAAAAASRGAPPPSCRRCCCWRRWPPPPATRSLPRGTTRAPGSGRCRSTGRTPTSGARSTRRSPATIPPSPSGSTRPAGVVSSRSTRTGTATSPLASSSPPGYTAGTNTAFYLSNNEAHPGFYDEIDMEFLGTIPGEPYTLQTNVYVRGSGDGRIVGREMRFHLWFDPTAAYHTYAILWNPDAITFFVDDVPVRRYERRTELTFPDRPMWVYGSIWDASDWATDDGRHRADYRYQPFVARLDRFVVAGCSASAPPACRPVPASPAGAGLTPRQYAAMRWAQQGHMVYYYCNDFRRDHSLTPEC

SEQ ID NO: 18705 - protein, 341 aa, Zea mays subsp. mays
  peptide (1)..(341): Ceres Seq. ID no. 12375617
  misc_feature (62)..(115): Pfam Name: Glycosyl hydrolases family 16 Pfam Description: Glycosyl hydrolases family 16
  misc_feature (60)..(113): Homolog of NCBI NO: 28804632 NR Description: xyloglucan endotransglycosylase [Pyrus communis]
  misc_feature (32)..(115): Homolog of NCBI NO: 32470643 NR Description: putative xyloglucan endotransglycosylase-related
  misc_feature (59)..(114): Homolog of NCBI NO: 37537142 NR Description: putative endoxyloglucan transferase
  misc_feature (47)..(113): Homolog of NCBI NO: 15228047 NR Description: xyloglucan endotransglycosylase, putative
  misc_feature (33)..(113): Homolog of NCBI NO: 1362078 NR Description: xyloglucan endo-1,4-beta-D-glucanase (EC 3.2.1.-)
  misc_feature (28)..(113): Homolog of NCBI NO: 17402583 NR Description: Xyloglucan endo-transglycosylase [Vitis labrusca
  misc_feature (34)..(113): Homolog of NCBI NO: 14029149 NR Description: xyloglucan endo-transglycosylase [Carica papaya]
  misc_feature (62)..(115): Homolog of NCBI NO: 34902398 NR Description: Putative cellulase [Oryza sativa (japonica
  misc_feature (26)..(113): Homolog of NCBI NO: 37536586 NR Description: putative cellulase [Oryza sativa (japonica
  misc_feature (22)..(115): Homolog of NCBI NO: 34901732 NR Description: putative xyloglucan endo-transglycosylase
MAAAAPPARPTSSISSCCCCISRRAAAVVPALLLLAAMAASSGDAQPSPGYYPSSRFRPVPFNRAYTNKWGPQHQTLSGDHSALTIWLDKTCGSGFKSKHAYRNGYFSTRIKLPARIHRGHQHRLLSLQQRGAPWFLRRDRHGVPGHHPGGALHAADERVRARQRRRAHRGAGDAVPPVVRPHGGLPHLRHPVEPRRHHLLRGRRARPPLRAPHRAHLPGPPHVGLRLHLGRLRLGHRRRPPPRRLPLPALRRAPRPLRRRRLLRQRPARVQARAGVPRGGRAHAAAVRGHALGAAGPHGLLLLQRLPQGPLAHARVLASVPVCCVASSSSSLLLCALFRC

SEQ ID NO: 18706 - protein, 304 aa, Zea mays subsp. mays
  peptide (1)..(304): Ceres Seq. ID no. 12375618
  misc_feature (25)..(78): Pfam Name: Glycosyl hydrolases family 16 Pfam Description: Glycosyl hydrolases family 16
  misc_feature (23)..(76): Homolog of NCBI NO: 28804632 NR Description: xyloglucan endotransglycosylase [Pyrus communis]
  misc_feature (1)..(78): Homolog of NCBI NO: 32470643 NR Description: putative xyloglucan endotransglycosylase-related
  misc_feature (22)..(77): Homolog of NCBI NO: 37537142 NR Description: putative endoxyloglucan transferase
  misc_feature (10)..(76): Homolog of NCBI NO: 15228047 NR Description: xyloglucan endotransglycosylase, putative
  misc_feature (1)..(76): Homolog of NCBI NO: 1362078 NR Description: xyloglucan endo-1,4-beta-D-glucanase (EC 3.2.1.-)
  misc_feature (1)..(76): Homolog of NCBI NO: 17402583 NR Description: Xyloglucan endo-transglycosylase [Vitis labrusca
  misc_feature (1)..(76): Homolog of NCBI NO: 14029149 NR Description: xyloglucan endo-transglycosylase [Carica papaya]
  misc_feature (25)..(78): Homolog of NCBI NO: 34902398 NR Description: Putative cellulase [Oryza sativa (japonica
  misc_feature (1)..(76): Homolog of NCBI NO: 37536586 NR Description: putative cellulase [Oryza sativa (japonica
  misc_feature (1)..(78): Homolog of NCBI NO: 34901732 NR Description: putative xyloglucan endo-transglycosylase
MAASSGDAQPSPGYYPSSRFRPVPFNRAYTNKWGPQHQTLSGDHSALTIWLDKTCGSGFKSKHAYRNGYFSTRIKLPARIHRGHQHRLLSLQQRGAPWFLRRDRHGVPGHHPGGALHAADERVRARQRRRAHRGAGDAVPPVVRPHGGLPHLRHPVEPRRHHLLRGRRARPPLRAPHRAHLPGPPHVGLRLHLGRLRLGHRRRPPPRRLPLPALRRAPRPLRRRRLLRQRPARVQARAGVPRGGRAHAAAVRGHALGAAGPHGLLLLQRLPQGPLAHARVLASVPVCCVASSSSSLLLCALFRC

SEQ ID NO: 18707 - DNA, 626 bp, Zea mays subsp. mays
  misc_feature (1)..(626): Ceres Seq. ID no. 12360531
  misc_feature: MA Experiment ID: 20000534 Result: Down-regulated in Transcription
  misc_feature: MA Experiment 20000534 PARAMETER Experiment Name: Zm_Hybrid_Pollen_P Parameter: Age (day) Value: 8
  misc_feature: MA Experiment 20000534 PARAMETER Experiment Name: Zm_Hybrid_Pollen_P Parameter: Organism Value: Zea mays
  misc_feature: MA Experiment 20000534 PARAMETER Experiment Name: Zm_Hybrid_Pollen_P Parameter: Plant Line Value: 35A19
  misc_feature: MA Experiment 20000534 PARAMETER Experiment Name: Zm_Hybrid_Pollen_P Parameter: Tissue Value: Pollen vs. Aerial
gaactacgctcgtgttaacatagtttacaggaatgcagaggatatgaattaccactcggtctgtttgcatgtgttggcagattcaatacggagtgcaggcttgatactagcttcttggtttctttcattggggattgagaatgctgaggttctgtgcctgggaatcgtctcagtggcagtgtttatgcttgttttgccgttatttaaagctactggtaatatcctactgcaaatcgcacctagcaatgtgccaccttcagcctttacaaagtgctcgagacagattgctgcttgtgaagatgtctccgaagtatggcaaggtcgattctgggagcttgttcctggtcaggcagttggatctctctccattagggtgaagagcggcgctgacgaccgggcagtccttgaatacacgcatggtttatatcaggatttgggcatacaggatctgacggtccaaactgatgagtttgtagggcctgttagttagacggtaggggttctatcccagcttcacgaaagtgttgttttcagtttttttttcctaccaagtagtttctttcgcaaccgtgtctatntaaacactgtttttttattaagttcatctcncnacnaaaagttttttc

SEQ ID NO: 18708 - protein, 162 aa, Zea mays subsp. mays
  peptide (1)..(162): Ceres Seq. ID no. 12360532
  misc_feature (1)..(155): Pfam Name: Cation efflux family Pfam Description: Cation efflux family
  misc_feature (20)..(155): Homolog of NCBI NO: 24645863 NR Description: CG6672-PA [Drosophila melanogaster]
  misc_feature (20)..(155): Homolog of NCBI NO: 28278399 NR Description: Similar to RIKEN cDNA 1810059J10 gene [Danio
  misc_feature (10)..(155): Homolog of NCBI NO: 32172476 NR Description: putative cation transport protein OCT
  misc_feature (20)..(155): Homolog of NCBI NO: 19070122 NR Description: zinc transporter-like 2 protein [Homo sapiens]
  misc_feature (20)..(155): Homolog of NCBI NO: 40255009 NR Description: zinc transporter like 2; zinc transporter ZnT-7
  misc_feature (20)..(155): Homolog of NCBI NO: 29504753 NR Description: Unknown (protein for MGC:60465) [Mus musculus]
  misc_feature (20)..(155): Homolog of NCBI NO: 39645387 NR Description: Unknown (protein for MGC:76189) [Silurana
  misc_feature (20)..(155): Homolog of NCBI NO: 12963579 NR Description: zinc transporter like 2 [Mus musculus]
  misc_feature (1)..(155): Homolog of NCBI NO: 9294107 NR Description: contains similarity to cation
  misc_feature (1)..(155): Homolog of NCBI NO: 15229954 NR Description: unknown protein; protein id: At3g12100.1
NYARVNIVYRNAEDMNYHSVCLHVLADSIRSAGLILASWFLSLGIENAEVLCLGIVSVAVFMLVLPLFKATGNILLQIAPSNVPPSAFTKCSRQIAACEDVSEVWQGRFWELVPGQAVGSLSIRVKSGADDRAVLEYTHGLYQDLGIQDLTVQTDEFVGPVS

SEQ ID NO: 18709 - protein, 148 aa, Zea mays subsp. mays
  peptide (1)..(148): Ceres Seq. ID no. 12360533
  misc_feature (1)..(141): Pfam Name: Cation efflux family Pfam Description: Cation efflux family
  misc_feature (6)..(141): Homolog of NCBI NO: 24645863 NR Description: CG6672-PA [Drosophila melanogaster]
  misc_feature (6)..(141): Homolog of NCBI NO: 28278399 NR Description: Similar to RIKEN cDNA 1810059J10 gene [Danio
  misc_feature (1)..(141): Homolog of NCBI NO: 32172476 NR Description: putative cation transport protein OCT
  misc_feature (6)..(141): Homolog of NCBI NO: 19070122 NR Description: zinc transporter-like 2 protein [Homo sapiens]
  misc_feature (6)..(141): Homolog of NCBI NO: 40255009 NR Description: zinc transporter like 2; zinc transporter ZnT-7
  misc_feature (6)..(141): Homolog of NCBI NO: 29504753 NR Description: Unknown (protein for MGC:60465) [Mus musculus]
  misc_feature (6)..(141): Homolog of NCBI NO: 39645387 NR Description: Unknown (protein for MGC:76189) [Silurana
  misc_feature (6)..(141): Homolog of NCBI NO: 12963579 NR Description: zinc transporter like 2 [Mus musculus]
  misc_feature (1)..(141): Homolog of NCBI NO: 9294107 NR Description: contains similarity to cation
  misc_feature (1)..(141): Homolog of NCBI NO: 15229954 NR Description: unknown protein; protein id: At3g12100.1
MNYHSVCLHVLADSIRSAGLILASWFLSLGIENAEVLCLGIVSVAVFMLVLPLFKATGNILLQIAPSNVPPSAFTKCSRQIAACEDVSEVWQGRFWELVPGQAVGSLSIRVKSGADDRAVLEYTHGLYQDLGIQDLTVQTDEFVGPVS

SEQ ID NO: 18710 - protein, 101 aa, Zea mays subsp. mays
  peptide (1)..(101): Ceres Seq. ID no. 12360534
  misc_feature (1)..(94): Pfam Name: Cation efflux family Pfam Description: Cation efflux family
  misc_feature (1)..(94): Homolog of NCBI NO: 24645863 NR Description: CG6672-PA [Drosophila melanogaster]
  misc_feature (1)..(94): Homolog of NCBI NO: 28278399 NR Description: Similar to RIKEN cDNA 1810059J10 gene [Danio
  misc_feature (1)..(94): Homolog of NCBI NO: 32172476 NR Description: putative cation transport protein OCT
  misc_feature (1)..(94): Homolog of NCBI NO: 19070122 NR Description: zinc transporter-like 2 protein [Homo sapiens]
  misc_feature (1)..(94): Homolog of NCBI NO: 40255009 NR Description: zinc transporter like 2; zinc transporter ZnT-7
  misc_feature (1)..(94): Homolog of NCBI NO: 29504753 NR Description: Unknown (protein for MGC:60465) [Mus musculus]
  misc_feature (1)..(94): Homolog of NCBI NO: 39645387 NR Description: Unknown (protein for MGC:76189) [Silurana
  misc_feature (1)..(94): Homolog of NCBI NO: 12963579 NR Description: zinc transporter like 2 [Mus musculus]
  misc_feature (1)..(94): Homolog of NCBI NO: 9294107 NR Description: contains similarity to cation
  misc_feature (1)..(94): Homolog of NCBI NO: 15229954 NR Description: unknown protein; protein id: At3g12100.1
MLVLPLFKATGNILLQIAPSNVPPSAFTKCSRQIAACEDVSEVWQGRFWELVPGQAVGSLSIRVKSGADDRAVLEYTHGLYQDLGIQDLTVQTDEFVGPVS

SEQ ID NO: 18711 - DNA, 1597 bp, Zea mays subsp. mays
  misc_feature (1)..(1597): Ceres Seq. ID no. 12375425
  misc_feature: MA Experiment ID: 108543 Result: Down-regulated in Transcription
  misc_feature: MA Experiment ID: 20000478 Result: Down-regulated in Transcription
  misc_feature: MA Experiment 20000478 PARAMETER Experiment Name: Zm_5mM_SA_P Parameter: Age (day) Value: 11
  misc_feature: MA Experiment 20000478 PARAMETER Experiment Name: Zm_5mM_SA_P Parameter: Organism Value: Zea mays
  misc_feature: MA Experiment 20000478 PARAMETER Experiment Name: Zm_5mM_SA_P Parameter: Plant Line Value: 35A19
  misc_feature: MA Experiment 20000478 PARAMETER Experiment Name: Zm_5mM_SA_P Parameter: Timepoint (hr) Value: 72
  misc_feature: MA Experiment 20000478 PARAMETER Experiment Name: Zm_5mM_SA_P Parameter: Tissue Value: Aerial
  misc_feature: MA Experiment 20000478 PARAMETER Experiment Name: Zm_5mM_SA_P Parameter: Treatment Value: 5mM SA vs. No Treatment
  misc_feature: MA Experiment ID: 20000492 Result: Up-regulated in Transcription
  misc_feature: MA Experiment 20000492 PARAMETER Experiment Name: Zm_Hybrid_Seed_Dev_P Parameter: DAP Value: 12
  misc_feature: MA Experiment 20000492 PARAMETER Experiment Name: Zm_Hybrid_Seed_Dev_P Parameter: Organism Value: Zea mays
  misc_feature: MA Experiment 20000492 PARAMETER Experiment Name: Zm_Hybrid_Seed_Dev_P Parameter: Plant Line Value: 35A19
  misc_feature: MA Experiment 20000492 PARAMETER Experiment Name: Zm_Hybrid_Seed_Dev_P Parameter: Tissue Value: Fert Kernel vs. Unfert Floret
  misc_feature: MA Experiment ID: 20000535 Result: Up-regulated in Transcription
  misc_feature: MA Experiment 20000535 PARAMETER Experiment Name: Zm_Hybrid_Seed_Dev_P Parameter: DAP Value: 30 vs. 12
  misc_feature: MA Experiment 20000535 PARAMETER Experiment Name: Zm_Hybrid_Seed_Dev_P Parameter: Organism Value: Zea mays
  misc_feature: MA Experiment 20000535 PARAMETER Experiment Name: Zm_Hybrid_Seed_Dev_P Parameter: Plant Line Value: 35A19
  misc_feature: MA Experiment 20000535 PARAMETER Experiment Name: Zm_Hybrid_Seed_Dev_P Parameter: Tissue Value: Embryo vs. Unfert Floret
gcacgagaccattacctagaacatcctaatcgaaaaaagtcaaaccaggcccggagccaccagcaaccaaccgagcgcatggaggccgcggcggcgaccgcgctcccgttcgcggcggccgtccccactgcctggagggtgcgcgcgagcccgcggacgcggcggcgctccgtggcggcgaagctggagcgcgggctcggcaagggggttcccaccaccaactacgtggtgccgctcgacaaggccaccgggatgacgcgcccgctcgtcgagatcctgcgggacctcaacaagcgcgtccccgacaagatcatcgaccccgacactaacaccgtcaactggtaccatgccaacagaatgcttagtttttacgcaccaggttggtgtggagaagttcgtgatgttatctattccgagaatggaactgtaaccgtggtatatcgagtgatacttaaaggaactgatggagaggcatacagagatgccacgggcacagcacagttacatgaggggcgcagggaagatgctgttgcagccgcagaggaagctgcattctgcaaagcctgcgcacggttcggttttggcctgtacctgtaccaccaggatgattctcattacgacgaccacttccattgaggctcagtctgcaaaagagttgatcataagctacaacatgcgttggatatgcccctggaaaaacttcgcatccagaatcaatttttgctctttgtgtagtatcatactcataacacagagaagtgaacctatgtagatactattcgaaaccttctttttattaatattagaattcgtgtatgggactatattcttggtgatctgcaatccccaagtagagaaattgtgcacagtcatgatttcaatcgtcacctgactcccttcaaagctgagtgggatccaaaggattacaccgaaacagttgcagtgattggccgttacataagtgagaactacaatggtgttgctctgcatccaattgattttatagatactagttctgggaagcttctggctgaggtgatggaccctgacataataacaatcagcccagtgaacaagctacatccgcaagatgacatcctagctacaggaagctcaaggtctattttcatatggaagccaaaaattgaagatgaacttactgaagaaagagccaagcatgacaatagtagtgatgacgactcaggtggtgattctggcggaaagaacaagaaagcaaagaagactcgcttcactcatgcagtaaagggaaagggcaaatccaaagtctgatgcttggtgtacatagtcggcagcattttgacaagaaagcgtccattaaccagctcctgatgcatctccttttgtaccatcttgccaactccctcaccccccccagctaaggtgctgaagacccgtatgaaacgcatgctgatagaccccatagttgtctcctgcatcaatgctcctaaggagttagccagttaggtttcggactcttttgaatcctgacatgcttatgatcacttgtcatttgtcaacgaggccttttaacggtttaatcctgtatcaacatataaatctcctgtacagttgcctg

SEQ ID NO: 18712 - protein, 211 aa, Zea mays subsp. mays
  peptide (1)..(211): Ceres Seq. ID no. 12375426
  misc_feature (26)..(204): Homolog of NCBI NO: 9367245 NR Description: SnRK1-interacting protein 1 [Hordeum vulgare
  misc_feature (32)..(204): Homolog of NCBI NO: 34907336 NR Description: putative SnRK1-interacting protein 1
  misc_feature (45)..(202): Homolog of NCBI NO: 15224018 NR Description: hypothetical protein; protein id: At1g71310.1
  misc_feature (38)..(157): Homolog of NCBI NO: 27573357 NR Description: hypothetical protein [Oryza sativa (japonica
  misc_feature (63)..(201): Homolog of NCBI NO: 21593360 NR Description: unknown [Arabidopsis thaliana]
  misc_feature (63)..(201): Homolog of NCBI NO: 15238827 NR Description: putative protein
ARDHYLEHPNRKKSNQARSHQQPTERMEAAAATALPFAAAVPTAWRVRASPRTRRRSVAAKLERGLGKGVPTTNYVVPLDKATGMTRPLVEILRDLNKRVPDKIIDPDTNTVNWYHANRMLSFYAPGWCGEVRDVIYSENGTVTVVYRVILKGTDGEAYRDATGTAQLHEGRREDAVAAAEEAAFCKACARFGFGLYLYHQDDSHYDDHFH

SEQ ID NO: 18713 - protein, 185 aa, Zea mays subsp. mays
  peptide (1)..(185): Ceres Seq. ID no. 12375427
  misc_feature (1)..(178): Homolog of NCBI NO: 9367245 NR Description: SnRK1-interacting protein 1 [Hordeum vulgare
  misc_feature (6)..(178): Homolog of NCBI NO: 34907336 NR Description: putative SnRK1-interacting protein 1
  misc_feature (19)..(176): Homolog of NCBI NO: 15224018 NR Description: hypothetical protein; protein id: At1g71310.1
  misc_feature (12)..(131): Homolog of NCBI NO: 27573357 NR Description: hypothetical protein [Oryza sativa (japonica
  misc_feature (37)..(175): Homolog of NCBI NO: 21593360 NR Description: unknown [Arabidopsis thaliana]
  misc_feature (37)..(175): Homolog of NCBI NO: 15238827 NR Description: putative protein
MEAAAATALPFAAAVPTAWRVRASPRTRRRSVAAKLERGLGKGVPTTNYVVPLDKATGMTRPLVEILRDLNKRVPDKIIDPDTNTVNWYHANRMLSFYAPGWCGEVRDVIYSENGTVTVVYRVILKGTDGEAYRDATGTAQLHEGRREDAVAAAEEAAFCKACARFGFGLYLYHQDDSHYDDHFH

SEQ ID NO: 18714 - protein, 127 aa, Zea mays subsp. mays
  peptide (1)..(127): Ceres Seq. ID no. 12375428
  misc_feature (1)..(120): Homolog of NCBI NO: 9367245 NR Description: SnRK1-interacting protein 1 [Hordeum vulgare
  misc_feature (1)..(120): Homolog of NCBI NO: 34907336 NR Description: putative SnRK1-interacting protein 1
  misc_feature (1)..(118): Homolog of NCBI NO: 15224018 NR Description: hypothetical protein; protein id: At1g71310.1
  misc_feature (1)..(73): Homolog of NCBI NO: 27573357 NR Description: hypothetical protein [Oryza sativa (japonica
  misc_feature (1)..(117): Homolog of NCBI NO: 21593360 NR Description: unknown [Arabidopsis thaliana]
  misc_feature (1)..(117): Homolog of NCBI NO: 15238827 NR Description: putative protein
MTRPLVEILRDLNKRVPDKIIDPDTNTVNWYHANRMLSFYAPGWCGEVRDVIYSENGTVTVVYRVILKGTDGEAYRDATGTAQLHEGRREDAVAAAEEAAFCKACARFGFGLYLYHQDDSHYDDHFH

SEQ ID NO: 18715 - DNA, 1128 bp, Zea mays subsp. mays
  misc_feature (1)..(1128): Ceres Seq. ID no. 12588914
  misc_feature: MA Experiment ID: 108515 Result: Up-regulated in Transcription
  misc_feature: MA Experiment 108515 PARAMETER Experiment Name: Zm_2mM_SA_P Parameter: Age (day) Value: 8
  misc_feature: MA Experiment 108515 PARAMETER Experiment Name: Zm_2mM_SA_P Parameter: Organism Value: Zea mays
  misc_feature: MA Experiment 108515 PARAMETER Experiment Name: Zm_2mM_SA_P Parameter: Plant Line Value: 35A19
  misc_feature: MA Experiment 108515 PARAMETER Experiment Name: Zm_2mM_SA_P Parameter: Timepoint (hr) Value: 12
  misc_feature: MA Experiment 108515 PARAMETER Experiment Name: Zm_2mM_SA_P Parameter: Tissue Value: Aerial
  misc_feature: MA Experiment 108515 PARAMETER Experiment Name: Zm_2mM_SA_P Parameter: Treatment Value: 2mM SA vs. No Treatment
  misc_feature: MA Experiment ID: 108522 Result: Up-regulated in Transcription
  misc_feature: MA Experiment 108522 PARAMETER Experiment Name: Zm_42deg_Heat_P Parameter: Age (day) Value: 8
  misc_feature: MA Experiment 108522 PARAMETER Experiment Name: Zm_42deg_Heat_P Parameter: Organism Value: Zea mays
  misc_feature: MA Experiment 108522 PARAMETER Experiment Name: Zm_42deg_Heat_P Parameter: Plant Line Value: 35A19
  misc_feature: MA Experiment 108522 PARAMETER Experiment Name: Zm_42deg_Heat_P Parameter: Temperature (deg C) Value: 42 vs. 22
  misc_feature: MA Experiment 108522 PARAMETER Experiment Name: Zm_42deg_Heat_P Parameter: Timepoint (hr) Value: 1
  misc_feature: MA Experiment 108522 PARAMETER Experiment Name: Zm_42deg_Heat_P Parameter: Tissue Value: Aerial
  misc_feature: MA Experiment ID: 108526 Result: Up-regulated in Transcription
  misc_feature: MA Experiment 108526 PARAMETER Experiment Name: Zm_5mM_NO_P Parameter: Age (day) Value: 8
  misc_feature: MA Experiment 108526 PARAMETER Experiment Name: Zm_5mM_NO_P Parameter: Organism Value: Zea mays
  misc_feature: MA Experiment 108526 PARAMETER Experiment Name: Zm_5mM_NO_P Parameter: Plant Line Value: 35A19
  misc_feature: MA Experiment 108526 PARAMETER Experiment Name: Zm_5mM_NO_P Parameter: Timepoint (hr) Value: 1
  misc_feature: MA Experiment 108526 PARAMETER Experiment Name: Zm_5mM_NO_P Parameter: Tissue Value: Aerial
  misc_feature: MA Experiment 108526 PARAMETER Experiment Name: Zm_5mM_NO_P Parameter: Treatment Value: 5mM NO vs. No Treatment
  misc_feature: MA Experiment ID: 108527 Result: Up-regulated in Transcription
  misc_feature: MA Experiment 108527 PARAMETER Experiment Name: Zm_5mM_NO_P Parameter: Age (day) Value: 8
  misc_feature: MA Experiment 108527 PARAMETER Experiment Name: Zm_5mM_NO_P Parameter: Organism Value: Zea mays
  misc_feature: MA Experiment 108527 PARAMETER Experiment Name: Zm_5mM_NO_P Parameter: Plant Line Value: 35A19
  misc_feature: MA Experiment 108527 PARAMETER Experiment Name: Zm_5mM_NO_P Parameter: Timepoint (hr) Value: 6
  misc_feature: MA Experiment 108527 PARAMETER Experiment Name: Zm_5mM_NO_P Parameter: Tissue Value: Aerial
  misc_feature: MA Experiment 108527 PARAMETER Experiment Name: Zm_5mM_NO_P Parameter: Treatment Value: 5mM NO vs. No Treatment
  misc_feature: MA Experiment ID: 108528 Result: Down-regulated in Transcription
  misc_feature: MA Experiment 108528 PARAMETER Experiment Name: Zm_Imbibed_Seeds_P Parameter: Age (day) Value: 5 vs. 2
  misc_feature: MA Experiment 108528 PARAMETER Experiment Name: Zm_Imbibed_Seeds_P Parameter: Organism Value: Zea mays
  misc_feature: MA Experiment 108528 PARAMETER Experiment Name: Zm_Imbibed_Seeds_P Parameter: Plant Line Value: 35A19
  misc_feature: MA Experiment 108528 PARAMETER Experiment Name: Zm_Imbibed_Seeds_P Parameter: Tissue Value: Aerial vs. Embryo
  misc_feature: MA Experiment ID: 108530 Result: Down-regulated in Transcription
  misc_feature: MA Experiment 108530 PARAMETER Experiment Name: Zm_Imbibed_Seeds_P Parameter: Age (day) Value: 6 vs. 2
  misc_feature: MA Experiment 108530 PARAMETER Experiment Name: Zm_Imbibed_Seeds_P Parameter: Organism Value: Zea mays
  misc_feature: MA Experiment 108530 PARAMETER Experiment Name: Zm_Imbibed_Seeds_P Parameter: Plant Line Value: 35A19
  misc_feature: MA Experiment 108530 PARAMETER Experiment Name: Zm_Imbibed_Seeds_P Parameter: Tissue Value: Aerial vs. Embryo
  misc_feature: MA Experiment ID: 108535 Result: Down-regulated in Transcription
  misc_feature: MA Experiment 108535 PARAMETER Experiment Name: Zm_Meristem_P Parameter: Age (day) Value: 8
  misc_feature: MA Experiment 108535 PARAMETER Experiment Name: Zm_Meristem_P Parameter: Organism Value: Zea mays
  misc_feature: MA Experiment 108535 PARAMETER Experiment Name: Zm_Meristem_P Parameter: Plant Line Value: 35A19
  misc_feature: MA Experiment 108535 PARAMETER Experiment Name: Zm_Meristem_P Parameter: Tissue Value: Root Meristem vs. Above Root Meristem
  misc_feature: MA Experiment ID: 108545 Result: Down-regulated in Transcription
  misc_feature: MA Experiment 108545 PARAMETER Experiment Name: Zm_Imbibed_Seeds_P Parameter: Age (day) Value: 3 vs. 2
  misc_feature: MA Experiment 108545 PARAMETER Experiment Name: Zm_Imbibed_Seeds_P Parameter: Organism Value: Zea mays
  misc_feature: MA Experiment 108545 PARAMETER Experiment Name: Zm_Imbibed_Seeds_P Parameter: Plant Line Value: 35A19
  misc_feature: MA Experiment 108545 PARAMETER Experiment Name: Zm_Imbibed_Seeds_P Parameter: Tissue Value: Aerial vs. Embryo
  misc_feature: MA Experiment ID: 108547 Result: Down-regulated in Transcription
  misc_feature: MA Experiment 108547 PARAMETER Experiment Name: Zm_Imbibed_Seeds_P Parameter: Age (day) Value: 4 vs. 2
  misc_feature: MA Experiment 108547 PARAMETER Experiment Name: Zm_Imbibed_Seeds_P Parameter: Organism Value: Zea mays
  misc_feature: MA Experiment 108547 PARAMETER Experiment Name: Zm_Imbibed_Seeds_P Parameter: Plant Line Value: 35A19
  misc_feature: MA Experiment 108547 PARAMETER Experiment Name: Zm_Imbibed_Seeds_P Parameter: Tissue Value: Aerial vs. Embryo
  misc_feature: MA Experiment ID: 108548 Result: Up-regulated in Transcription
  misc_feature: MA Experiment 108548 PARAMETER Experiment Name: Zm_20uM_KNO3_H-to-L_P Parameter: Age (day) Value: 11
  misc_feature: MA Experiment 108548 PARAMETER Experiment Name: Zm_20uM_KNO3_H-to-L_P Parameter: Organism Value: Zea mays
  misc_feature: MA Experiment 108548 PARAMETER Experiment Name: Zm_20uM_KNO3_H-to-L_P Parameter: Plant Line Value: 35A19
  misc_feature: MA Experiment 108548 PARAMETER Experiment Name: Zm_20uM_KNO3_H-to-L_P Parameter: Timepoint (hr) Value: 4
  misc_feature: MA Experiment 108548 PARAMETER Experiment Name: Zm_20uM_KNO3_H-to-L_P Parameter: Tissue Value: Roots
  misc_feature: MA Experiment 108548 PARAMETER Experiment Name: Zm_20uM_KNO3_H-to-L_P Parameter: Treatment Value: 20uM KNO3 vs. 60mM KNO3
  misc_feature: MA Experiment ID: 108559 Result: Up-regulated in Transcription
  misc_feature: MA Experiment 108559 PARAMETER Experiment Name: Zm_5mM_NO_P Parameter: Age (day) Value: 8
  misc_feature: MA Experiment 108559 PARAMETER Experiment Name: Zm_5mM_NO_P Parameter: Organism Value: Zea mays
  misc_feature: MA Experiment 108559 PARAMETER Experiment Name: Zm_5mM_NO_P Parameter: Plant Line Value: 35A19
  misc_feature: MA Experiment 108559 PARAMETER Experiment Name: Zm_5mM_NO_P Parameter: Timepoint (hr) Value: 12
  misc_feature: MA Experiment 108559 PARAMETER Experiment Name: Zm_5mM_NO_P Parameter: Tissue Value: Aerial
  misc_feature: MA Experiment 108559 PARAMETER Experiment Name: Zm_5mM_NO_P Parameter: Treatment Value: 5mM NO vs. No Treatment
  misc_feature: MA Experiment ID: 108688 Result: Down-regulated in Transcription
  misc_feature: MA Experiment 108688 PARAMETER Experiment Name: Zm_Embryos-Flowers__P Parameter: Tissue Value: Immature Flowers vs. Aerial+
  misc_feature: MA Experiment ID: 20000478 Result: Up-regulated in Transcription
  misc_feature: MA Experiment 20000478 PARAMETER Experiment Name: Zm_5mM_SA_P Parameter: Age (day) Value: 11
  misc_feature: MA Experiment 20000478 PARAMETER Experiment Name: Zm_5mM_SA_P Parameter: Organism Value: Zea mays
  misc_feature: MA Experiment 20000478 PARAMETER Experiment Name: Zm_5mM_SA_P Parameter: Plant Line Value: 35A19
  misc_feature: MA Experiment 20000478 PARAMETER Experiment Name: Zm_5mM_SA_P Parameter: Timepoint (hr) Value: 72
  misc_feature: MA Experiment 20000478 PARAMETER Experiment Name: Zm_5mM_SA_P Parameter: Tissue Value: Aerial
  misc_feature: MA Experiment 20000478 PARAMETER Experiment Name: Zm_5mM_SA_P Parameter: Treatment Value: 5mM SA vs. No Treatment
  misc_feature: MA Experiment ID: 20000480 Result: Down-regulated in Transcription
  misc_feature: MA Experiment 20000480 PARAMETER Experiment Name: Zm_Drought_P Parameter: Age (day) Value: 11
  misc_feature: MA Experiment 20000480 PARAMETER Experiment Name: Zm_Drought_P Parameter: Organism Value: Zea mays
  misc_feature: MA Experiment 20000480 PARAMETER Experiment Name: Zm_Drought_P Parameter: Plant Line Value: 35A19
  misc_feature: MA Experiment 20000480 PARAMETER Experiment Name: Zm_Drought_P Parameter: Timepoint (hr) Value: 72
  misc_feature: MA Experiment 20000480 PARAMETER Experiment Name: Zm_Drought_P Parameter: Tissue Value: Aerial
  misc_feature: MA Experiment 20000480 PARAMETER Experiment Name: Zm_Drought_P Parameter: Treatment Value: Drought vs. No Drought
  misc_feature: MA Experiment ID: 20000488 Result: Down-regulated in Transcription
  misc_feature: MA Experiment 20000488 PARAMETER Experiment Name: Zm_50mM_NH4NO3_L_to_H_P Parameter: Organism Value: Zea mays
  misc_feature: MA Experiment 20000488 PARAMETER Experiment Name: Zm_50mM_NH4NO3_L_to_H_P Parameter: Timepoint (hr) Value: 8
  misc_feature: MA Experiment 20000488 PARAMETER Experiment Name: Zm_50mM_NH4NO3_L_to_H_P Parameter: Tissue Value: Leaves
  misc_feature: MA Experiment 20000488 PARAMETER Experiment Name: Zm_50mM_NH4NO3_L_to_H_P Parameter: Treatment Value: 50mM NH4NO3 vs. 100mM Mannitol
  misc_feature: MA Experiment ID: 20000626 Result: Up-regulated in Transcription
  misc_feature: MA Experiment 20000626 PARAMETER Experiment Name: Zm_Herbicide-Treatments_P Parameter: Timepoint (hr) Value: 12
  misc_feature: MA Experiment 20000626 PARAMETER Experiment Name: Zm_Herbicide-Treatments_P Parameter: Tissue Value: Aerial
  misc_feature: MA Experiment 20000626 PARAMETER Experiment Name: Zm_Herbicide-Treatments_P Parameter: Treatment Value: Roundup vs. No Treatment
  misc_feature: MA Experiment ID: 20000629 Result: Up-regulated in Transcription
  misc_feature: MA Experiment 20000629 PARAMETER Experiment Name: Zm_Herbicide-Treatments_P Parameter: Timepoint (hr) Value: 12
  misc_feature: MA Experiment 20000629 PARAMETER Experiment Name: Zm_Herbicide-Treatments_P Parameter: Tissue Value: Aerial
  misc_feature: MA Experiment 20000629 PARAMETER Experiment Name: Zm_Herbicide-Treatments_P Parameter: Treatment Value: Trimec vs. No Treatment
  misc_feature: MA Experiment ID: 20000633 Result: Up-regulated in Transcription
  misc_feature: MA Experiment 20000633 PARAMETER Experiment Name: Zm_Herbicide-Treatments_P Parameter: Timepoint (hr) Value: 4
  misc_feature: MA Experiment 20000633 PARAMETER Experiment Name: Zm_Herbicide-Treatments_P Parameter: Tissue Value: Aerial
  misc_feature: MA Experiment 20000633 PARAMETER Experiment Name: Zm_Herbicide-Treatments_P Parameter: Treatment Value: Trimec vs. No Treatment
ctctccaagactccaatcccccaaccaccagaaccagcgccagctctaacgtcacctctgatttctctctcctctctattgctagctgctttattataagtagcagctgcagcaggcaggagctgcacacacccatccaattccagctgctgatcttgatcctgcaccccgagccgtacacaagagctagtcggtagaacttgcaggagcggagcagaactaagtgcagagaacaggacatatggctacgccggcggtgaaggtttacgggtgggctatctcgccgttcgtatcgcgggctctgctggccctggaggaggccggcgtcgactacgagctcgtccccatgagccgccaggacggcgaccaccgccgcccggagcacctcgccaggaaccctttcgggaaggtgccggtgctcgaggatggcgacctcacgctcttcgaatcacgtgcgatcgcgaggcatgttctccggaagcacaagccggagctgctgggcggcggcaggctggagcagacggcgatggtggacgtgtggctggaggtggaggcccaccagctgagcccgccggcgatcgccatcgtggtggagtgcgtgttcgcgccgttcctgggccgcgagcgcaaccaggcggtggtggacgagaacgtggagaagctcaagaaggtgctggaggtgtacgaggcgcggctggccacgtgcacgtacctcgccggcgacttcctcagcctcgccgacctcagccccttcaccatcatgcactgcctcatggccaccgagtacgccgctctcgtccatgcgctcccgcacgtcagcgcctggtggcagggcctcgccgcgcgcccggcggccaacaaggtggcgcagttcatgccggtcggcgccggagcgcccaaggaacaggagtgacgatgaagcgatcgaagcgacttgtgttgttgtgcttgattagttaattggaaaccttctcactcatctagtccatcatggtgcctgcttttctttatactatttgtcttaattttgctgctttctccacggaataatagtagagatttggaaatgtaatgtattttatccaaatatattggattttcaagcaatatagtatggttttcgctgcc

SEQ ID NO: 18716 - protein, 223 aa, Zea mays subsp. mays
  peptide (1)..(223): Ceres Seq. ID no. 12588915
  misc_feature (6)..(216): Homolog of NCBI NO: 168489 NR Description: glutathione S-transferase I
  misc_feature (6)..(216): Homolog of NCBI NO: 554565 NR Description: glutathione S-transferase
  misc_feature (6)..(217): Homolog of NCBI NO: 34914740 NR Description: putative glutathione S-transferase
  misc_feature (4)..(217): Homolog of NCBI NO: 11385467 NR Description: glutathione S-transferase GST 8 [Zea mays]
  misc_feature (6)..(217): Homolog of NCBI NO: 11177841 NR Description: putative glutathione S-transferase OsGSTF5
  misc_feature (6)..(217): Homolog of NCBI NO: 23504743 NR Description: glutathione transferase F4 [Triticum aestivum]
  misc_feature (1)..(223): Homolog of NCBI NO: 23504739 NR Description: glutathione transferase F2 [Triticum aestivum]
  misc_feature (4)..(223): Homolog of NCBI NO: 23504741 NR Description: glutathione transferase F3 [Triticum aestivum]
  misc_feature (1)..(223): Homolog of NCBI NO: 11385481 NR Description: glutathione S-transferase GST 15 [Zea mays]
  misc_feature (1)..(223): Homolog of NCBI NO: 1170092 NR Description: GLUTATHIONE S-TRANSFERASE IV (GST-IV) (GST-27)
MATPAVKVYGWAISPFVSRALLALEEAGVDYELVPMSRQDGDHRRPEHLARNPFGKVPVLEDGDLTLFESRAIARHVLRKHKPELLGGGRLEQTAMVDVWLEVEAHQLSPPAIAIVVECVFAPFLGRERNQAVVDENVEKLKKVLEVYEARLATCTYLAGDFLSLADLSPFTIMHCLMATEYAALVHALPHVSAWWQGLAARPAANKVAQFMPVGAGAPKEQE

SEQ ID NO: 18717 - protein, 188 aa, Zea mays subsp. mays
  peptide (1)..(188): Ceres Seq. ID no. 12588916
  misc_feature (1)..(181): Homolog of NCBI NO: 168489 NR Description: glutathione S-transferase I
  misc_feature (1)..(181): Homolog of NCBI NO: 554565 NR Description: glutathione S-transferase
  misc_feature (1)..(182): Homolog of NCBI NO: 34914740 NR Description: putative glutathione S-transferase
  misc_feature (1)..(182): Homolog of NCBI NO: 11385467 NR Description: glutathione S-transferase GST 8 [Zea mays]
  misc_feature (1)..(182): Homolog of NCBI NO: 11177841 NR Description: putative glutathione S-transferase OsGSTF5
  misc_feature (1)..(182): Homolog of NCBI NO: 23504743 NR Description: glutathione transferase F4 [Triticum aestivum]
  misc_feature (1)..(188): Homolog of NCBI NO: 23504739 NR Description: glutathione transferase F2 [Triticum aestivum]
  misc_feature (1)..(188): Homolog of NCBI NO: 23504741 NR Description: glutathione transferase F3 [Triticum aestivum]
  misc_feature (1)..(188): Homolog of NCBI NO: 11385481 NR Description: glutathione S-transferase GST 15 [Zea mays]
  misc_feature (1)..(188): Homolog of NCBI NO: 1170092 NR Description: GLUTATHIONE S-TRANSFERASE IV (GST-IV) (GST-27)
MSRQDGDHRRPEHLARNPFGKVPVLEDGDLTLFESRAIARHVLRKHKPELLGGGRLEQTAMVDVWLEVEAHQLSPPAIAIVVECVFAPFLGRERNQAVVDENVEKLKKVLEVYEARLATCTYLAGDFLSLADLSPFTIMHCLMATEYAALVHALPHVSAWWQGLAARPAANKVAQFMPVGAGAPKEQE

SEQ ID NO: 18718 - protein, 128 aa, Zea mays subsp. mays
  peptide (1)..(128): Ceres Seq. ID no. 12588917
  misc_feature (1)..(121): Homolog of NCBI NO: 168489 NR Description: glutathione S-transferase I
  misc_feature (1)..(121): Homolog of NCBI NO: 554565 NR Description: glutathione S-transferase
  misc_feature (1)..(122): Homolog of NCBI NO: 34914740 NR Description: putative glutathione S-transferase
  misc_feature (1)..(122): Homolog of NCBI NO: 11385467 NR Description: glutathione S-transferase GST 8 [Zea mays]
  misc_feature (1)..(122): Homolog of NCBI NO: 11177841 NR Description: putative glutathione S-transferase OsGSTF5
  misc_feature (1)..(122): Homolog of NCBI NO: 23504743 NR Description: glutathione transferase F4 [Triticum aestivum]
  misc_feature (1)..(128): Homolog of NCBI NO: 23504739 NR Description: glutathione transferase F2 [Triticum aestivum]
  misc_feature (1)..(128): Homolog of NCBI NO: 23504741 NR Description: glutathione transferase F3 [Triticum aestivum]
  misc_feature (1)..(128): Homolog of NCBI NO: 11385481 NR Description: glutathione S-transferase GST 15 [Zea mays]
  misc_feature (1)..(128): Homolog of NCBI NO: 1170092 NR Description: GLUTATHIONE S-TRANSFERASE IV (GST-IV) (GST-27)
MVDVWLEVEAHQLSPPAIAIVVECVFAPFLGRERNQAVVDENVEKLKKVLEVYEARLATCTYLAGDFLSLADLSPFTIMHCLMATEYAALVHALPHVSAWWQGLAARPAANKVAQFMPVGAGAPKEQE

SEQ ID NO: 18719 - DNA, 1229 bp, Zea mays subsp. mays
  misc_feature (1)..(1229): Ceres Seq. ID no. 12368710
  misc_feature: MA Experiment ID: 108527 Result: Down-regulated in Transcription
  misc_feature: MA Experiment 108527 PARAMETER Experiment Name: Zm_5mM_NO_P Parameter: Age (day) Value: 8
  misc_feature: MA Experiment 108527 PARAMETER Experiment Name: Zm_5mM_NO_P Parameter: Organism Value: Zea mays
  misc_feature: MA Experiment 108527 PARAMETER Experiment Name: Zm_5mM_NO_P Parameter: Plant Line Value: 35A19
  misc_feature: MA Experiment 108527 PARAMETER Experiment Name: Zm_5mM_NO_P Parameter: Timepoint (hr) Value: 6
  misc_feature: MA Experiment 108527 PARAMETER Experiment Name: Zm_5mM_NO_P Parameter: Tissue Value: Aerial
  misc_feature: MA Experiment 108527 PARAMETER Experiment Name: Zm_5mM_NO_P Parameter: Treatment Value: 5mM NO vs. No Treatment
  misc_feature: MA Experiment ID: 108533 Result: Down-regulated in Transcription
  misc_feature: MA Experiment 108533 PARAMETER Experiment Name: Zm_4deg_Cold_P Parameter: Age (hr) Value: 8
  misc_feature: MA Experiment 108533 PARAMETER Experiment Name: Zm_4deg_Cold_P Parameter: Organism Value: Zea mays
  misc_feature: MA Experiment 108533 PARAMETER Experiment Name: Zm_4deg_Cold_P Parameter: Plant Line Value: 35A19
  misc_feature: MA Experiment 108533 PARAMETER Experiment Name: Zm_4deg_Cold_P Parameter: Temperature (deg C) Value: 4 vs. 22
  misc_feature: MA Experiment 108533 PARAMETER Experiment Name: Zm_4deg_Cold_P Parameter: Timepoint (hr) Value: 1
  misc_feature: MA Experiment 108533 PARAMETER Experiment Name: Zm_4deg_Cold_P Parameter: Tissue Value: Aerial
  misc_feature: MA Experiment ID: 108543 Result: Up-regulated in Transcription
  misc_feature: MA Experiment ID: 20000487 Result: Up-regulated in Transcription
  misc_feature: MA Experiment 20000487 PARAMETER Experiment Name: Zm_50mM_NH4NO3_L_to_H_P Parameter: Organism Value: Zea mays
  misc_feature: MA Experiment 20000487 PARAMETER Experiment Name: Zm_50mM_NH4NO3_L_to_H_P Parameter: Timepoint (hr) Value: 4
  misc_feature: MA Experiment 20000487 PARAMETER Experiment Name: Zm_50mM_NH4NO3_L_to_H_P Parameter: Tissue Value: Leaves
  misc_feature: MA Experiment 20000487 PARAMETER Experiment Name: Zm_50mM_NH4NO3_L_to_H_P Parameter: Treatment Value: 50mM NH4NO3 vs. 100mM Mannitol
  misc_feature: MA Experiment ID: 20000633 Result: Down-regulated in Transcription
  misc_feature: MA Experiment 20000633 PARAMETER Experiment Name: Zm_Herbicide-Treatments_P Parameter: Timepoint (hr) Value: 4
  misc_feature: MA Experiment 20000633 PARAMETER Experiment Name: Zm_Herbicide-Treatments_P Parameter: Tissue Value: Aerial
  misc_feature: MA Experiment 20000633 PARAMETER Experiment Name: Zm_Herbicide-Treatments_P Parameter: Treatment Value: Trimec vs. No Treatment
gcacgagaccattacctagaacatcctaatcaaaaaatcaagctgcccattccctcgtgacagcagctgcctgcctgctccgaggcgccacccagctcttcctcgccccagcagccgcttcccgagatccttttcactttcaccaccagggtacatagaccgcatctgcggtgctctgcgctcctcggactcgatttgttggttcatccatccagctgccgccggacgtcgatcagctacctatcttgaaaccacaggaccgagcgtggaaactcccggaccggacattccattttccattccgaagggggggtgagaaggcggggaatgagtacaaccaaggtgaagagacgtgtgggcaagtatgagctcggccggaccataggcgagggcaccttcgcgaaggtcaggttcgcgagggacacggtcaccggcgaggccgtggccattaagatcctggacaaggagaaggtcctcaggcacaagatggttgagcagatcaagcgggagatctcgacgatgaagctgatcaagcaccctaacgtcgtccgcatatacgaggtgatgggaagtaaaacaaagatctacattgtgttagaattcgctaccggtggcgagctctttgatacaattgttaaccatggtcgaatgagggaagacgaggcaaggaggtacttccaacagttaatcaatgcagttgattattgtcatagcaggggtgtgtaccaccgggatttaaaacctgaaaatttgctgcttgattcatatggtaacctgaaggtctctgactttgggctcagcgcgctatctcagcaaatcaaggatgatggactgctgcacacaacttgtgggactccaaactatgttgcaccagaggtccttgaagatcaaggctacgatggagcaatggctgatctgtggtcatgtggagttatcctgtttgttctgctagcagggtatttgccgtttgaggattctaatctcatgactttgtataagaaaatatcaaatgcagaatttacatttccaccatggacatcttttcctgccaagaggttgttaacaagaatccttgatccaaatccaatgacgagaataacaatcccagaaatattagaggatgagtggttcaaaaagggctacaagcgcccagaatttgatgaacaatatgacaccacattggatgatgtggatgccgtcttcaatgattcagaagagcaccatgtggc

SEQ ID NO: 18720 - protein, 300 aa, Zea mays subsp. mays
  peptide (1)..(300): Ceres Seq. ID no. 12368711
  misc_feature (13)..(268): Pfam Name: Protein kinase domain Pfam Description: Protein kinase domain
  misc_feature (1)..(297): Homolog of NCBI NO: 14423524 NR Description: similar to wpk4 protein kinase [Arabidopsis
  misc_feature (1)..(297): Homolog of NCBI NO: 30677901 NR Description: CBL-interacting protein kinase 9 [Arabidopsis
  misc_feature (1)..(297): Homolog of NCBI NO: 15223317 NR Description: serine threonine kinase, putative
  misc_feature (2)..(297): Homolog of NCBI NO: 18397430 NR Description: serine/threonine kinase, putative
  misc_feature (1)..(299): Homolog of NCBI NO: 30688193 NR Description: NAF specific protein kinase family [Arabidopsis
  misc_feature (5)..(299): Homolog of NCBI NO: 30683336 NR Description: CBL-interacting protein kinase 3 [Arabidopsis
  misc_feature (5)..(299): Homolog of NCBI NO: 30683332 NR Description: CBL-interacting protein kinase 3 [Arabidopsis
  misc_feature (5)..(299): Homolog of NCBI NO: 30683328 NR Description: CBL-interacting protein kinase 3 [Arabidopsis
  misc_feature (1)..(299): Homolog of NCBI NO: 7446372 NR Description: probable serine/threonine kinase (EC 2.7.1.-)
  misc_feature (1)..(299): Homolog of NCBI NO: 7446371 NR Description: probable serine/threonine kinase (EC 2.7.1.-)
MSTTKVKRRVGKYELGRTIGEGTFAKVRFARDTVTGEAVAIKILDKEKVLRHKMVEQIKREISTMKLIKHPNVVRIYEVMGSKTKIYIVLEFATGGELFDTIVNHGRMREDEARRYFQQLINAVDYCHSRGVYHRDLKPENLLLDSYGNLKVSDFGLSALSQQIKDDGLLHTTCGTPNYVAPEVLEDQGYDGAMADLWSCGVILFVLLAGYLPFEDSNLMTLYKKISNAEFTFPPWTSFPAKRLLTRILDPNPMTRITIPEILEDEWFKKGYKRPEFDEQYDTTLDDVDAVFNDSEEHHV

SEQ ID NO: 18721 - protein, 247 aa, Zea mays subsp. mays
  peptide (1)..(247): Ceres Seq. ID no. 12368712
  misc_feature (1)..(215): Pfam Name: Protein kinase domain Pfam Description: Protein kinase domain
  misc_feature (1)..(244): Homolog of NCBI NO: 14423524 NR Description: similar to wpk4 protein kinase [Arabidopsis
  misc_feature (1)..(244): Homolog of NCBI NO: 30677901 NR Description: CBL-interacting protein kinase 9 [Arabidopsis
  misc_feature (1)..(244): Homolog of NCBI NO: 15223317 NR Description: serine threonine kinase, putative
  misc_feature (1)..(244): Homolog of NCBI NO: 18397430 NR Description: serine/threonine kinase, putative
  misc_feature (1)..(246): Homolog of NCBI NO: 30688193 NR Description: NAF specific protein kinase family [Arabidopsis
  misc_feature (1)..(246): Homolog of NCBI NO: 30683336 NR Description: CBL-interacting protein kinase 3 [Arabidopsis
  misc_feature (1)..(246): Homolog of NCBI NO: 30683332 NR Description: CBL-interacting protein kinase 3 [Arabidopsis
  misc_feature (1)..(246): Homolog of NCBI NO: 30683328 NR Description: CBL-interacting protein kinase 3 [Arabidopsis
  misc_feature (1)..(246): Homolog of NCBI NO: 7446372 NR Description: probable serine/threonine kinase (EC 2.7.1.-)
  misc_feature (1)..(246): Homolog of NCBI NO: 7446371 NR Description: probable serine/threonine kinase (EC 2.7.1.-)
MVEQIKREISTMKLIKHPNVVRIYEVMGSKTKIYIVLEFATGGELFDTIVNHGRMREDEARRYFQQLINAVDYCHSRGVYHRDLKPENLLLDSYGNLKVSDFGLSALSQQIKDDGLLHTTCGTPNYVAPEVLEDQGYDGAMADLWSCGVILFVLLAGYLPFEDSNLMTLYKKISNAEFTFPPWTSFPAKRLLTRILDPNPMTRITIPEILEDEWFKKGYKRPEFDEQYDTTLDDVDAVFNDSEEHHV

SEQ ID NO: 18722 - protein, 236 aa, Zea mays subsp. mays
  peptide (1)..(236): Ceres Seq. ID no. 12368713
  misc_feature (1)..(204): Pfam Name: Protein kinase domain Pfam Description: Protein kinase domain
  misc_feature (1)..(233): Homolog of NCBI NO: 14423524 NR Description: similar to wpk4 protein kinase [Arabidopsis
  misc_feature (1)..(233): Homolog of NCBI NO: 30677901 NR Description: CBL-interacting protein kinase 9 [Arabidopsis
  misc_feature (1)..(233): Homolog of NCBI NO: 15223317 NR Description: serine threonine kinase, putative
  misc_feature (1)..(233): Homolog of NCBI NO: 18397430 NR Description: serine/threonine kinase, putative
  misc_feature (1)..(235): Homolog of NCBI NO: 30688193 NR Description: NAF specific protein kinase family [Arabidopsis
  misc_feature (1)..(235): Homolog of NCBI NO: 30683336 NR Description: CBL-interacting protein kinase 3 [Arabidopsis
  misc_feature (1)..(235): Homolog of NCBI NO: 30683332 NR Description: CBL-interacting protein kinase 3 [Arabidopsis
  misc_feature (1)..(235): Homolog of NCBI NO: 30683328 NR Description: CBL-interacting protein kinase 3 [Arabidopsis
  misc_feature (1)..(235): Homolog of NCBI NO: 7446372 NR Description: probable serine/threonine kinase (EC 2.7.1.-)
  misc_feature (1)..(235): Homolog of NCBI NO: 7446371 NR Description: probable serine/threonine kinase (EC 2.7.1.-)
MKLIKHPNVVRIYEVMGSKTKIYIVLEFATGGELFDTIVNHGRMREDEARRYFQQLINAVDYCHSRGVYHRDLKPENLLLDSYGNLKVSDFGLSALSQQIKDDGLLHTTCGTPNYVAPEVLEDQGYDGAMADLWSCGVILFVLLAGYLPFEDSNLMTLYKKISNAEFTFPPWTSFPAKRLLTRILDPNPMTRITIPEILEDEWFKKGYKRPEFDEQYDTTLDDVDAVFNDSEEHHV

SEQ ID NO: 18723 - DNA, 1457 bp, Zea mays subsp. mays
  misc_feature (1)..(1457): Ceres Seq. ID no. 12360057
  misc_feature: MA Experiment ID: 108523 Result: Up-regulated in Transcription
  misc_feature: MA Experiment 108523 PARAMETER Experiment Name: Zm_42deg_Heat_P Parameter: Age (day) Value: 8
  misc_feature: MA Experiment 108523 PARAMETER Experiment Name: Zm_42deg_Heat_P Parameter: Organism Value: Zea mays
  misc_feature: MA Experiment 108523 PARAMETER Experiment Name: Zm_42deg_Heat_P Parameter: Plant Line Value: 35A19
  misc_feature: MA Experiment 108523 PARAMETER Experiment Name: Zm_42deg_Heat_P Parameter: Temperature (deg C) Value: 42 vs. 22
  misc_feature: MA Experiment 108523 PARAMETER Experiment Name: Zm_42deg_Heat_P Parameter: Timepoint (hr) Value: 6
  misc_feature: MA Experiment 108523 PARAMETER Experiment Name: Zm_42deg_Heat_P Parameter: Tissue Value: Aerial
atttattaaactttcgcaagcgcaggtatctccccacagggcagcgcgtgcggaaaccctagtcgccgccgatgtcggaccctttctacccgtactaccgcggagccttcccgggcggcgacggtgcgcagccgccgccacgttactcggattttgaggtcgacctcatcgcggcccgttacgccggcaccctattgccttatccatcctctgccgacgtcggcgccttcgactcgtatgtcggcgcgagacgatccgcggaaggccccgaatgttgaagattcttatcctgagcgaccaggggaaccagattgtccttatttattgaataatagatgtaagtttaaatctaaatgcaagttcaaccatccgaaggatatggtgaatgcattaggaacaggaacaaacaatgaatctctaattgctgatagcgctgtcttaccagtgaggccttctgaacccatttgtgtgttctatgcaaaaacaggcaaatgcaaatttggtgccatttgcaagttcaatcatccaaaagatattaagacatcacctttgattgcaaaggaaaccatatatacagcaacaactgatgcagcagatgccccgaccgaggcgtgtaacgcaaaggggcttcctataagacaaggtgaagtggattgctcgttttatatgaagacagctgcaaatatggttctatttgtcgcttcaaccatcctgatcggccagggccagctgcggatatagcttttatggttccactggttcaagctactcttccttcatcagcacccattgtccctgcagtggttgaacctttttcaatgatctatcctcaaaggccaggagaaactgtttgtgatttttacatgaagacaggatcttgcaagtattctcagaaatgcaagtttcaccaccccatcagtcgttttgccccgcattccaaagaaaacggggatcctcaacagcctgcgacacttgctagcctgccaaggagagaggacgctgaggcttgtgccttctacatgaggtctggcatgtgcaggttcggtgcgcactgcaagttcgaccaccctcctcgcgaggaggctatttccgagctgcaggcagccggaaaggaaggaatagaagggccgagcctcgtccagcgcgaccatgatgtctaatactgtatcctgcttcagtatgtaataccatgtgaatcgcactgttagttaatgcttggtgctgtcagtcttgttgggagtctgactcgtaaagctcattatcatcggaagtgtttgtcggaggagtgctggcnctaactatttatcttcagttggttgtcgtgttgccaacttgcgatgtcaaggtgcatatttcagttttttagagtaaaaatgcnctttacatcctgccgccaaacttaactatgggcctgtttatggcnntgnttggtttagcttttttttaccagcttttcc

SEQ ID NO: 18724 - protein, 167 aa, Zea mays subsp. mays
  peptide (1)..(167): Ceres Seq. ID no. 12360058
  misc_feature (72)..(98): Pfam Name: Zinc finger C-x8-C-x5-C-x3-H type (and similar) Pfam Description: Zinc finger C-x8-C-x5-C-x3-H type (and similar)
  misc_feature (67)..(146): Homolog of NCBI NO: 22331028 NR Description: hypothetical protein
  misc_feature (56)..(98): Homolog of NCBI NO: 22331028 NR Description: hypothetical protein
  misc_feature (54)..(98): Homolog of NCBI NO: 34912676 NR Description: P0686E09.7 [Oryza sativa (japonica
  misc_feature (56)..(98): Homolog of NCBI NO: 12321969 NR Description: zinc finger protein, putative, 5' partial;
  misc_feature (38)..(151): Homolog of NCBI NO: 34912676 NR Description: P0686E09.7 [Oryza sativa (japonica
  misc_feature (6)..(148): Homolog of NCBI NO: 11994409 NR Description: zinc finger protein-like [Arabidopsis thaliana]
  misc_feature (6)..(148): Homolog of NCBI NO: 22507458 NR Description: Unknown (protein for MGC:30371) [Mus musculus]
  misc_feature (6)..(148): Homolog of NCBI NO: 22331028 NR Description: hypothetical protein
  misc_feature (6)..(148): Homolog of NCBI NO: 12321969 NR Description: zinc finger protein, putative, 5' partial;
  misc_feature (7)..(145): Homolog of NCBI NO: 34912676 NR Description: P0686E09.7 [Oryza sativa (japonica
MSARDDPRKAPNVEDSYPERPGEPDCPYLLNNRCKFKSKCKFNHPKDMVNALGTGTNNESLIADSAVLPVRPSEPICVFYAKTGKCKFGAICKFNHPKDIKTSPLIAKETIYTATTDAADAPTEACNAKGLPIRQGEVDCSFYMKTAANMVLFVASTILIGQGQLRI

SEQ ID NO: 18725 - protein, 137 aa, Zea mays subsp. mays
  peptide (1)..(137): Ceres Seq. ID no. 12360059
  misc_feature (2)..(108): Homolog of NCBI NO: 25409067 NR Description: hypothetical protein At2g47850 [imported] -
  misc_feature (11)..(110): Homolog of NCBI NO: 6728979 NR Description: zinc finger protein 1 (zfn1) [Arabidopsis
  misc_feature (2)..(108): Homolog of NCBI NO: 30690809 NR Description: expressed protein [Arabidopsis thaliana]
  misc_feature (1)..(32): Homolog of NCBI NO: 22507458 NR Description: Unknown (protein for MGC:30371) [Mus musculus]
  misc_feature (79)..(110): Homolog of NCBI NO: 34912676 NR Description: P0686E09.7 [Oryza sativa (japonica
  misc_feature (1)..(121): Homolog of NCBI NO: 11994409 NR Description: zinc finger protein-like [Arabidopsis thaliana]
  misc_feature (1)..(123): Homolog of NCBI NO: 22507458 NR Description: Unknown (protein for MGC:30371) [Mus musculus]
  misc_feature (1)..(121): Homolog of NCBI NO: 22331028 NR Description: hypothetical protein
  misc_feature (1)..(121): Homolog of NCBI NO: 12321969 NR Description: zinc finger protein, putative, 5' partial;
  misc_feature (1)..(102): Homolog of NCBI NO: 34912676 NR Description: P0686E09.7 [Oryza sativa (japonica
MVPLVQATLPSSAPIVPAVVEPFSMIYPQRPGETVCDFYMKTGSCKYSQKCKFHHPISRFAPHSKENGDPQQPATLASLPRREDAEACAFYMRSGMCRFGAHCKFDHPPREEAISELQAAGKEGIEGPSLVQRDHDV

SEQ ID NO: 18726 - protein, 120 aa, Zea mays subsp. mays
  peptide (1)..(120): Ceres Seq. ID no. 12360060
  misc_feature (25)..(51): Pfam Name: Zinc finger C-x8-C-x5-C-x3-H type (and similar) Pfam Description: Zinc finger C-x8-C-x5-C-x3-H type (and similar)
  misc_feature (20)..(99): Homolog of NCBI NO: 22331028 NR Description: hypothetical protein
  misc_feature (9)..(51): Homolog of NCBI NO: 22331028 NR Description: hypothetical protein
  misc_feature (7)..(51): Homolog of NCBI NO: 34912676 NR Description: P0686E09.7 [Oryza sativa (japonica
  misc_feature (9)..(51): Homolog of NCBI NO: 12321969 NR Description: zinc finger protein, putative, 5' partial;
  misc_feature (1)..(104): Homolog of NCBI NO: 34912676 NR Description: P0686E09.7 [Oryza sativa (japonica
  misc_feature (1)..(101): Homolog of NCBI NO: 11994409 NR Description: zinc finger protein-like [Arabidopsis thaliana]
  misc_feature (1)..(101): Homolog of NCBI NO: 22507458 NR Description: Unknown (protein for MGC:30371) [Mus musculus]
  misc_feature (1)..(101): Homolog of NCBI NO: 22331028 NR Description: hypothetical protein
  misc_feature (1)..(101): Homolog of NCBI NO: 12321969 NR Description: zinc finger protein, putative, 5' partial;
  misc_feature (1)..(98): Homolog of NCBI NO: 34912676 NR Description: P0686E09.7 [Oryza sativa (japonica
MVNALGTGTNNESLIADSAVLPVRPSEPICVFYAKTGKCKFGAICKFNHPKDIKTSPLIAKETIYTATTDAADAPTEACNAKGLPIRQGEVDCSFYMKTAANMVLFVASTILIGQGQLRI

SEQ ID NO: 18727 - DNA, 1404 bp, Zea mays subsp. mays
  misc_feature (1)..(1404): Ceres Seq. ID no. 12418197
  misc_feature: MA Experiment ID: 108504 Result: Down-regulated in Transcription
  misc_feature: MA Experiment 108504 PARAMETER Experiment Name: Zm_Drought_P Parameter: Age (day) Value: 8
  misc_feature: MA Experiment 108504 PARAMETER Experiment Name: Zm_Drought_P Parameter: Organism Value: Zea mays
  misc_feature: MA Experiment 108504 PARAMETER Experiment Name: Zm_Drought_P Parameter: Plant Line Value: 35A19
  misc_feature: MA Experiment 108504 PARAMETER Experiment Name: Zm_Drought_P Parameter: Timepoint (hr) Value: 12
  misc_feature: MA Experiment 108504 PARAMETER Experiment Name: Zm_Drought_P Parameter: Tissue Value: Aerial
  misc_feature: MA Experiment 108504 PARAMETER Experiment Name: Zm_Drought_P Parameter: Treatment Value: Drought vs. No Drought
  misc_feature: MA Experiment ID: 108544 Result: Down-regulated in Transcription
  misc_feature: MA Experiment ID: 108546 Result: Down-regulated in Transcription
  misc_feature: MA Experiment 108546 PARAMETER Experiment Name: Zm_Imbibed_Seeds_P Parameter: Age (day) Value: 3 vs. 2
  misc_feature: MA Experiment 108546 PARAMETER Experiment Name: Zm_Imbibed_Seeds_P Parameter: Organism Value: Zea mays
  misc_feature: MA Experiment 108546 PARAMETER Experiment Name: Zm_Imbibed_Seeds_P Parameter: Plant Line Value: 35A19
  misc_feature: MA Experiment 108546 PARAMETER Experiment Name: Zm_Imbibed_Seeds_P Parameter: Tissue Value: Roots vs. Embryo
  misc_feature: MA Experiment ID: 108556 Result: Down-regulated in Transcription
  misc_feature: MA Experiment 108556 PARAMETER Experiment Name: Zm_Drought_P Parameter: Age (day) Value: 9
  misc_feature: MA Experiment 108556 PARAMETER Experiment Name: Zm_Drought_P Parameter: Organism Value: Zea mays
  misc_feature: MA Experiment 108556 PARAMETER Experiment Name: Zm_Drought_P Parameter: Plant Line Value: 35A19
  misc_feature: MA Experiment 108556 PARAMETER Experiment Name: Zm_Drought_P Parameter: Timepoint (hr) Value: 24
  misc_feature: MA Experiment 108556 PARAMETER Experiment Name: Zm_Drought_P Parameter: Tissue Value: Aerial
  misc_feature: MA Experiment 108556 PARAMETER Experiment Name: Zm_Drought_P Parameter: Treatment Value: Drought vs. No Drought
  misc_feature: MA Experiment ID: 108559 Result: Down-regulated in Transcription
  misc_feature: MA Experiment 108559 PARAMETER Experiment Name: Zm_5mM_NO_P Parameter: Age (day) Value: 8
  misc_feature: MA Experiment 108559 PARAMETER Experiment Name: Zm_5mM_NO_P Parameter: Organism Value: Zea mays
  misc_feature: MA Experiment 108559 PARAMETER Experiment Name: Zm_5mM_NO_P Parameter: Plant Line Value: 35A19
  misc_feature: MA Experiment 108559 PARAMETER Experiment Name: Zm_5mM_NO_P Parameter: Timepoint (hr) Value: 12
  misc_feature: MA Experiment 108559 PARAMETER Experiment Name: Zm_5mM_NO_P Parameter: Tissue Value: Aerial
  misc_feature: MA Experiment 108559 PARAMETER Experiment Name: Zm_5mM_NO_P Parameter: Treatment Value: 5mM NO vs. No Treatment
  misc_feature: MA Experiment ID: 108689 Result: Down-regulated in Transcription
  misc_feature: MA Experiment 108689 PARAMETER Experiment Name: Zm_Drought_Roots_P Parameter: Age (day) Value: 9
  misc_feature: MA Experiment 108689 PARAMETER Experiment Name: Zm_Drought_Roots_P Parameter: Organism Value: Zea mays
  misc_feature: MA Experiment 108689 PARAMETER Experiment Name: Zm_Drought_Roots_P Parameter: Plant Line Value: 35A19
  misc_feature: MA Experiment 108689 PARAMETER Experiment Name: Zm_Drought_Roots_P Parameter: Timepoint (hr) Value: 24
  misc_feature: MA Experiment 108689 PARAMETER Experiment Name: Zm_Drought_Roots_P Parameter: Tissue Value: Roots
  misc_feature: MA Experiment 108689 PARAMETER Experiment Name: Zm_Drought_Roots_P Parameter: Treatment Value: Drought vs. No Drought
  misc_feature: MA Experiment ID: 20000478 Result: Down-regulated in Transcription
  misc_feature: MA Experiment 20000478 PARAMETER Experiment Name: Zm_5mM_SA_P Parameter: Age (day) Value: 11
  misc_feature: MA Experiment 20000478 PARAMETER Experiment Name: Zm_5mM_SA_P Parameter: Organism Value: Zea mays
  misc_feature: MA Experiment 20000478 PARAMETER Experiment Name: Zm_5mM_SA_P Parameter: Plant Line Value: 35A19
  misc_feature: MA Experiment 20000478 PARAMETER Experiment Name: Zm_5mM_SA_P Parameter: Timepoint (hr) Value: 72
  misc_feature: MA Experiment 20000478 PARAMETER Experiment Name: Zm_5mM_SA_P Parameter: Tissue Value: Aerial
  misc_feature: MA Experiment 20000478 PARAMETER Experiment Name: Zm_5mM_SA_P Parameter: Treatment Value: 5mM SA vs. No Treatment
  misc_feature: MA Experiment ID: 20000479 Result: Down-regulated in Transcription
  misc_feature: MA Experiment 20000479 PARAMETER Experiment Name: Zm_Drought_P Parameter: Age (day) Value: 10
  misc_feature: MA Experiment 20000479 PARAMETER Experiment Name: Zm_Drought_P Parameter: Organism Value: Zea mays
  misc_feature: MA Experiment 20000479 PARAMETER Experiment Name: Zm_Drought_P Parameter: Plant Line Value: 35A19
  misc_feature: MA Experiment 20000479 PARAMETER Experiment Name: Zm_Drought_P Parameter: Timepoint (hr) Value: 48
  misc_feature: MA Experiment 20000479 PARAMETER Experiment Name: Zm_Drought_P Parameter: Tissue Value: Aerial
  misc_feature: MA Experiment 20000479 PARAMETER Experiment Name: Zm_Drought_P Parameter: Treatment Value: Drought vs. No Drought
  misc_feature: MA Experiment ID: 20000480 Result: Down-regulated in Transcription
  misc_feature: MA Experiment 20000480 PARAMETER Experiment Name: Zm_Drought_P Parameter: Age (day) Value: 11
  misc_feature: MA Experiment 20000480 PARAMETER Experiment Name: Zm_Drought_P Parameter: Organism Value: Zea mays
  misc_feature: MA Experiment 20000480 PARAMETER Experiment Name: Zm_Drought_P Parameter: Plant Line Value: 35A19
  misc_feature: MA Experiment 20000480 PARAMETER Experiment Name: Zm_Drought_P Parameter: Timepoint (hr) Value: 72
  misc_feature: MA Experiment 20000480 PARAMETER Experiment Name: Zm_Drought_P Parameter: Tissue Value: Aerial
  misc_feature: MA Experiment 20000480 PARAMETER Experiment Name: Zm_Drought_P Parameter: Treatment Value: Drought vs. No Drought
  misc_feature: MA Experiment ID: 20000535 Result: Up-regulated in Transcription
  misc_feature: MA Experiment 20000535 PARAMETER Experiment Name: Zm_Hybrid_Seed_Dev_P Parameter: DAP Value: 30 vs. 12
  misc_feature: MA Experiment 20000535 PARAMETER Experiment Name: Zm_Hybrid_Seed_Dev_P Parameter: Organism Value: Zea mays
  misc_feature: MA Experiment 20000535 PARAMETER Experiment Name: Zm_Hybrid_Seed_Dev_P Parameter: Plant Line Value: 35A19
  misc_feature: MA Experiment 20000535 PARAMETER Experiment Name: Zm_Hybrid_Seed_Dev_P Parameter: Tissue Value: Embryo vs. Unfert Floret
gcacgagaccattacctagaacatcctaatcgaaaaagagcacactagcttagctacacacaggccacaggggcacaagaaacacctgccgatcgacggcgatggacttcgacgaccacgacgacggcgacgaggaggagatggcgccgatgccggtgagctccagctacgacgccccgcctctggcagccggcgggtttggtgcaccggcgccgcccaagccgcccggcgagcgcgccaaggccccgggcgggcggtaccgcgagtgcctcaagaaccacgcggtcggcatcgggggccacgccgtggacgggtgcggcgagttcatgccggccggcgaggagggcacgctcgacgcgctccgctgcgccgcgtgcggctgccaccgcaacttccaccgcaaggagtccccggagggctcccccgccgcgctggtcgcctacggaggcggcgccgccacgccgcaccaccaccacttctccccgtactaccgcaccccgggccgggtcgtacttccaccaccatcaccagcagcagcagccgatccacatggccgccgcgggccaccacacgccgcggccgctggcgctgccgtccacgtcccacagctggcgcgacgacggcgacgactacctctccggggggatggcggccgccgggccggtgtcggcgctgggcccgctgggcctgggcggcggcgccgggccctctggctccggcgggtccggcaagaagcggttccgcaccaagttcacccaggagcagaaggacaggatgctggcgttcgcggagcgcgtggggtggcgcatccagaagcacgacgaggccgccgtgcagcagttctgcgacgaggtctgcgtcaagcgccacgtgctcaaggtgtggatgcacaacaacaagcacaccctcggcaagaagccgtaggcgtagctaagcagcaggcagcgtcacaccatgacacccccaccccaacgcgtgtactgtacacacgcaagagccacgcccacgcgcgcatgcatcacacacacacacacagcggttgatcgcagtcgcagatcgatcgacggtggccgtggccagcctctcctccgggtacgggtaggtacacctgcatcctctttgttagcattcggctccggcgccttcgtgccgtggcggccggagtaggttagttgcagtaagtaactcgtagcgaggtgctcgatcgatctttcttgctcggctttattaggccgttcttttttacttctcatttaaccgtacttgctggtgttgtttattaattaattcctgcggcatgggccatttgccggtttgcttggttgttcttggcgttaataattcttcaatggcaaatgtacttggtgttgcgatgccaacaagtgtatctggggattggggctg

SEQ ID NO: 18728 - protein, 313 aa, Zea mays subsp. mays
  peptide (1)..(313): Ceres Seq. ID no. 12418198
  misc_feature (52)..(103): Pfam Name: ZF-HD protein dimerisation region Pfam Description: ZF-HD protein dimerisation region
  misc_feature (16)..(102): Homolog of NCBI NO: 15230335 NR Description: putative protein
  misc_feature (53)..(149): Homolog of NCBI NO: 21592512 NR Description: unknown [Arabidopsis thaliana]
  misc_feature (53)..(138): Homolog of NCBI NO: 15222382 NR Description: hypothetical protein; protein id: At1g69600.1
  misc_feature (53)..(149): Homolog of NCBI NO: 18421904 NR Description: putative protein
  misc_feature (37)..(102): Homolog of NCBI NO: 18398714 NR Description: expressed protein
  misc_feature (41)..(144): Homolog of NCBI NO: 13277216 NR Description: ZF-HD homeobox protein [Flaveria trinervia]
  misc_feature (47)..(125): Homolog of NCBI NO: 15223757 NR Description: hypothetical protein
  misc_feature (52)..(106): Homolog of NCBI NO: 20148768 NR Description: hypothetical protein At2g02540/T822.16
  misc_feature (52)..(106): Homolog of NCBI NO: 15226993 NR Description: hypothetical protein
  misc_feature (53)..(147): Homolog of NCBI NO: 13277220 NR Description: ZF-HD homeobox protein [Flaveria bidentis]
MDFDDHDDGDEEEMAPMPVSSSYDAPPLAAGGFGAPAPPKPPGERAKAPGGRYRECLKNHAVGIGGHAVDGCGEFMPAGEEGTLDALRCAACGCHRNFHRKESPEGSPAALVAYGGGAATPHHHHFSPYYRTPGRVVLPPPSPAAAADPHGRRGPPHAAAAGAAVHVPQLARRRRRLPLRGDGGRRAGVGAGPAGPGRRRRALWLRRVRQEAVPHQVHPGAEGQDAGVRGARGVAHPEARRGRRAAVLRRGLRQAPRAQGVDAQQQAHPRQEAVGVAKQQAASHHDTPTPTRVLYTRKSHAHARMHHTHTHSG

SEQ ID NO: 18729 - protein, 300 aa, Zea mays subsp. mays
  peptide (1)..(300): Ceres Seq. ID no. 12418199
  misc_feature (39)..(90): Pfam Name: ZF-HD protein dimerisation region Pfam Description: ZF-HD protein dimerisation region
  misc_feature (3)..(89): Homolog of NCBI NO: 15230335 NR Description: putative protein
  misc_feature (40)..(136): Homolog of NCBI NO: 21592512 NR Description: unknown [Arabidopsis thaliana]
  misc_feature (40)..(125): Homolog of NCBI NO: 15222382 NR Description: hypothetical protein; protein id: At1g69600.1
  misc_feature (40)..(136): Homolog of NCBI NO: 18421904 NR Description: putative protein
  misc_feature (24)..(89): Homolog of NCBI NO: 18398714 NR Description: expressed protein
  misc_feature (28)..(131): Homolog of NCBI NO: 13277216 NR Description: ZF-HD homeobox protein [Flaveria trinervia]
  misc_feature (34)..(112): Homolog of NCBI NO: 15223757 NR Description: hypothetical protein
  misc_feature (39)..(93): Homolog of NCBI NO: 20148768 NR Description: hypothetical protein At2g02540/T822.16
  misc_feature (39)..(93): Homolog of NCBI NO: 15226993 NR Description: hypothetical protein
  misc_feature (40)..(134): Homolog of NCBI NO: 13277220 NR Description: ZF-HD homeobox protein [Flaveria bidentis]
MAPMPVSSSYDAPPLAAGGFGAPAPPKPPGERAKAPGGRYRECLKNHAVGIGGHAVDGCGEFMPAGEEGTLDALRCAACGCHRNFHRKESPEGSPAALVAYGGGAATPHHHHFSPYYRTPGRVVLPPPSPAAAADPHGRRGPPHAAAAGAAVHVPQLARRRRRLPLRGDGGRRAGVGAGPAGPGRRRRALWLRRVRQEAVPHQVHPGAEGQDAGVRGARGVAHPEARRGRRAAVLRRGLRQAPRAQGVDAQQQAHPRQEAVGVAKQQAASHHDTPTPTRVLYTRKSHAHARMHHTHTHSG

SEQ ID NO: 18730 - protein, 297 aa, Zea mays subsp. mays
  peptide (1)..(297): Ceres Seq. ID no. 12418200
  misc_feature (36)..(87): Pfam Name: ZF-HD protein dimerisation region Pfam Description: ZF-HD protein dimerisation region
  misc_feature (1)..(86): Homolog of NCBI NO: 15230335 NR Description: putative protein
  misc_feature (37)..(133): Homolog of NCBI NO: 21592512 NR Description: unknown [Arabidopsis thaliana]
  misc_feature (37)..(122): Homolog of NCBI NO: 15222382 NR Description: hypothetical protein; protein id: At1g69600.1
  misc_feature (37)..(133): Homolog of NCBI NO: 18421904 NR Description: putative protein
  misc_feature (21)..(86): Homolog of NCBI NO: 18398714 NR Description: expressed protein
  misc_feature (25)..(128): Homolog of NCBI NO: 13277216 NR Description: ZF-HD homeobox protein [Flaveria trinervia]
  misc_feature (31)..(109): Homolog of NCBI NO: 15223757 NR Description: hypothetical protein
  misc_feature (36)..(90): Homolog of NCBI NO: 20148768 NR Description: hypothetical protein At2g02540/T822.16
  misc_feature (36)..(90): Homolog of NCBI NO: 15226993 NR Description: hypothetical protein
  misc_feature (37)..(131): Homolog of NCBI NO: 13277220 NR Description: ZF-HD homeobox protein [Flaveria bidentis]
MPVSSSYDAPPLAAGGFGAPAPPKPPGERAKAPGGRYRECLKNHAVGIGGHAVDGCGEFMPAGEEGTLDALRCAACGCHRNFHRKESPEGSPAALVAYGGGAATPHHHHFSPYYRTPGRVVLPPPSPAAAADPHGRRGPPHAAAAGAAVHVPQLARRRRRLPLRGDGGRRAGVGAGPAGPGRRRRALWLRRVRQEAVPHQVHPGAEGQDAGVRGARGVAHPEARRGRRAAVLRRGLRQAPRAQGVDAQQQAHPRQEAVGVAKQQAASHHDTPTPTRVLYTRKSHAHARMHHTHTHSG

SEQ ID NO: 18731 - DNA, 1621 bp, Zea mays subsp. mays
  misc_feature (1)..(1621): Ceres Seq. ID no. 12418615
  misc_feature: MA Experiment ID: 108522 Result: Up-regulated in Transcription
  misc_feature: MA Experiment 108522 PARAMETER Experiment Name: Zm_42deg_Heat_P Parameter: Age (day) Value: 8
  misc_feature: MA Experiment 108522 PARAMETER Experiment Name: Zm_42deg_Heat_P Parameter: Organism Value: Zea mays
  misc_feature: MA Experiment 108522 PARAMETER Experiment Name: Zm_42deg_Heat_P Parameter: Plant Line Value: 35A19
  misc_feature: MA Experiment 108522 PARAMETER Experiment Name: Zm_42deg_Heat_P Parameter: Temperature (deg C) Value: 42 vs. 22
  misc_feature: MA Experiment 108522 PARAMETER Experiment Name: Zm_42deg_Heat_P Parameter: Timepoint (hr) Value: 1
  misc_feature: MA Experiment 108522 PARAMETER Experiment Name: Zm_42deg_Heat_P Parameter: Tissue Value: Aerial
  misc_feature: MA Experiment ID: 108527 Result: Up-regulated in Transcription
  misc_feature: MA Experiment 108527 PARAMETER Experiment Name: Zm_5mM_NO_P Parameter: Age (day) Value: 8
  misc_feature: MA Experiment 108527 PARAMETER Experiment Name: Zm_5mM_NO_P Parameter: Organism Value: Zea mays
  misc_feature: MA Experiment 108527 PARAMETER Experiment Name: Zm_5mM_NO_P Parameter: Plant Line Value: 35A19
  misc_feature: MA Experiment 108527 PARAMETER Experiment Name: Zm_5mM_NO_P Parameter: Timepoint (hr) Value: 6
  misc_feature: MA Experiment 108527 PARAMETER Experiment Name: Zm_5mM_NO_P Parameter: Tissue Value: Aerial
  misc_feature: MA Experiment 108527 PARAMETER Experiment Name: Zm_5mM_NO_P Parameter: Treatment Value: 5mM NO vs. No Treatment
  misc_feature: MA Experiment ID: 108528 Result: Down-regulated in Transcription
  misc_feature: MA Experiment 108528 PARAMETER Experiment Name: Zm_Imbibed_Seeds_P Parameter: Age (day) Value: 5 vs. 2
  misc_feature: MA Experiment 108528 PARAMETER Experiment Name: Zm_Imbibed_Seeds_P Parameter: Organism Value: Zea mays
  misc_feature: MA Experiment 108528 PARAMETER Experiment Name: Zm_Imbibed_Seeds_P Parameter: Plant Line Value: 35A19
  misc_feature: MA Experiment 108528 PARAMETER Experiment Name: Zm_Imbibed_Seeds_P Parameter: Tissue Value: Aerial vs. Embryo
  misc_feature: MA Experiment ID: 108533 Result: Up-regulated in Transcription
  misc_feature: MA Experiment 108533 PARAMETER Experiment Name: Zm_4deg_Cold_P Parameter: Age (hr) Value: 8
  misc_feature: MA Experiment 108533 PARAMETER Experiment Name: Zm_4deg_Cold_P Parameter: Organism Value: Zea mays
  misc_feature: MA Experiment 108533 PARAMETER Experiment Name: Zm_4deg_Cold_P Parameter: Plant Line Value: 35A19
  misc_feature: MA Experiment 108533 PARAMETER Experiment Name: Zm_4deg_Cold_P Parameter: Temperature (deg C) Value: 4 vs. 22
  misc_feature: MA Experiment 108533 PARAMETER Experiment Name: Zm_4deg_Cold_P Parameter: Timepoint (hr) Value: 1
  misc_feature: MA Experiment 108533 PARAMETER Experiment Name: Zm_4deg_Cold_P Parameter: Tissue Value: Aerial
  misc_feature: MA Experiment ID: 108534 Result: Up-regulated in Transcription
  misc_feature: MA Experiment 108534 PARAMETER Experiment Name: Zm_4deg_Cold_P Parameter: Age (hr) Value: 8
  misc_feature: MA Experiment 108534 PARAMETER Experiment Name: Zm_4deg_Cold_P Parameter: Organism Value: Zea mays
  misc_feature: MA Experiment 108534 PARAMETER Experiment Name: Zm_4deg_Cold_P Parameter: Plant Line Value: 35A19
  misc_feature: MA Experiment 108534 PARAMETER Experiment Name: Zm_4deg_Cold_P Parameter: Temperature (deg C) Value: 4 vs. 22
  misc_feature: MA Experiment 108534 PARAMETER Experiment Name: Zm_4deg_Cold_P Parameter: Timepoint (hr) Value: 6
  misc_feature: MA Experiment 108534 PARAMETER Experiment Name: Zm_4deg_Cold_P Parameter: Tissue Value: Aerial
  misc_feature: MA Experiment ID: 108535 Result: Down-regulated in Transcription
  misc_feature: MA Experiment 108535 PARAMETER Experiment Name: Zm_Meristem_P Parameter: Age (day) Value: 8
  misc_feature: MA Experiment 108535 PARAMETER Experiment Name: Zm_Meristem_P Parameter: Organism Value: Zea mays
  misc_feature: MA Experiment 108535 PARAMETER Experiment Name: Zm_Meristem_P Parameter: Plant Line Value: 35A19
  misc_feature: MA Experiment 108535 PARAMETER Experiment Name: Zm_Meristem_P Parameter: Tissue Value: Root Meristem vs. Above Root Meristem
  misc_feature: MA Experiment ID: 108536 Result: Up-regulated in Transcription
  misc_feature: MA Experiment 108536 PARAMETER Experiment Name: Zm_Meristem_P Parameter: Age (day) Value: 8
  misc_feature: MA Experiment 108536 PARAMETER Experiment Name: Zm_Meristem_P Parameter: Organism Value: Zea mays
  misc_feature: MA Experiment 108536 PARAMETER Experiment Name: Zm_Meristem_P Parameter: Plant Line Value: 35A19
  misc_feature: MA Experiment 108536 PARAMETER Experiment Name: Zm_Meristem_P Parameter: Tissue Value: Shoot Meristem vs. Above Shoot Meristem
  misc_feature: MA Experiment ID: 108544 Result: Up-regulated in Transcription
  misc_feature: MA Experiment ID: 108545 Result: Down-regulated in Transcription
  misc_feature: MA Experiment 108545 PARAMETER Experiment Name: Zm_Imbibed_Seeds_P Parameter: Age (day) Value: 3 vs. 2
  misc_feature: MA Experiment 108545 PARAMETER Experiment Name: Zm_Imbibed_Seeds_P Parameter: Organism Value: Zea mays
  misc_feature: MA Experiment 108545 PARAMETER Experiment Name: Zm_Imbibed_Seeds_P Parameter: Plant Line Value: 35A19
  misc_feature: MA Experiment 108545 PARAMETER Experiment Name: Zm_Imbibed_Seeds_P Parameter: Tissue Value: Aerial vs. Embryo
  misc_feature: MA Experiment ID: 108688 Result: Down-regulated in Transcription
  misc_feature: MA Experiment 108688 PARAMETER Experiment Name: Zm_Embryos-Flowers__P Parameter: Tissue Value: Immature Flowers vs. Aerial+
  misc_feature: MA Experiment ID: 108689 Result: Down-regulated in Transcription
  misc_feature: MA Experiment 108689 PARAMETER Experiment Name: Zm_Drought_Roots_P Parameter: Age (day) Value: 9
  misc_feature: MA Experiment 108689 PARAMETER Experiment Name: Zm_Drought_Roots_P Parameter: Organism Value: Zea mays
  misc_feature: MA Experiment 108689 PARAMETER Experiment Name: Zm_Drought_Roots_P Parameter: Plant Line Value: 35A19
  misc_feature: MA Experiment 108689 PARAMETER Experiment Name: Zm_Drought_Roots_P Parameter: Timepoint (hr) Value: 24
  misc_feature: MA Experiment 108689 PARAMETER Experiment Name: Zm_Drought_Roots_P Parameter: Tissue Value: Roots
  misc_feature: MA Experiment 108689 PARAMETER Experiment Name: Zm_Drought_Roots_P Parameter: Treatment Value: Drought vs. No Drought
  misc_feature: MA Experiment ID: 20000108 Result: Down-regulated in Transcription
  misc_feature: MA Experiment 20000108 PARAMETER Experiment Name: Zm_Root-Tips_P Parameter: Age (day) Value: 12
  misc_feature: MA Experiment 20000108 PARAMETER Experiment Name: Zm_Root-Tips_P Parameter: Organism Value: Zea mays
  misc_feature: MA Experiment 20000108 PARAMETER Experiment Name: Zm_Root-Tips_P Parameter: Tissue Value: Root tips vs. Root mid region    35
  misc_feature: MA Experiment 20000108 PARAMETER Experiment Name: Zm_Root-Tips_P Parameter: Tissue Value: Root tips vs. Root mid region   Sequence Listing-Misc Features (4)
  misc_feature: MA Experiment ID: 20000487 Result: Down-regulated in Transcription
  misc_feature: MA Experiment 20000487 PARAMETER Experiment Name: Zm_50mM_NH4NO3_L_to_H_P Parameter: Organism Value: Zea mays
  misc_feature: MA Experiment 20000487 PARAMETER Experiment Name: Zm_50mM_NH4NO3_L_to_H_P Parameter: Timepoint (hr) Value: 4
  misc_feature: MA Experiment 20000487 PARAMETER Experiment Name: Zm_50mM_NH4NO3_L_to_H_P Parameter: Tissue Value: Leaves
  misc_feature: MA Experiment 20000487 PARAMETER Experiment Name: Zm_50mM_NH4NO3_L_to_H_P Parameter: Treatment Value: 50mM NH4NO3 vs. 100mM Mannitol
  misc_feature: MA Experiment ID: 20000488 Result: Down-regulated in Transcription
  misc_feature: MA Experiment 20000488 PARAMETER Experiment Name: Zm_50mM_NH4NO3_L_to_H_P Parameter: Organism Value: Zea mays
  misc_feature: MA Experiment 20000488 PARAMETER Experiment Name: Zm_50mM_NH4NO3_L_to_H_P Parameter: Timepoint (hr) Value: 8
  misc_feature: MA Experiment 20000488 PARAMETER Experiment Name: Zm_50mM_NH4NO3_L_to_H_P Parameter: Tissue Value: Leaves
  misc_feature: MA Experiment 20000488 PARAMETER Experiment Name: Zm_50mM_NH4NO3_L_to_H_P Parameter: Treatment Value: 50mM NH4NO3 vs. 100mM Mannitol
gcacgagaccattacctagaacatcctaatcgaaaaaaccatttgtcggcgatcgccgtgctattgcttgggccttggactgagtaggtttggaggtagcgatacgagacactcgcccccgattcccctcccgttgccgaagcctgtgttgcagggatcgttcgcggaagcggtttttgatcggagagagagaaagagagagcgagggagggaggtggggatggacgcggcggcagcggcggcggcgcagatggagaggcactcgtcggcggcggcgcagatggagaggcactcgtcggcggcggccttcgtggagggcggcgttcaggacggctgcgatgacacctgcagcatctgcctcgagaccttctccgacagtgacccctccgcggtgaccagctgcaagcacgagttccacctccagtgcatcctcgagtggtgccagaggagctcccagtgccccatgtgttggcaggcaatcagcatgaaggaccctacgagccaagagctccttgaggccgtcgaggaaaagagcggaacgacgtgcaggaaaaaccacgcgcgcacaacccaccgtttttccgtcacccgctgctcggagatttcgaggtaccggtggatgcagacgacgccgagatcgaggagcggatcatgcagcacctggccgccgccgcagccattcgccggtcgcaccgccacgccagaagagaaggccgccgcagcagcagggcggcggcagctcatggccatggccacccacaaccacaagtcctgttctttccgtctgctggcgaggccactcctggtggttctggttccccgtctccgcatccgccgcggcaagaacatgctgcttcttctgtggtttctcctccgccattgcctgccgtggcctccgcagaaggaacggatgttgacagtactgcctcggctgatggcgctgtcgggccagatgacagtgtttccaggaggcagtcttcgcctgtcaaccacgatgaagctggaccatctgctgacgcgcagtcattctcagacacgatcaaatctaggctgcagtcaggtctctacaaagtacaaggactcccataacgaagagcacgcgcgggtggaaggagaggtggttcgcgcagagcagcgccatgtcgaatcttggctcggagatgaggagggaggtcggtgctgggatcgccgccgtttcccgcatgatcgagaagcagctggagacacgggatgggagtgggacagcaccgtcgtctgctaccgcttcgtctccagctcacgcccaccctggtccggatgcaagtagtagtcagggagctgctgttcccgctacaccacctgcagccgctctgaacaacgctacgcctgcagcagcgtgcgtgctctgaatgacgcctcgtcgtcttcgacagcttgaacgcgcgccaggatcatgttcagtgagtttacactaggtgtggttttcaagtgctttagatatgatgcttgcaatacaatgtgtgtcgcgtgtatagtcagtttgccaattagcctcattgttagccagtgaaacagatagtggatgccaagctactgttcgatcagtgaatgtttcagaataaagttggatacttggatgcgc

SEQ ID NO: 18732 - protein, 361 aa, Zea mays subsp. mays
  peptide (1)..(361): Ceres Seq. ID no. 12418616
  misc_feature (43)..(83): Pfam Name: Zinc finger, C3HC4 type (RING finger) Pfam Description: Zinc finger, C3HC4 type (RING finger)
  misc_feature (1)..(91): Homolog of NCBI NO: 18421807 NR Description: Expressed protein
  misc_feature (25)..(104): Homolog of NCBI NO: 25360953 NR Description: RING-H2 finger protein RHF1a [imported] -
  misc_feature (40)..(104): Homolog of NCBI NO: 11358783 NR Description: RING-H2 finger protein RHF1a
  misc_feature (25)..(104): Homolog of NCBI NO: 26450997 NR Description: putative RING-H2 finger protein RHF1a
  misc_feature (25)..(104): Homolog of NCBI NO: 30682750 NR Description: zinc finger (C3HC4-type RING finger) protein
  misc_feature (22)..(104): Homolog of NCBI NO: 26451710 NR Description: putative RING-H2 finger protein RHF2a
  misc_feature (22)..(104): Homolog of NCBI NO: 30688252 NR Description: zinc finger (C3HC4-type RING finger) protein
  misc_feature (22)..(104): Homolog of NCBI NO: 18420424 NR Description: Expressed protein
  misc_feature (19)..(120): Homolog of NCBI NO: 32493110 NR Description: putative RING-H2 zinc finger protein
  misc_feature (20)..(118): Homolog of NCBI NO: 27819501 NR Description: putative zinc finger protein
MDAAAAAAAQMERHSSAAAQMERHSSAAAFVEGGVQDGCDDTCSICLETFSDSDPSAVTSCKHEFHLQCILEWCQRSSQCPMCWQAISMKDPTSQELLEAVEEKSGTTCRKNHARTTHRFSVTRCSEISRYRWMQTTPRSRSGSCSTWPPPQPFAGRTATPEEKAAAAAGRRQLMAMATHNHKSCSFRLLARPLLVVLVPRLRIRRGKNMLLLLWFLLRHCLPWPPQKERMLTVLPRLMALSGQMTVFPGGSLRLSTTMKLDHLLTRSHSQTRSNLGCSQVSTKYKDSHNEEHARVEGEVVRAEQRHVESWLGDEEGGRCWDRRRFPHDREAAGDTGWEWDSTVVCYRFVSSSRPPWSGCK

SEQ ID NO: 18733 - protein, 351 aa, Zea mays subsp. mays
  peptide (1)..(351): Ceres Seq. ID no. 12418617
  misc_feature (33)..(73): Pfam Name: Zinc finger, C3HC4 type (RING finger) Pfam Description: Zinc finger, C3HC4 type (RING finger)
  misc_feature (1)..(81): Homolog of NCBI NO: 18421807 NR Description: Expressed protein
  misc_feature (15)..(94): Homolog of NCBI NO: 25360953 NR Description: RING-H2 finger protein RHF1a [imported] -
  misc_feature (30)..(94): Homolog of NCBI NO: 11358783 NR Description: RING-H2 finger protein RHF1a
  misc_feature (15)..(94): Homolog of NCBI NO: 26450997 NR Description: putative RING-H2 finger protein RHF1a
  misc_feature (15)..(94): Homolog of NCBI NO: 30682750 NR Description: zinc finger (C3HC4-type RING finger) protein
  misc_feature (12)..(94): Homolog of NCBI NO: 26451710 NR Description: putative RING-H2 finger protein RHF2a
  misc_feature (12)..(94): Homolog of NCBI NO: 30688252 NR Description: zinc finger (C3HC4-type RING finger) protein
  misc_feature (12)..(94): Homolog of NCBI NO: 18420424 NR Description: Expressed protein
  misc_feature (9)..(110): Homolog of NCBI NO: 32493110 NR Description: putative RING-H2 zinc finger protein
  misc_feature (10)..(108): Homolog of NCBI NO: 27819501 NR Description: putative zinc finger protein
MERHSSAAAQMERHSSAAAFVEGGVQDGCDDTCSICLETFSDSDPSAVTSCKHEFHLQCILEWCQRSSQCPMCWQAISMKDPTSQELLEAVEEKSGTTCRKNHARTTHRFSVTRCSEISRYRWMQTTPRSRSGSCSTWPPPQPFAGRTATPEEKAAAAAGRRQLMAMATHNHKSCSFRLLARPLLVVLVPRLRIRRGKNMLLLLWFLLRHCLPWPPQKERMLTVLPRLMALSGQMTVFPGGSLRLSTTMKLDHLLTRSHSQTRSNLGCSQVSTKYKDSHNEEHARVEGEVVRAEQRHVESWLGDEEGGRCWDRRRFPHDREAAGDTGWEWDSTVVCYRFVSSSRPPWSGCK

SEQ ID NO: 18734 - protein, 341 aa, Zea mays subsp. mays
  peptide (1)..(341): Ceres Seq. ID no. 12418618
  misc_feature (23)..(63): Pfam Name: Zinc finger, C3HC4 type (RING finger) Pfam Description: Zinc finger, C3HC4 type (RING finger)
  misc_feature (1)..(71): Homolog of NCBI NO: 18421807 NR Description: Expressed protein
  misc_feature (5)..(84): Homolog of NCBI NO: 25360953 NR Description: RING-H2 finger protein RHF1a [imported] -
  misc_feature (20)..(84): Homolog of NCBI NO: 11358783 NR Description: RING-H2 finger protein RHF1a
  misc_feature (5)..(84): Homolog of NCBI NO: 26450997 NR Description: putative RING-H2 finger protein RHF1a
  misc_feature (5)..(84): Homolog of NCBI NO: 30682750 NR Description: zinc finger (C3HC4-type RING finger) protein
  misc_feature (2)..(84): Homolog of NCBI NO: 26451710 NR Description: putative RING-H2 finger protein RHF2a
  misc_feature (2)..(84): Homolog of NCBI NO: 30688252 NR Description: zinc finger (C3HC4-type RING finger) protein
  misc_feature (2)..(84): Homolog of NCBI NO: 18420424 NR Description: Expressed protein
  misc_feature (1)..(100): Homolog of NCBI NO: 32493110 NR Description: putative RING-H2 zinc finger protein
  misc_feature (1)..(98): Homolog of NCBI NO: 27819501 NR Description: putative zinc finger protein
MERHSSAAAFVEGGVQDGCDDTCSICLETFSDSDPSAVTSCKHEFHLQCILEWCQRSSQCPMCWQAISMKDPTSQELLEAVEEKSGTTCRKNHARTTHRFSVTRCSEISRYRWMQTTPRSRSGSCSTWPPPQPFAGRTATPEEKAAAAAGRRQLMAMATHNHKSCSFRLLARPLLVVLVPRLRIRRGKNMLLLLWFLLRHCLPWPPQKERMLTVLPRLMALSGQMTVFPGGSLRLSTTMKLDHLLTRSHSQTRSNLGCSQVSTKYKDSHNEEHARVEGEVVRAEQRHVESWLGDEEGGRCWDRRRFPHDREAAGDTGWEWDSTVVCYRFVSSSRPPWSGCK

SEQ ID NO: 18735 - DNA, 1288 bp, Zea mays subsp. mays
  misc_feature (1)..(1288): Ceres Seq. ID no. 12418262
  misc_feature: MA Experiment ID: 108528 Result: Up-regulated in Transcription
  misc_feature: MA Experiment 108528 PARAMETER Experiment Name: Zm_Imbibed_Seeds_P Parameter: Age (day) Value: 5 vs. 2
  misc_feature: MA Experiment 108528 PARAMETER Experiment Name: Zm_Imbibed_Seeds_P Parameter: Organism Value: Zea mays
  misc_feature: MA Experiment 108528 PARAMETER Experiment Name: Zm_Imbibed_Seeds_P Parameter: Plant Line Value: 35A19
  misc_feature: MA Experiment 108528 PARAMETER Experiment Name: Zm_Imbibed_Seeds_P Parameter: Tissue Value: Aerial vs. Embryo
  misc_feature: MA Experiment ID: 108530 Result: Up-regulated in Transcription
  misc_feature: MA Experiment 108530 PARAMETER Experiment Name: Zm_Imbibed_Seeds_P Parameter: Age (day) Value: 6 vs. 2
  misc_feature: MA Experiment 108530 PARAMETER Experiment Name: Zm_Imbibed_Seeds_P Parameter: Organism Value: Zea mays
  misc_feature: MA Experiment 108530 PARAMETER Experiment Name: Zm_Imbibed_Seeds_P Parameter: Plant Line Value: 35A19
  misc_feature: MA Experiment 108530 PARAMETER Experiment Name: Zm_Imbibed_Seeds_P Parameter: Tissue Value: Aerial vs. Embryo
  misc_feature: MA Experiment ID: 108535 Result: Down-regulated in Transcription
  misc_feature: MA Experiment 108535 PARAMETER Experiment Name: Zm_Meristem_P Parameter: Age (day) Value: 8
  misc_feature: MA Experiment 108535 PARAMETER Experiment Name: Zm_Meristem_P Parameter: Organism Value: Zea mays
  misc_feature: MA Experiment 108535 PARAMETER Experiment Name: Zm_Meristem_P Parameter: Plant Line Value: 35A19
  misc_feature: MA Experiment 108535 PARAMETER Experiment Name: Zm_Meristem_P Parameter: Tissue Value: Root Meristem vs. Above Root Meristem
  misc_feature: MA Experiment ID: 20000480 Result: Down-regulated in Transcription
  misc_feature: MA Experiment 20000480 PARAMETER Experiment Name: Zm_Drought_P Parameter: Age (day) Value: 11
  misc_feature: MA Experiment 20000480 PARAMETER Experiment Name: Zm_Drought_P Parameter: Organism Value: Zea mays
  misc_feature: MA Experiment 20000480 PARAMETER Experiment Name: Zm_Drought_P Parameter: Plant Line Value: 35A19
  misc_feature: MA Experiment 20000480 PARAMETER Experiment Name: Zm_Drought_P Parameter: Timepoint (hr) Value: 72
  misc_feature: MA Experiment 20000480 PARAMETER Experiment Name: Zm_Drought_P Parameter: Tissue Value: Aerial
  misc_feature: MA Experiment 20000480 PARAMETER Experiment Name: Zm_Drought_P Parameter: Treatment Value: Drought vs. No Drought
gcacgagaccattacctagaacatcctaatcgaaaaacaatcccacaacccaagaagccacaagaaagcagcagcagcaccgcacggacctgacctccaactacaagcgacgatccaggctccagagccccacgcaaggccggaaggagacaggcagcagcccggcagagcagctaagccatggcggtggacctcatgtcctgcggcggcggggcgtacgagcaactggcgttccaggaggcagccgcggcggggctccgcagcctggagttgctcgcttcctcgctctccccgtgcggcgcggggcgggcggagtcgccgccgctcgggcagatcgccgaccaggcggtgtcccggttccggcgcgtcatcaacctgctggaccgcacggggcacgcccgcttccgccgcgcgcccgccgtcgccgcggtggagcccatagagacggagacgccagcgtcacagcaggcggcggcggagccgcctcatcaggctcagaacaaagccctgacgctggacttcgccaagtctgtcccgccggcagcgaacaagaaggccccgcgggcgccggccgtgtccgcgacttcgacctcgttcctgtcgtccgtgaccgcgggcggcgaagggagcgtgtccaaggggtgcagcctcgccgccgtgtcctcgggcaagccgcctctcccgaagcgcacgtcgccgtgccccgccgctgctccgccgggggcgcaccacgccgagtccggcgctggaggttgccactgctcgaagaagaagcgcagccggcagggcctgtcccggcgcacggtgcgcctacccgcggccgcggcaacgccggggtcgcagccgcccggccacgtgccggcgtcgtcggacgtaccccacgacgagtactcgtggcgcaagtacgggcagaagcccatcaaggggtccccttacccgcgcggctactaccggtgcagcagcgccaagggttgccccgcgcggaagcacgtggagcgcgccgccgacgacccggccgtgctcgtcgtcacctacgagggcgaccaccgccacgacggcgacggcgacggcgacggcggcgttggcgctggcgctgcccgctcccgcgcggcgtgaagatcgtttgcttcccgccgtagcagtcagtgtagcagcggtagtcaagtcaatcgatactagtagtagacctcttgtttcatttgttcttcggattagtggtagatcgagctttgctcctgtaaaaggaattaaagagcatttaaacttaatctcgccatgaactttctcc

SEQ ID NO: 18736 - protein, 311 aa, Zea mays subsp. mays
  peptide (1)..(311): Ceres Seq. ID no. 12418263
  misc_feature (233)..(291): Pfam Name: WRKY DNA -binding domain Pfam Description: WRKY DNA -binding domain
  misc_feature (1)..(292): Homolog of NCBI NO: 21537078 NR Description: putaive DNA-binding protein [Arabidopsis thaliana]
  misc_feature (1)..(292): Homolog of NCBI NO: 16604573 NR Description: putative putaive DNA-binding protein [Arabidopsis
  misc_feature (1)..(292): Homolog of NCBI NO: 22329054 NR Description: WRKY family transcription factor
  misc_feature (1)..(292): Homolog of NCBI NO: 30689072 NR Description: WRKY family transcription factor [Arabidopsis
  misc_feature (1)..(291): Homolog of NCBI NO: 25348152 NR Description: probable WRKY-type DNA binding protein
  misc_feature (1)..(291): Homolog of NCBI NO: 18400580 NR Description: WRKY family transcription factor
  misc_feature (1)..(291): Homolog of NCBI NO: 4760596 NR Description: DNA-binding protein NtWRKY3 [Nicotiana tabacum]
  misc_feature (3)..(297): Homolog of NCBI NO: 38568048 NR Description: OSJNBa0065J03.18 [Oryza sativa (japonica
  misc_feature (1)..(294): Homolog of NCBI NO: 4894963 NR Description: DNA-binding protein WRKY3 [Avena sativa]
  misc_feature (1)..(291): Homolog of NCBI NO: 38175580 NR Description: putative DNA-binding protein NtWRKY3
MAVDLMSCGGGAYEQLAFQEAAAAGLRSLELLASSLSPCGAGRAESPPLGQIADQAVSRFRRVINLLDRTGHARFRRAPAVAAVEPIETETPASQQAAAEPPHQAQNKALTLDFAKSVPPAANKKAPRAPAVSATSTSFLSSVTAGGEGSVSKGCSLAAVSSGKPPLPKRTSPCPAAAPPGAHHAESGAGGCHCSKKKRSRQGLSRRTVRLPAAAATPGSQPPGHVPASSDVPHDEYSWRKYGQKPIKGSPYPRGYYRCSSAKGCPARKHVERAADDPAVLVVTYEGDHRHDGDGDGDGGVGAGAARSRAA

SEQ ID NO: 18737 - protein, 306 aa, Zea mays subsp. mays
  peptide (1)..(306): Ceres Seq. ID no. 12418264
  misc_feature (228)..(286): Pfam Name: WRKY DNA -binding domain Pfam Description: WRKY DNA -binding domain
  misc_feature (1)..(287): Homolog of NCBI NO: 21537078 NR Description: putaive DNA-binding protein [Arabidopsis thaliana]
  misc_feature (1)..(287): Homolog of NCBI NO: 16604573 NR Description: putative putaive DNA-binding protein [Arabidopsis
  misc_feature (1)..(287): Homolog of NCBI NO: 22329054 NR Description: WRKY family transcription factor
  misc_feature (1)..(287): Homolog of NCBI NO: 30689072 NR Description: WRKY family transcription factor [Arabidopsis
  misc_feature (1)..(286): Homolog of NCBI NO: 25348152 NR Description: probable WRKY-type DNA binding protein
  misc_feature (1)..(286): Homolog of NCBI NO: 18400580 NR Description: WRKY family transcription factor
  misc_feature (1)..(286): Homolog of NCBI NO: 4760596 NR Description: DNA-binding protein NtWRKY3 [Nicotiana tabacum]
  misc_feature (1)..(292): Homolog of NCBI NO: 38568048 NR Description: OSJNBa0065J03.18 [Oryza sativa (japonica
  misc_feature (1)..(289): Homolog of NCBI NO: 4894963 NR Description: DNA-binding protein WRKY3 [Avena sativa]
  misc_feature (1)..(286): Homolog of NCBI NO: 38175580 NR Description: putative DNA-binding protein NtWRKY3
MSCGGGAYEQLAFQEAAAAGLRSLELLASSLSPCGAGRAESPPLGQIADQAVSRFRRVINLLDRTGHARFRRAPAVAAVEPIETETPASQQAAAEPPHQAQNKALTLDFAKSVPPAANKKAPRAPAVSATSTSFLSSVTAGGEGSVSKGCSLAAVSSGKPPLPKRTSPCPAAAPPGAHHAESGAGGCHCSKKKRSRQGLSRRTVRLPAAAATPGSQPPGHVPASSDVPHDEYSWRKYGQKPIKGSPYPRGYYRCSSAKGCPARKHVERAADDPAVLVVTYEGDHRHDGDGDGDGGVGAGAARSRAA

SEQ ID NO: 18738 - DNA, 1211 bp, Zea mays subsp. mays
  misc_feature (1)..(1211): Ceres Seq. ID no. 12381600
  misc_feature: MA Experiment ID: 108515 Result: Up-regulated in Transcription
  misc_feature: MA Experiment 108515 PARAMETER Experiment Name: Zm_2mM_SA_P Parameter: Age (day) Value: 8
  misc_feature: MA Experiment 108515 PARAMETER Experiment Name: Zm_2mM_SA_P Parameter: Organism Value: Zea mays
  misc_feature: MA Experiment 108515 PARAMETER Experiment Name: Zm_2mM_SA_P Parameter: Plant Line Value: 35A19
  misc_feature: MA Experiment 108515 PARAMETER Experiment Name: Zm_2mM_SA_P Parameter: Timepoint (hr) Value: 12
  misc_feature: MA Experiment 108515 PARAMETER Experiment Name: Zm_2mM_SA_P Parameter: Tissue Value: Aerial
  misc_feature: MA Experiment 108515 PARAMETER Experiment Name: Zm_2mM_SA_P Parameter: Treatment Value: 2mM SA vs. No Treatment
  misc_feature: MA Experiment ID: 108527 Result: Up-regulated in Transcription
  misc_feature: MA Experiment 108527 PARAMETER Experiment Name: Zm_5mM_NO_P Parameter: Age (day) Value: 8
  misc_feature: MA Experiment 108527 PARAMETER Experiment Name: Zm_5mM_NO_P Parameter: Organism Value: Zea mays
  misc_feature: MA Experiment 108527 PARAMETER Experiment Name: Zm_5mM_NO_P Parameter: Plant Line Value: 35A19
  misc_feature: MA Experiment 108527 PARAMETER Experiment Name: Zm_5mM_NO_P Parameter: Timepoint (hr) Value: 6
  misc_feature: MA Experiment 108527 PARAMETER Experiment Name: Zm_5mM_NO_P Parameter: Tissue Value: Aerial
  misc_feature: MA Experiment 108527 PARAMETER Experiment Name: Zm_5mM_NO_P Parameter: Treatment Value: 5mM NO vs. No Treatment
  misc_feature: MA Experiment ID: 108529 Result: Down-regulated in Transcription
  misc_feature: MA Experiment 108529 PARAMETER Experiment Name: Zm_Imbibed_Seeds_P Parameter: Age (day) Value: 5 vs. 2
  misc_feature: MA Experiment 108529 PARAMETER Experiment Name: Zm_Imbibed_Seeds_P Parameter: Organism Value: Zea mays
  misc_feature: MA Experiment 108529 PARAMETER Experiment Name: Zm_Imbibed_Seeds_P Parameter: Plant Line Value: 35A19
  misc_feature: MA Experiment 108529 PARAMETER Experiment Name: Zm_Imbibed_Seeds_P Parameter: Tissue Value: Roots vs. Embryo
  misc_feature: MA Experiment ID: 108545 Result: Up-regulated in Transcription
  misc_feature: MA Experiment 108545 PARAMETER Experiment Name: Zm_Imbibed_Seeds_P Parameter: Age (day) Value: 3 vs. 2
  misc_feature: MA Experiment 108545 PARAMETER Experiment Name: Zm_Imbibed_Seeds_P Parameter: Organism Value: Zea mays
  misc_feature: MA Experiment 108545 PARAMETER Experiment Name: Zm_Imbibed_Seeds_P Parameter: Plant Line Value: 35A19
  misc_feature: MA Experiment 108545 PARAMETER Experiment Name: Zm_Imbibed_Seeds_P Parameter: Tissue Value: Aerial vs. Embryo
  misc_feature: MA Experiment ID: 108546 Result: Down-regulated in Transcription
  misc_feature: MA Experiment 108546 PARAMETER Experiment Name: Zm_Imbibed_Seeds_P Parameter: Age (day) Value: 3 vs. 2
  misc_feature: MA Experiment 108546 PARAMETER Experiment Name: Zm_Imbibed_Seeds_P Parameter: Organism Value: Zea mays
  misc_feature: MA Experiment 108546 PARAMETER Experiment Name: Zm_Imbibed_Seeds_P Parameter: Plant Line Value: 35A19
  misc_feature: MA Experiment 108546 PARAMETER Experiment Name: Zm_Imbibed_Seeds_P Parameter: Tissue Value: Roots vs. Embryo
  misc_feature: MA Experiment ID: 108559 Result: Up-regulated in Transcription
  misc_feature: MA Experiment 108559 PARAMETER Experiment Name: Zm_5mM_NO_P Parameter: Age (day) Value: 8
  misc_feature: MA Experiment 108559 PARAMETER Experiment Name: Zm_5mM_NO_P Parameter: Organism Value: Zea mays
  misc_feature: MA Experiment 108559 PARAMETER Experiment Name: Zm_5mM_NO_P Parameter: Plant Line Value: 35A19
  misc_feature: MA Experiment 108559 PARAMETER Experiment Name: Zm_5mM_NO_P Parameter: Timepoint (hr) Value: 12
  misc_feature: MA Experiment 108559 PARAMETER Experiment Name: Zm_5mM_NO_P Parameter: Tissue Value: Aerial
  misc_feature: MA Experiment 108559 PARAMETER Experiment Name: Zm_5mM_NO_P Parameter: Treatment Value: 5mM NO vs. No Treatment
  misc_feature: MA Experiment ID: 20000535 Result: Down-regulated in Transcription
  misc_feature: MA Experiment 20000535 PARAMETER Experiment Name: Zm_Hybrid_Seed_Dev_P Parameter: DAP Value: 30 vs. 12
  misc_feature: MA Experiment 20000535 PARAMETER Experiment Name: Zm_Hybrid_Seed_Dev_P Parameter: Organism Value: Zea mays
  misc_feature: MA Experiment 20000535 PARAMETER Experiment Name: Zm_Hybrid_Seed_Dev_P Parameter: Plant Line Value: 35A19
  misc_feature: MA Experiment 20000535 PARAMETER Experiment Name: Zm_Hybrid_Seed_Dev_P Parameter: Tissue Value: Embryo vs. Unfert Floret
aaaactgtcgtccccatccccttgctccagcgcgcggtgtgcacaggcagctaggctcatggcggccgctacccctagtccccacagcgcaagggtcgccgttgtcaccggcgggaacaaagggatcgggctggaggtgtgcaggcagctggccagcaacggcatcaccgtcgtcctaacagccagagacgagaagcggggcgccgcagccgtagaggagctcgcggacgcgggcctctccggcgtcgttttccatcagctggaggtcaccgacgcccagagcattgctagattggccggtttcctgaaggcgtggtttgggaagctagacatcctggtaaacaatgccgctatcggtggggttcagtcacttcccgttgaaaatgttggcgaaaagatcaagggcatggacgcgtcccagatggcggagctgatgtggaagagctgccgagagacaaacgacgccgcgaaggcaggcgtccagacgaactactacggggtgaagaacgtgaccgaggcgctgctgcccctgctcctgcaggcctcctcctccggcggaggaagggtcgtcaacgtctcctccgacttcgggctgctacgctatctcaggaacgaggaggtgaagcgtgagctggacgacattgagggcctgacggaggagaggctggacgagctgctgagcacgttcctccgggacttcgaggccggcgcgctggagtcccgcgggtggccgacggagttcgccgcgtacaaggtggccaaggccgccctgaactcctactcgagggtcctggcgaggcggcaccccgagctgcgcgtcaactgcgcgcacccgggctacgtcaagaccgacatgaccaggcagacgggcctgctgacgcccgcgcagggcgcggccaacgtcgtcaaggtggcgctgctcccggaaggcggccccaccggcgctttcttcgcgctaggcaaggaggcgccgttcgtgtgacgctgccgtactgggctggcggtggtgggttcacggtccggcgctaatgcgccgactctccgacttgcctgacgcctgctatctactacctctctctctgtgctgcgcagcgtagtttgctggtttgggacggcgaataaagaaaggatcgctgctgcctcttagttagttgggttctgttagtactaagcttcggtaataaaataaaatccccccagatagatatggc

SEQ ID NO: 18739 - protein, 326 aa, Zea mays subsp. mays
  peptide (1)..(326): Ceres Seq. ID no. 12381601
  misc_feature (20)..(325): Homolog of NCBI NO: 15233062 NR Description: putative protein
  misc_feature (31)..(321): Homolog of NCBI NO: 34559416 NR Description: (-)-isopiperitenone reductase [Mentha x piperita]
  misc_feature (31)..(317): Homolog of NCBI NO: 18378884 NR Description: carbonyl reductase, putative; protein id:
  misc_feature (30)..(317): Homolog of NCBI NO: 25518668 NR Description: hypothetical protein T1N6.22 - Arabidopsis
  misc_feature (9)..(317): Homolog of NCBI NO: 33146492 NR Description: carbonyl reductase -like protein
  misc_feature (21)..(326): Homolog of NCBI NO: 38346767 NR Description: OSJNBa0081C01.18 [Oryza sativa (japonica
  misc_feature (31)..(326): Homolog of NCBI NO: 38346768 NR Description: OSJNBa0081C01.19 [Oryza sativa (japonica
  misc_feature (20)..(326): Homolog of NCBI NO: 38346774 NR Description: OSJNBa0081C01.25 [Oryza sativa (japonica
  misc_feature (26)..(326): Homolog of NCBI NO: 38346772 NR Description: OSJNBa0081C01.23 [Oryza sativa (japonica
  misc_feature (31)..(326): Homolog of NCBI NO: 38346769 NR Description: OSJNBa0081C01.20 [Oryza sativa (japonica
KLSSPSPCSSARCAQAARLMAAATPSPHSARVAVVTGGNKGIGLEVCRQLASNGITVVLTARDEKRGAAAVEELADAGLSGVVFHQLEVTDAQSIARLAGFLKAWFGKLDILVNNAAIGGVQSLPVENVGEKIKGMDASQMAELMWKSCRETNDAAKAGVQTNYYGVKNVTEALLPLLLQASSSGGGRVVNVSSDFGLLRYLRNEEVKRELDDIEGLTEERLDELLSTFLRDFEAGALESRGWPTEFAAYKVAKAALNSYSRVLARRHPELRVNCAHPGYVKTDMTRQTGLLTPAQGAANVVKVALLPEGGPTGAFFALGKEAPFV

SEQ ID NO: 18740 - protein, 307 aa, Zea mays subsp. mays
  peptide (1)..(307): Ceres Seq. ID no. 12381602
  misc_feature (1)..(298): Homolog of NCBI NO: 33146492 NR Description: carbonyl reductase -like protein
  misc_feature (2)..(307): Homolog of NCBI NO: 38346767 NR Description: OSJNBa0081C01.18 [Oryza sativa (japonica
  misc_feature (12)..(307): Homolog of NCBI NO: 38346768 NR Description: OSJNBa0081C01.19 [Oryza sativa (japonica
  misc_feature (1)..(307): Homolog of NCBI NO: 38346774 NR Description: OSJNBa0081C01.25 [Oryza sativa (japonica
  misc_feature (7)..(307): Homolog of NCBI NO: 38346772 NR Description: OSJNBa0081C01.23 [Oryza sativa (japonica
  misc_feature (12)..(307): Homolog of NCBI NO: 38346769 NR Description: OSJNBa0081C01.20 [Oryza sativa (japonica
  misc_feature (1)..(306): Homolog of NCBI NO: 15233062 NR Description: putative protein
  misc_feature (12)..(302): Homolog of NCBI NO: 34559416 NR Description: (-)-isopiperitenone reductase [Mentha x piperita]
  misc_feature (12)..(298): Homolog of NCBI NO: 18378884 NR Description: carbonyl reductase, putative; protein id:
  misc_feature (11)..(298): Homolog of NCBI NO: 25518668 NR Description: hypothetical protein T1N6.22 - Arabidopsis
MAAATPSPHSARVAVVTGGNKGIGLEVCRQLASNGITVVLTARDEKRGAAAVEELADAGLSGVVFHQLEVTDAQSIARLAGFLKAWFGKLDILVNNAAIGGVQSLPVENVGEKIKGMDASQMAELMWKSCRETNDAAKAGVQTNYYGVKNVTEALLPLLLQASSSGGGRVVNVSSDFGLLRYLRNEEVKRELDDIEGLTEERLDELLSTFLRDFEAGALESRGWPTEFAAYKVAKAALNSYSRVLARRHPELRVNCAHPGYVKTDMTRQTGLLTPAQGAANVVKVALLPEGGPTGAFFALGKEAPFV

SEQ ID NO: 18741 - protein, 191 aa, Zea mays subsp. mays
  peptide (1)..(191): Ceres Seq. ID no. 12381603
  misc_feature (1)..(190): Homolog of NCBI NO: 15233062 NR Description: putative protein
  misc_feature (1)..(186): Homolog of NCBI NO: 34559416 NR Description: (-)-isopiperitenone reductase [Mentha x piperita]
  misc_feature (1)..(182): Homolog of NCBI NO: 18378884 NR Description: carbonyl reductase, putative; protein id:
  misc_feature (1)..(182): Homolog of NCBI NO: 25518668 NR Description: hypothetical protein T1N6.22 - Arabidopsis
  misc_feature (1)..(182): Homolog of NCBI NO: 33146492 NR Description: carbonyl reductase -like protein
  misc_feature (1)..(191): Homolog of NCBI NO: 38346767 NR Description: OSJNBa0081C01.18 [Oryza sativa (japonica
  misc_feature (1)..(191): Homolog of NCBI NO: 38346768 NR Description: OSJNBa0081C01.19 [Oryza sativa (japonica
  misc_feature (1)..(191): Homolog of NCBI NO: 38346774 NR Description: OSJNBa0081C01.25 [Oryza sativa (japonica
  misc_feature (1)..(191): Homolog of NCBI NO: 38346772 NR Description: OSJNBa0081C01.23 [Oryza sativa (japonica
  misc_feature (1)..(191): Homolog of NCBI NO: 38346769 NR Description: OSJNBa0081C01.20 [Oryza sativa (japonica
MDASQMAELMWKSCRETNDAAKAGVQTNYYGVKNVTEALLPLLLQASSSGGGRVVNVSSDFGLLRYLRNEEVKRELDDIEGLTEERLDELLSTFLRDFEAGALESRGWPTEFAAYKVAKAALNSYSRVLARRHPELRVNCAHPGYVKTDMTRQTGLLTPAQGAANVVKVALLPEGGPTGAFFALGKEAPFV

SEQ ID NO: 18742 - DNA, 918 bp, Zea mays subsp. mays; identical to SEQ ID NO: 17863
  misc_feature (1)..(918): Ceres Seq. ID no. 12415286
  misc_feature: MA Experiment ID: 108527 Result: Up-regulated in Transcription
  misc_feature: MA Experiment 108527 PARAMETER Experiment Name: Zm_5mM_NO_P Parameter: Age (day) Value: 8
  misc_feature: MA Experiment 108527 PARAMETER Experiment Name: Zm_5mM_NO_P Parameter: Organism Value: Zea mays
  misc_feature: MA Experiment 108527 PARAMETER Experiment Name: Zm_5mM_NO_P Parameter: Plant Line Value: 35A19
  misc_feature: MA Experiment 108527 PARAMETER Experiment Name: Zm_5mM_NO_P Parameter: Timepoint (hr) Value: 6
  misc_feature: MA Experiment 108527 PARAMETER Experiment Name: Zm_5mM_NO_P Parameter: Tissue Value: Aerial
  misc_feature: MA Experiment 108527 PARAMETER Experiment Name: Zm_5mM_NO_P Parameter: Treatment Value: 5mM NO vs. No Treatment

SEQ ID NO: 18743 - protein, 196 aa, Zea mays subsp. mays; identical to SEQ ID NO: 17864
  peptide (1)..(196): Ceres Seq. ID no. 12415287
  misc_feature (50)..(172): Pfam Name: Atrophin-1 family Pfam Description: Atrophin-1 family
  misc_feature (50)..(172): Pfam Name: Atrophin-1 family Pfam Description: Atrophin-1 family
  misc_feature (38)..(196): Homolog of NCBI NO: 30424862 NR Description: RIKEN cDNA 5033413A03 [Mus musculus]
  misc_feature (38)..(196): Homolog of NCBI NO: 30424862 NR Description: RIKEN cDNA 5033413A03 [Mus musculus]
  misc_feature (4)..(196): Homolog of NCBI NO: 30354095 NR Description: Similar to serine/arginine repetitive matrix 2
  misc_feature (4)..(196): Homolog of NCBI NO: 30354095 NR Description: Similar to serine/arginine repetitive matrix 2

SEQ ID NO: 18744 - protein, 160 aa, Zea mays subsp. mays; identical to SEQ ID NO: 17865
  peptide (1)..(160): Ceres Seq. ID no. 12415288
  misc_feature (1)..(105): Pfam Name: Enoyl-CoA hydratase/isomerase family Pfam Description: Enoyl-CoA hydratase/isomerase family
  misc_feature (1)..(105): Pfam Name: Enoyl-CoA hydratase/isomerase family Pfam Description: Enoyl-CoA hydratase/isomerase family
  misc_feature (1)..(126): Homolog of NCBI NO: 8896103 NR Description: enoyl-CoA hydratase-like protein
  misc_feature (1)..(140): Homolog of NCBI NO: 40739395 NR Description: hypothetical protein AN6767.2 [Aspergillus
  misc_feature (1)..(137): Homolog of NCBI NO: 23016771 NR Description: hypothetical protein [Magnetospirillum
  misc_feature (1)..(136): Homolog of NCBI NO: 23017142 NR Description: hypothetical protein [Thermobifida fusca]
  misc_feature (1)..(126): Homolog of NCBI NO: 15828352 NR Description: possible enoyl-CoA hydratase [Mycobacterium
  misc_feature (1)..(126): Homolog of NCBI NO: 8896103 NR Description: enoyl-CoA hydratase-like protein
  misc_feature (1)..(137): Homolog of NCBI NO: 23016771 NR Description: hypothetical protein [Magnetospirillum
  misc_feature (1)..(126): Homolog of NCBI NO: 15828352 NR Description: possible enoyl-CoA hydratase [Mycobacterium
  misc_feature (1)..(158): Homolog of NCBI NO: 34903766 NR Description: unnamed protein product [Oryza sativa (japonica
  misc_feature (1)..(160): Homolog of NCBI NO: 21555734 NR Description: carnitine racemase like protein [Arabidopsis
  misc_feature (1)..(143): Homolog of NCBI NO: 15236498 NR Description: carnitine racemase like protein
  misc_feature (1)..(143): Homolog of NCBI NO: 15236499 NR Description: carnitine racemase like protein
  misc_feature (1)..(137): Homolog of NCBI NO: 15218713 NR Description: hypothetical protein; protein id: At1g65520.1
  misc_feature (1)..(136): Homolog of NCBI NO: 23017142 NR Description: hypothetical protein [Thermobifida fusca]
  misc_feature (1)..(140): Homolog of NCBI NO: 40739395 NR Description: hypothetical protein AN6767.2 [Aspergillus
  misc_feature (1)..(137): Homolog of NCBI NO: 15218713 NR Description: hypothetical protein; protein id: At1g65520.1
  misc_feature (1)..(143): Homolog of NCBI NO: 15236499 NR Description: carnitine racemase like protein
  misc_feature (1)..(143): Homolog of NCBI NO: 15236498 NR Description: carnitine racemase like protein
  misc_feature (1)..(160): Homolog of NCBI NO: 21555734 NR Description: carnitine racemase like protein [Arabidopsis
  misc_feature (1)..(158): Homolog of NCBI NO: 34903766 NR Description: unnamed protein product [Oryza sativa (japonica

SEQ ID NO: 18745 - protein, 134 aa, Zea mays subsp. mays; identical to SEQ ID NO: 17866
  peptide (1)..(134): Ceres Seq. ID no. 12415289
  misc_feature (19)..(112): Pfam Name: HlyD family secretion protein Pfam Description: HlyD family secretion protein
  misc_feature (19)..(112): Pfam Name: HlyD family secretion protein Pfam Description: HlyD family secretion protein
  misc_feature (80)..(134): Homolog of NCBI NO: 29828813 NR Description: hypothetical protein [Streptomyces avermitilis
  misc_feature (1)..(134): Homolog of NCBI NO: 19923466 NR Description: splicing coactivator subunit SRm300
  misc_feature (1)..(134): Homolog of NCBI NO: 6649242 NR Description: splicing coactivator subunit SRm300 [Homo sapiens]
  misc_feature (1)..(134): Homolog of NCBI NO: 30424862 NR Description: RIKEN cDNA 5033413A03 [Mus musculus]
  misc_feature (80)..(134): Homolog of NCBI NO: 29828813 NR Description: hypothetical protein [Streptomyces avermitilis
  misc_feature (1)..(134): Homolog of NCBI NO: 6649242 NR Description: splicing coactivator subunit SRm300 [Homo sapiens]
  misc_feature (1)..(134): Homolog of NCBI NO: 5821143 NR Description: RNA binding protein [Homo sapiens]
  misc_feature (5)..(134): Homolog of NCBI NO: 29247944 NR Description: GLP_26_54603_52153 [Giardia lamblia ATCC 50803]
  misc_feature (21)..(134): Homolog of NCBI NO: 22956890 NR Description: hypothetical protein [Rhodobacter sphaeroides]
  misc_feature (1)..(134): Homolog of NCBI NO: 5821145 NR Description: RNA binding protein [Homo sapiens]
  misc_feature (1)..(134): Homolog of NCBI NO: 30424862 NR Description: RIKEN cDNA 5033413A03 [Mus musculus]
  misc_feature (1)..(134): Homolog of NCBI NO: 19923466 NR Description: splicing coactivator subunit SRm300
  misc_feature (1)..(134): Homolog of NCBI NO: 5821143 NR Description: RNA binding protein [Homo sapiens]
  misc_feature (1)..(134): Homolog of NCBI NO: 5821145 NR Description: RNA binding protein [Homo sapiens]
  misc_feature (5)..(134): Homolog of NCBI NO: 29247944 NR Description: GLP_26_54603_52153 [Giardia lamblia ATCC 50803]
  misc_feature (21)..(134): Homolog of NCBI NO: 22956890 NR Description: hypothetical protein [Rhodobacter sphaeroides]

SEQ ID NO: 18746 - DNA, 1498 bp, Zea mays subsp. mays
  misc_feature (1)..(1498): Ceres Seq. ID no. 12361178
  misc_feature: MA Experiment ID: 108528 Result: Up-regulated in Transcription
  misc_feature: MA Experiment 108528 PARAMETER Experiment Name: Zm_Imbibed_Seeds_P Parameter: Age (day) Value: 5 vs. 2
  misc_feature: MA Experiment 108528 PARAMETER Experiment Name: Zm_Imbibed_Seeds_P Parameter: Organism Value: Zea mays
  misc_feature: MA Experiment 108528 PARAMETER Experiment Name: Zm_Imbibed_Seeds_P Parameter: Plant Line Value: 35A19
  misc_feature: MA Experiment 108528 PARAMETER Experiment Name: Zm_Imbibed_Seeds_P Parameter: Tissue Value: Aerial vs. Embryo
  misc_feature: MA Experiment ID: 108545 Result: Up-regulated in Transcription
  misc_feature: MA Experiment 108545 PARAMETER Experiment Name: Zm_Imbibed_Seeds_P Parameter: Age (day) Value: 3 vs. 2
  misc_feature: MA Experiment 108545 PARAMETER Experiment Name: Zm_Imbibed_Seeds_P Parameter: Organism Value: Zea mays
  misc_feature: MA Experiment 108545 PARAMETER Experiment Name: Zm_Imbibed_Seeds_P Parameter: Plant Line Value: 35A19
  misc_feature: MA Experiment 108545 PARAMETER Experiment Name: Zm_Imbibed_Seeds_P Parameter: Tissue Value: Aerial vs. Embryo
  misc_feature: MA Experiment ID: 108547 Result: Up-regulated in Transcription
  misc_feature: MA Experiment 108547 PARAMETER Experiment Name: Zm_Imbibed_Seeds_P Parameter: Age (day) Value: 4 vs. 2
  misc_feature: MA Experiment 108547 PARAMETER Experiment Name: Zm_Imbibed_Seeds_P Parameter: Organism Value: Zea mays
  misc_feature: MA Experiment 108547 PARAMETER Experiment Name: Zm_Imbibed_Seeds_P Parameter: Plant Line Value: 35A19
  misc_feature: MA Experiment 108547 PARAMETER Experiment Name: Zm_Imbibed_Seeds_P Parameter: Tissue Value: Aerial vs. Embryo
  misc_feature: MA Experiment ID: 20000487 Result: Up-regulated in Transcription
  misc_feature: MA Experiment 20000487 PARAMETER Experiment Name: Zm_50mM_NH4NO3_L_to_H_P Parameter: Organism Value: Zea mays
  misc_feature: MA Experiment 20000487 PARAMETER Experiment Name: Zm_50mM_NH4NO3_L_to_H_P Parameter: Timepoint (hr) Value: 4
  misc_feature: MA Experiment 20000487 PARAMETER Experiment Name: Zm_50mM_NH4NO3_L_to_H_P Parameter: Tissue Value: Leaves
  misc_feature: MA Experiment 20000487 PARAMETER Experiment Name: Zm_50mM_NH4NO3_L_to_H_P Parameter: Treatment Value: 50mM NH4NO3 vs. 100mM Mannitol
  misc_feature: MA Experiment ID: 20000488 Result: Up-regulated in Transcription
  misc_feature: MA Experiment 20000488 PARAMETER Experiment Name: Zm_50mM_NH4NO3_L_to_H_P Parameter: Organism Value: Zea mays
  misc_feature: MA Experiment 20000488 PARAMETER Experiment Name: Zm_50mM_NH4NO3_L_to_H_P Parameter: Timepoint (hr) Value: 8
  misc_feature: MA Experiment 20000488 PARAMETER Experiment Name: Zm_50mM_NH4NO3_L_to_H_P Parameter: Tissue Value: Leaves
  misc_feature: MA Experiment 20000488 PARAMETER Experiment Name: Zm_50mM_NH4NO3_L_to_H_P Parameter: Treatment Value: 50mM NH4NO3 vs. 100mM Mannitol
  misc_feature: MA Experiment ID: 20000534 Result: Down-regulated in Transcription
  misc_feature: MA Experiment 20000534 PARAMETER Experiment Name: Zm_Hybrid_Pollen_P Parameter: Age (day) Value: 8
  misc_feature: MA Experiment 20000534 PARAMETER Experiment Name: Zm_Hybrid_Pollen_P Parameter: Organism Value: Zea mays
  misc_feature: MA Experiment 20000534 PARAMETER Experiment Name: Zm_Hybrid_Pollen_P Parameter: Plant Line Value: 35A19
  misc_feature: MA Experiment 20000534 PARAMETER Experiment Name: Zm_Hybrid_Pollen_P Parameter: Tissue Value: Pollen vs. Aerial
  misc_feature: MA Experiment ID: 20000630 Result: Down-regulated in Transcription
  misc_feature: MA Experiment 20000630 PARAMETER Experiment Name: Zm_Herbicide-Treatments_P Parameter: Timepoint (hr) Value: 4
  misc_feature: MA Experiment 20000630 PARAMETER Experiment Name: Zm_Herbicide-Treatments_P Parameter: Tissue Value: Aerial
  misc_feature: MA Experiment 20000630 PARAMETER Experiment Name: Zm_Herbicide-Treatments_P Parameter: Treatment Value: Roundup vs. No Treatment
gcacgagaccattacctagaacatcctaatcaaaaaaacccccgggcagcggacaaacaagcacacagcacgagcgaagagacgcagccatggcgatggctccaccgcctgcctgctcgctcttcccccgggtcgccgctgctgcgcccagttccgtcacctccaactccgttttgacctcgcgtggccccggtatccttccttccccgcgtctcgctttcgcccgccgccacctctccgcggcatggtcatcgaaggcagcagcctccgcttctgtcgaaatccaggatgactacacggatgaggtggacgcggtgaacattgcgcaggatgtcacccagctcattggaaaaacaccaatggtgtatctcaatagagttgctgacggatgtgtggctaatatcgctgcaaagctcgagtacatgggaccttgccgaagtgtcaaagataggattggattaagcatgattaatgatgctgaagagaagggattaatttctccagacaagaccattttggtagaaccaacaactggaaatactggtgtagccattgcttctgtggctgcagcaagaggatacaagttgatagcaacaatgccttcatcattagatgtcgagagacgcattcttctgcgtgcattcggagcagagattgtgttaactgatcctaccaaaggactaaaaggagcttttgataaagctgaggaaatagtcctgagaacaccaaatgcgtatatgtttcagcagttcaacaatgaggcaaatagtgaggttattggggtagaacctgctgaaactagtgtgatttctggtgatagccctggttacattccaagtatattagatgtgcagttgattgatgaggttgtgaaggttagcacagcagaagccgttgattctgcaagggaacttgctctaaaagagggcttgctggttggtatttcctctggtgctgcagcggttgctgctatcaatgttggcaaaagacctgaaaatgccggaaagctgattgcggtcattttccccagctttggagagagatacatctccaccattctgttccgtccgatatatgactctgttcgaagaatgaggaagagatagcgagccttgaaccacttcaagcgcgtggccagtcccttctctagacctgacaggcttccatgacatgattgataaacgtgaagcagtgaagaccctgtttgattgcaacttcagggtccgaagttttgaagctgcacagagtttctatcaggtgagctgcaggcctgcagcttggttctagcaagactggaggagtgcctcatgtttagaccagctcatacaatcctggtgcaacacgcagaattgcgtgccgcagttagcttgggactttcgtttagtagtctaggaccgggtacaaaccgcttgttacctggtacgcacttgagctgattttagcgaccaactatctgcaaattctttttgccttccgaattttgattgtttcatctttt

SEQ ID NO: 18747 - protein, 338 aa, Zea mays subsp. mays
  peptide (1)..(338): Ceres Seq. ID no. 12361179
  misc_feature (82)..(229): Pfam Name: Pyridoxal-phosphate dependent enzyme Pfam Description: Pyridoxal-phosphate dependent enzyme
  misc_feature (226)..(336): Homolog of NCBI NO: 11131628 NR Description: Cysteine synthase, chloroplast precursor sulfhydrylase) (O-acetylserine (Thiol)-lyase) (CSase B) (CS-B)
  misc_feature (42)..(229): Homolog of NCBI NO: 11131628 NR Description: Cysteine synthase, chloroplast precursor sulfhydrylase) (O-acetylserine (Thiol)-lyase) (CSase B) (CS-B)
  misc_feature (226)..(336): Homolog of NCBI NO: 12081919 NR Description: plastidic cysteine synthase 1 [Solanum tuberosum]
  misc_feature (37)..(229): Homolog of NCBI NO: 12081919 NR Description: plastidic cysteine synthase 1 [Solanum tuberosum]
  misc_feature (226)..(336): Homolog of NCBI NO: 12081921 NR Description: plastidic cysteine synthase 2 [Solanum tuberosum]
  misc_feature (226)..(336): Homolog of NCBI NO: 399333 NR Description: Cysteine synthase, chloroplast precursor sulfhydrylase) (O-acetylserine (Thiol)-lyase) (CSase B) (CS-B)
  misc_feature (62)..(229): Homolog of NCBI NO: 399333 NR Description: Cysteine synthase, chloroplast precursor sulfhydrylase) (O-acetylserine (Thiol)-lyase) (CSase B) (CS-B)
  misc_feature (37)..(229): Homolog of NCBI NO: 12081921 NR Description: plastidic cysteine synthase 2 [Solanum tuberosum]
  misc_feature (228)..(336): Homolog of NCBI NO: 15228596 NR Description: O-acetylserine (thiol) lyase
  misc_feature (66)..(229): Homolog of NCBI NO: 15228596 NR Description: O-acetylserine (thiol) lyase
MAMAPPPACSLFPRVAAAAPSSVTSNSVLTSRGPGILPSPRLAFARRHLSAAWSSKAAASASVEIQDDYTDEVDAVNIAQDVTQLIGKTPMVYLNRVADGCVANIAAKLEYMGPCRSVKDRIGLSMINDAEEKGLISPDKTILVEPTTGNTGVAIASVAAARGYKLIATMPSSLDVERRILLRAFGAEIVLTDPTKGLKGAFDKAEEIVLRTPNAYMFQQFNNEANSEVIGVEPAETSVISGDSPGYIPSILDVQLIDEVVKVSTAEAVDSARELALKEGLLVGISSGAAAVAAINVGKRPENAGKLIAVIFPSFGERYISTILFRPIYDSVRRMRKR

SEQ ID NO: 18748 - protein, 336 aa, Zea mays subsp. mays
  peptide (1)..(336): Ceres Seq. ID no. 12361180
  misc_feature (80)..(227): Pfam Name: Pyridoxal-phosphate dependent enzyme Pfam Description: Pyridoxal-phosphate dependent enzyme
  misc_feature (224)..(334): Homolog of NCBI NO: 11131628 NR Description: Cysteine synthase, chloroplast precursor sulfhydrylase) (O-acetylserine (Thiol)-lyase) (CSase B) (CS-B)
  misc_feature (40)..(227): Homolog of NCBI NO: 11131628 NR Description: Cysteine synthase, chloroplast precursor sulfhydrylase) (O-acetylserine (Thiol)-lyase) (CSase B) (CS-B)
  misc_feature (224)..(334): Homolog of NCBI NO: 12081919 NR Description: plastidic cysteine synthase 1 [Solanum tuberosum]
  misc_feature (35)..(227): Homolog of NCBI NO: 12081919 NR Description: plastidic cysteine synthase 1 [Solanum tuberosum]
  misc_feature (224)..(334): Homolog of NCBI NO: 12081921 NR Description: plastidic cysteine synthase 2 [Solanum tuberosum]
  misc_feature (224)..(334): Homolog of NCBI NO: 399333 NR Description: Cysteine synthase, chloroplast precursor sulfhydrylase) (O-acetylserine (Thiol)-lyase) (CSase B) (CS-B)
  misc_feature (60)..(227): Homolog of NCBI NO: 399333 NR Description: Cysteine synthase, chloroplast precursor sulfhydrylase) (O-acetylserine (Thiol)-lyase) (CSase B) (CS-B)
  misc_feature (35)..(227): Homolog of NCBI NO: 12081921 NR Description: plastidic cysteine synthase 2 [Solanum tuberosum]
  misc_feature (226)..(334): Homolog of NCBI NO: 15228596 NR Description: O-acetylserine (thiol) lyase
  misc_feature (64)..(227): Homolog of NCBI NO: 15228596 NR Description: O-acetylserine (thiol) lyase
MAPPPACSLFPRVAAAAPSSVTSNSVLTSRGPGILPSPRLAFARRHLSAAWSSKAAASASVEIQDDYTDEVDAVNIAQDVTQLIGKTPMVYLNRVADGCVANIAAKLEYMGPCRSVKDRIGLSMINDAEEKGLISPDKTILVEPTTGNTGVAIASVAAARGYKLIATMPSSLDVERRILLRAFGAEIVLTDPTKGLKGAFDKAEEIVLRTPNAYMFQQFNNEANSEVIGVEPAETSVISGDSPGYIPSILDVQLIDEVVKVSTAEAVDSARELALKEGLLVGISSGAAAVAAINVGKRPENAGKLIAVIFPSFGERYISTILFRPIYDSVRRMRKR

SEQ ID NO: 18749 - protein, 248 aa, Zea mays subsp. mays
  peptide (1)..(248): Ceres Seq. ID no. 12361181
  misc_feature (1)..(139): Pfam Name: Pyridoxal-phosphate dependent enzyme Pfam Description: Pyridoxal-phosphate dependent enzyme
  misc_feature (136)..(246): Homolog of NCBI NO: 11131628 NR Description: Cysteine synthase, chloroplast precursor sulfhydrylase) (O-acetylserine (Thiol)-lyase) (CSase B) (CS-B)
  misc_feature (1)..(139): Homolog of NCBI NO: 11131628 NR Description: Cysteine synthase, chloroplast precursor sulfhydrylase) (O-acetylserine (Thiol)-lyase) (CSase B) (CS-B)
  misc_feature (136)..(246): Homolog of NCBI NO: 12081919 NR Description: plastidic cysteine synthase 1 [Solanum tuberosum]
  misc_feature (1)..(139): Homolog of NCBI NO: 12081919 NR Description: plastidic cysteine synthase 1 [Solanum tuberosum]
  misc_feature (136)..(246): Homolog of NCBI NO: 12081921 NR Description: plastidic cysteine synthase 2 [Solanum tuberosum]
  misc_feature (136)..(246): Homolog of NCBI NO: 399333 NR Description: Cysteine synthase, chloroplast precursor sulfhydrylase) (O-acetylserine (Thiol)-lyase) (CSase B) (CS-B)
  misc_feature (1)..(139): Homolog of NCBI NO: 399333 NR Description: Cysteine synthase, chloroplast precursor sulfhydrylase) (O-acetylserine (Thiol)-lyase) (CSase B) (CS-B)
  misc_feature (1)..(139): Homolog of NCBI NO: 12081921 NR Description: plastidic cysteine synthase 2 [Solanum tuberosum]
  misc_feature (138)..(246): Homolog of NCBI NO: 15228596 NR Description: O-acetylserine (thiol) lyase
  misc_feature (1)..(139): Homolog of NCBI NO: 15228596 NR Description: O-acetylserine (thiol) lyase
MVYLNRVADGCVANIAAKLEYMGPCRSVKDRIGLSMINDAEEKGLISPDKTILVEPTTGNTGVAIASVAAARGYKLIATMPSSLDVERRILLRAFGAEIVLTDPTKGLKGAFDKAEEIVLRTPNAYMFQQFNNEANSEVIGVEPAETSVISGDSPGYIPSILDVQLIDEVVKVSTAEAVDSARELALKEGLLVGISSGAAAVAAINVGKRPENAGKLIAVIFPSFGERYISTILFRPIYDSVRRMRKR

SEQ ID NO: 18750 - DNA, 2088 bp, Zea mays subsp. mays
  misc_feature (1)..(2088): Ceres Seq. ID no. 12418833
  misc_feature: MA Experiment ID: 108535 Result: Down-regulated in Transcription
  misc_feature: MA Experiment 108535 PARAMETER Experiment Name: Zm_Meristem_P Parameter: Age (day) Value: 8
  misc_feature: MA Experiment 108535 PARAMETER Experiment Name: Zm_Meristem_P Parameter: Organism Value: Zea mays
  misc_feature: MA Experiment 108535 PARAMETER Experiment Name: Zm_Meristem_P Parameter: Plant Line Value: 35A19
  misc_feature: MA Experiment 108535 PARAMETER Experiment Name: Zm_Meristem_P Parameter: Tissue Value: Root Meristem vs. Above Root Meristem
  misc_feature: MA Experiment ID: 108544 Result: Up-regulated in Transcription
  misc_feature: MA Experiment ID: 108556 Result: Up-regulated in Transcription
  misc_feature: MA Experiment 108556 PARAMETER Experiment Name: Zm_Drought_P Parameter: Age (day) Value: 9
  misc_feature: MA Experiment 108556 PARAMETER Experiment Name: Zm_Drought_P Parameter: Organism Value: Zea mays
  misc_feature: MA Experiment 108556 PARAMETER Experiment Name: Zm_Drought_P Parameter: Plant Line Value: 35A19
  misc_feature: MA Experiment 108556 PARAMETER Experiment Name: Zm_Drought_P Parameter: Timepoint (hr) Value: 24
  misc_feature: MA Experiment 108556 PARAMETER Experiment Name: Zm_Drought_P Parameter: Tissue Value: Aerial
  misc_feature: MA Experiment 108556 PARAMETER Experiment Name: Zm_Drought_P Parameter: Treatment Value: Drought vs. No Drought
  misc_feature: MA Experiment ID: 108689 Result: Down-regulated in Transcription
  misc_feature: MA Experiment 108689 PARAMETER Experiment Name: Zm_Drought_Roots_P Parameter: Age (day) Value: 9
  misc_feature: MA Experiment 108689 PARAMETER Experiment Name: Zm_Drought_Roots_P Parameter: Organism Value: Zea mays
  misc_feature: MA Experiment 108689 PARAMETER Experiment Name: Zm_Drought_Roots_P Parameter: Plant Line Value: 35A19
  misc_feature: MA Experiment 108689 PARAMETER Experiment Name: Zm_Drought_Roots_P Parameter: Timepoint (hr) Value: 24
  misc_feature: MA Experiment 108689 PARAMETER Experiment Name: Zm_Drought_Roots_P Parameter: Tissue Value: Roots
  misc_feature: MA Experiment 108689 PARAMETER Experiment Name: Zm_Drought_Roots_P Parameter: Treatment Value: Drought vs. No Drought
  misc_feature: MA Experiment ID: 20000108 Result: Down-regulated in Transcription
  misc_feature: MA Experiment 20000108 PARAMETER Experiment Name: Zm_Root-Tips_P Parameter: Age (day) Value: 12
  misc_feature: MA Experiment 20000108 PARAMETER Experiment Name: Zm_Root-Tips_P Parameter: Organism Value: Zea mays
  misc_feature: MA Experiment 20000108 PARAMETER Experiment Name: Zm_Root-Tips_P Parameter: Tissue Value: Root tips vs. Root mid region    35
  misc_feature: MA Experiment 20000108 PARAMETER Experiment Name: Zm_Root-Tips_P Parameter: Tissue Value: Root tips vs. Root mid region   Sequence Listing-Misc Features (4)
  misc_feature: MA Experiment ID: 20000477 Result: Up-regulated in Transcription
  misc_feature: MA Experiment 20000477 PARAMETER Experiment Name: Zm_5mM_SA_P Parameter: Age (day) Value: 10
  misc_feature: MA Experiment 20000477 PARAMETER Experiment Name: Zm_5mM_SA_P Parameter: Organism Value: Zea mays
  misc_feature: MA Experiment 20000477 PARAMETER Experiment Name: Zm_5mM_SA_P Parameter: Plant Line Value: 35A19
  misc_feature: MA Experiment 20000477 PARAMETER Experiment Name: Zm_5mM_SA_P Parameter: Timepoint (hr) Value: 48
  misc_feature: MA Experiment 20000477 PARAMETER Experiment Name: Zm_5mM_SA_P Parameter: Tissue Value: Aerial
  misc_feature: MA Experiment 20000477 PARAMETER Experiment Name: Zm_5mM_SA_P Parameter: Treatment Value: 5mM SA vs. No Treatment
  misc_feature: MA Experiment ID: 20000478 Result: Up-regulated in Transcription
  misc_feature: MA Experiment 20000478 PARAMETER Experiment Name: Zm_5mM_SA_P Parameter: Age (day) Value: 11
  misc_feature: MA Experiment 20000478 PARAMETER Experiment Name: Zm_5mM_SA_P Parameter: Organism Value: Zea mays
  misc_feature: MA Experiment 20000478 PARAMETER Experiment Name: Zm_5mM_SA_P Parameter: Plant Line Value: 35A19
  misc_feature: MA Experiment 20000478 PARAMETER Experiment Name: Zm_5mM_SA_P Parameter: Timepoint (hr) Value: 72
  misc_feature: MA Experiment 20000478 PARAMETER Experiment Name: Zm_5mM_SA_P Parameter: Tissue Value: Aerial
  misc_feature: MA Experiment 20000478 PARAMETER Experiment Name: Zm_5mM_SA_P Parameter: Treatment Value: 5mM SA vs. No Treatment
gcacgagaccattacctagaacatcctaatcgaaaaacccacgagcccaacaaaccactcccacccggtggctcgtcctcggacgccaagccactccgcgccccaatccggaagcgccgccgccgccgatcgaccggccgtcgacccatgctccgctcggcgctcttccgctcagcccccgggctccgccggtctccggcgacggcccacttatccaccgccgccgccgccgccgcagcgtggctctccaacggccctgcctccgccccgtctagggtgcgcctcctcatcggcggggagttcgtcgagtcgcgcgccgacgagcacgtcgacgtcaccaaccccgcgacgcaggaggtggtgtcccggatcccgctcaccacggccgatgagttcaaagctgccgtcgatgccgccaggacggccttccccggctggcggaacacgcccgtcacgacgcggcagcgcgtcatgttcaagttccaggagctcatccgggctaacatggacaagcttgcagagaacatcactacggagcaggggaagacgctaaaagatgcttggggcgacgtgttccgcggcctagaggtggtggagcatgcttgtggaatgggaacactgcaaatgggcgaatatgtatcaaatgtttctaatgggattgacaccttcagcattcgggagccacttggtgtttgcgctgggatatgcccatttaattttcctgctatgattcccctatggatgtttcccatagcagttacgtgtggcaatacttttgttcttaagccatcggaaaaggacccaggggctgctatgatgcttgcggagctagcaatggaagctggtttgcctaagggtgttttgaacatcgttcatggcaccaatgatgttgtcaataatatttgtgacgatgaggatattaaggctgtatcttttgttggttccaatacagctggtatgcatatttattctagagcatctgctgcaggcaagcgtgttcagtgcaatatgggagcaaagaatcatgcaattatccttcccgatgctgatagagatgctacattgaatgcccttattgctgctggatttggtgcagcagggcaaaggtgcatggcattgagcactgctgtttttgttggcggttcagaatcatgggaggatgaattagtcaaacgtgcaagtggccttgttgttagttcaggaatggttaatgatgtagaccttggtccagtgatcagccgacaggcaaaggatcgtatctgtaaattagttcaaagtggtgttgacagtggtgctcgtatattgcttgatggaagaaagatagtggttcctcgctatgaagatggaaattttgttggcccaaccattctggctgatgttaaaagtgacatggagtgttacaaggaggaaatatttggtccagtgcttctcttaatgaaggcggagagcctagaagatgccatccaaatcataaacagaaacaagtatggcaatggtgcttccatatttacaacatctggcgtctctgccaggaaatttcaaacagacattgaagctggccaggtgggcatcaacgtgccgattccagtccccctgccgttcttctccttcacgggcagcaaagcttcattcgcaggagatttgaatttctacggcaaggctggcgtgcagttcttcacccagatcaagacgatcacgcagcagtggaaggagtcgccggtgcagcgggtctcgctctccatgcccacctcgcagaagtgagacgtcaaaggacgctcacgccactctccaaagctccactcctctggacatagacccacgcatggccacaagagaaggataattggtaggcatggcgacactccatgcacggccatgatactagtgtgtgctcgctttgctcttttgtctggacatcttgcatgcgcattcagaacatccaatgacgaaggtttagatatatgtgagcgctgcccattatgctgttaggattactgtaaaagccccaggtcctttgatcgagtgtcatgtgtaaacccacaataagaggagaaataaaaatgtcgccgtgctggtttgtggcatctc

SEQ ID NO: 18751 - protein, 586 aa, Zea mays subsp. mays
  peptide (1)..(586): Ceres Seq. ID no. 12418834
  misc_feature (87)..(583): Homolog of NCBI NO: 24638876 NR Description: CG17896-PB [Drosophila melanogaster]
  misc_feature (64)..(583): Homolog of NCBI NO: 7431479 NR Description: methylmalonate-semialdehyde dehydrogenase
  misc_feature (71)..(583): Homolog of NCBI NO: 23271115 NR Description: RIKEN cDNA 1110038I05 gene [Mus musculus]
  misc_feature (71)..(583): Homolog of NCBI NO: 13591997 NR Description: methylmalonate semialdehyde dehydrogenase gene
  misc_feature (69)..(582): Homolog of NCBI NO: 17533151 NR Description: Methylmalonate-semialdehyde dehydrogenase (56.5
  misc_feature (71)..(583): Homolog of NCBI NO: 19527258 NR Description: RIKEN cDNA 1110038I05 [Mus musculus]
  misc_feature (71)..(583): Homolog of NCBI NO: 11095441 NR Description: aldehyde dehydrogenase 6A1 precursor
  misc_feature (207)..(586): Homolog of NCBI NO: 30144414 NR Description: methylmalonate semialdehyde dehydrogenase
  misc_feature (76)..(586): Homolog of NCBI NO: 15225601 NR Description: putative methylmalonate semi-aldehyde
  misc_feature (50)..(586): Homolog of NCBI NO: 7431455 NR Description: probable methylmalonate-semialdehyde
ARDHYLEHPNRKTHEPNKPLPPGGSSSDAKPLRAPIRKRRRRRSTGRRPMLRSALFRSAPGLRRSPATAHLSTAAAAAAAWLSNGPASAPSRVRLLIGGEFVESRADEHVDVTNPATQEVVSRIPLTTADEFKAAVDAARTAFPGWRNTPVTTRQRVMFKFQELIRANMDKLAENITTEQGKTLKDAWGDVFRGLEVVEHACGMGTLQMGEYVSNVSNGIDTFSIREPLGVCAGICPFNFPAMIPLWMFPIAVTCGNTFVLKPSEKDPGAAMMLAELAMEAGLPKGVLNIVHGTNDVVNNICDDEDIKAVSFVGSNTAGMHIYSRASAAGKRVQCNMGAKNHAIILPDADRDATLNALIAAGFGAAGQRCMALSTAVFVGGSESWEDELVKRASGLVVSSGMVNDVDLGPVISRQAKDRICKLVQSGVDSGARILLDGRKIVVPRYEDGNFVGPTILADVKSDMECYKEEIFGPVLLLMKAESLEDAIQIINRNKYGNGASIFTTSGVSARKFQTDIEAGQVGINVPIPVPLPFFSFTGSKASFAGDLNFYGKAGVQFFTQIKTITQQWKESPVQRVSLSMPTSQK

SEQ ID NO: 18752 - protein, 537 aa, Zea mays subsp. mays
  peptide (1)..(537): Ceres Seq. ID no. 12418835
  misc_feature (158)..(537): Homolog of NCBI NO: 30144414 NR Description: methylmalonate semialdehyde dehydrogenase
  misc_feature (27)..(537): Homolog of NCBI NO: 15225601 NR Description: putative methylmalonate semi-aldehyde
  misc_feature (1)..(537): Homolog of NCBI NO: 7431455 NR Description: probable methylmalonate-semialdehyde
  misc_feature (38)..(534): Homolog of NCBI NO: 24638876 NR Description: CG17896-PB [Drosophila melanogaster]
  misc_feature (15)..(534): Homolog of NCBI NO: 7431479 NR Description: methylmalonate-semialdehyde dehydrogenase
  misc_feature (22)..(534): Homolog of NCBI NO: 23271115 NR Description: RIKEN cDNA 1110038I05 gene [Mus musculus]
  misc_feature (22)..(534): Homolog of NCBI NO: 13591997 NR Description: methylmalonate semialdehyde dehydrogenase gene
  misc_feature (20)..(533): Homolog of NCBI NO: 17533151 NR Description: Methylmalonate-semialdehyde dehydrogenase (56.5
  misc_feature (22)..(534): Homolog of NCBI NO: 19527258 NR Description: RIKEN cDNA 1110038I05 [Mus musculus]
  misc_feature (22)..(534): Homolog of NCBI NO: 11095441 NR Description: aldehyde dehydrogenase 6A1 precursor
MLRSALFRSAPGLRRSPATAHLSTAAAAAAAWLSNGPASAPSRVRLLIGGEFVESRADEHVDVTNPATQEVVSRIPLTTADEFKAAVDAARTAFPGWRNTPVTTRQRVMFKFQELIRANMDKLAENITTEQGKTLKDAWGDVFRGLEVVEHACGMGTLQMGEYVSNVSNGIDTFSIREPLGVCAGICPFNFPAMIPLWMFPIAVTCGNTFVLKPSEKDPGAAMMLAELAMEAGLPKGVLNIVHGTNDVVNNICDDEDIKAVSFVGSNTAGMHIYSRASAAGKRVQCNMGAKNHAIILPDADRDATLNALIAAGFGAAGQRCMALSTAVFVGGSESWEDELVKRASGLVVSSGMVNDVDLGPVISRQAKDRICKLVQSGVDSGARILLDGRKIVVPRYEDGNFVGPTILADVKSDMECYKEEIFGPVLLLMKAESLEDAIQIINRNKYGNGASIFTTSGVSARKFQTDIEAGQVGINVPIPVPLPFFSFTGSKASFAGDLNFYGKAGVQFFTQIKTITQQWKESPVQRVSLSMPTSQK

SEQ ID NO: 18753 - protein, 429 aa, Zea mays subsp. mays
  peptide (1)..(429): Ceres Seq. ID no. 12418836
  misc_feature (1)..(426): Homolog of NCBI NO: 24638876 NR Description: CG17896-PB [Drosophila melanogaster]
  misc_feature (1)..(426): Homolog of NCBI NO: 7431479 NR Description: methylmalonate-semialdehyde dehydrogenase
  misc_feature (1)..(426): Homolog of NCBI NO: 23271115 NR Description: RIKEN cDNA 1110038I05 gene [Mus musculus]
  misc_feature (1)..(426): Homolog of NCBI NO: 13591997 NR Description: methylmalonate semialdehyde dehydrogenase gene
  misc_feature (1)..(425): Homolog of NCBI NO: 17533151 NR Description: Methylmalonate-semialdehyde dehydrogenase (56.5
  misc_feature (1)..(426): Homolog of NCBI NO: 19527258 NR Description: RIKEN cDNA 1110038I05 [Mus musculus]
  misc_feature (1)..(426): Homolog of NCBI NO: 11095441 NR Description: aldehyde dehydrogenase 6A1 precursor
  misc_feature (50)..(429): Homolog of NCBI NO: 30144414 NR Description: methylmalonate semialdehyde dehydrogenase
  misc_feature (1)..(429): Homolog of NCBI NO: 15225601 NR Description: putative methylmalonate semi-aldehyde
  misc_feature (1)..(429): Homolog of NCBI NO: 7431455 NR Description: probable methylmalonate-semialdehyde
MFKFQELIRANMDKLAENITTEQGKTLKDAWGDVFRGLEVVEHACGMGTLQMGEYVSNVSNGIDTFSIREPLGVCAGICPFNFPAMIPLWMFPIAVTCGNTFVLKPSEKDPGAAMMLAELAMEAGLPKGVLNIVHGTNDVVNNICDDEDIKAVSFVGSNTAGMHIYSRASAAGKRVQCNMGAKNHAIILPDADRDATLNALIAAGFGAAGQRCMALSTAVFVGGSESWEDELVKRASGLVVSSGMVNDVDLGPVISRQAKDRICKLVQSGVDSGARILLDGRKIVVPRYEDGNFVGPTILADVKSDMECYKEEIFGPVLLLMKAESLEDAIQIINRNKYGNGASIFTTSGVSARKFQTDIEAGQVGINVPIPVPLPFFSFTGSKASFAGDLNFYGKAGVQFFTQIKTITQQWKESPVQRVSLSMPTSQK

SEQ ID NO: 18754 - DNA, 1349 bp, Zea mays subsp. mays
  misc_feature (1)..(1349): Ceres Seq. ID no. 12418584
  misc_feature: MA Experiment ID: 108527 Result: Down-regulated in Transcription
  misc_feature: MA Experiment 108527 PARAMETER Experiment Name: Zm_5mM_NO_P Parameter: Age (day) Value: 8
  misc_feature: MA Experiment 108527 PARAMETER Experiment Name: Zm_5mM_NO_P Parameter: Organism Value: Zea mays
  misc_feature: MA Experiment 108527 PARAMETER Experiment Name: Zm_5mM_NO_P Parameter: Plant Line Value: 35A19
  misc_feature: MA Experiment 108527 PARAMETER Experiment Name: Zm_5mM_NO_P Parameter: Timepoint (hr) Value: 6
  misc_feature: MA Experiment 108527 PARAMETER Experiment Name: Zm_5mM_NO_P Parameter: Tissue Value: Aerial
  misc_feature: MA Experiment 108527 PARAMETER Experiment Name: Zm_5mM_NO_P Parameter: Treatment Value: 5mM NO vs. No Treatment
  misc_feature: MA Experiment ID: 108528 Result: Up-regulated in Transcription
  misc_feature: MA Experiment 108528 PARAMETER Experiment Name: Zm_Imbibed_Seeds_P Parameter: Age (day) Value: 5 vs. 2
  misc_feature: MA Experiment 108528 PARAMETER Experiment Name: Zm_Imbibed_Seeds_P Parameter: Organism Value: Zea mays
  misc_feature: MA Experiment 108528 PARAMETER Experiment Name: Zm_Imbibed_Seeds_P Parameter: Plant Line Value: 35A19
  misc_feature: MA Experiment 108528 PARAMETER Experiment Name: Zm_Imbibed_Seeds_P Parameter: Tissue Value: Aerial vs. Embryo
  misc_feature: MA Experiment ID: 108530 Result: Up-regulated in Transcription
  misc_feature: MA Experiment 108530 PARAMETER Experiment Name: Zm_Imbibed_Seeds_P Parameter: Age (day) Value: 6 vs. 2
  misc_feature: MA Experiment 108530 PARAMETER Experiment Name: Zm_Imbibed_Seeds_P Parameter: Organism Value: Zea mays
  misc_feature: MA Experiment 108530 PARAMETER Experiment Name: Zm_Imbibed_Seeds_P Parameter: Plant Line Value: 35A19
  misc_feature: MA Experiment 108530 PARAMETER Experiment Name: Zm_Imbibed_Seeds_P Parameter: Tissue Value: Aerial vs. Embryo
  misc_feature: MA Experiment ID: 108545 Result: Up-regulated in Transcription
  misc_feature: MA Experiment 108545 PARAMETER Experiment Name: Zm_Imbibed_Seeds_P Parameter: Age (day) Value: 3 vs. 2
  misc_feature: MA Experiment 108545 PARAMETER Experiment Name: Zm_Imbibed_Seeds_P Parameter: Organism Value: Zea mays
  misc_feature: MA Experiment 108545 PARAMETER Experiment Name: Zm_Imbibed_Seeds_P Parameter: Plant Line Value: 35A19
  misc_feature: MA Experiment 108545 PARAMETER Experiment Name: Zm_Imbibed_Seeds_P Parameter: Tissue Value: Aerial vs. Embryo
  misc_feature: MA Experiment ID: 108547 Result: Up-regulated in Transcription
  misc_feature: MA Experiment 108547 PARAMETER Experiment Name: Zm_Imbibed_Seeds_P Parameter: Age (day) Value: 4 vs. 2
  misc_feature: MA Experiment 108547 PARAMETER Experiment Name: Zm_Imbibed_Seeds_P Parameter: Organism Value: Zea mays
  misc_feature: MA Experiment 108547 PARAMETER Experiment Name: Zm_Imbibed_Seeds_P Parameter: Plant Line Value: 35A19
  misc_feature: MA Experiment 108547 PARAMETER Experiment Name: Zm_Imbibed_Seeds_P Parameter: Tissue Value: Aerial vs. Embryo
  misc_feature: MA Experiment ID: 108559 Result: Down-regulated in Transcription
  misc_feature: MA Experiment 108559 PARAMETER Experiment Name: Zm_5mM_NO_P Parameter: Age (day) Value: 8
  misc_feature: MA Experiment 108559 PARAMETER Experiment Name: Zm_5mM_NO_P Parameter: Organism Value: Zea mays
  misc_feature: MA Experiment 108559 PARAMETER Experiment Name: Zm_5mM_NO_P Parameter: Plant Line Value: 35A19
  misc_feature: MA Experiment 108559 PARAMETER Experiment Name: Zm_5mM_NO_P Parameter: Timepoint (hr) Value: 12
  misc_feature: MA Experiment 108559 PARAMETER Experiment Name: Zm_5mM_NO_P Parameter: Tissue Value: Aerial
  misc_feature: MA Experiment 108559 PARAMETER Experiment Name: Zm_5mM_NO_P Parameter: Treatment Value: 5mM NO vs. No Treatment
  misc_feature: MA Experiment ID: 20000534 Result: Down-regulated in Transcription
  misc_feature: MA Experiment 20000534 PARAMETER Experiment Name: Zm_Hybrid_Pollen_P Parameter: Age (day) Value: 8
  misc_feature: MA Experiment 20000534 PARAMETER Experiment Name: Zm_Hybrid_Pollen_P Parameter: Organism Value: Zea mays
  misc_feature: MA Experiment 20000534 PARAMETER Experiment Name: Zm_Hybrid_Pollen_P Parameter: Plant Line Value: 35A19
  misc_feature: MA Experiment 20000534 PARAMETER Experiment Name: Zm_Hybrid_Pollen_P Parameter: Tissue Value: Pollen vs. Aerial
gcacgagaccattacctagaacatcctaatcgaaaaataggcgccggctgagcgaggtcttcatctgcgcttcaccagcgacgattatccactagtttgggttgcctcctgctgattgctaggtaggggagcatccgatcatgtcgagcgcggcggtgaacgggctgtccggcgccggcggcggcatcatcgcgcagatcatcacctaccctctccaaaccgtgaacacccggcagcagacggagaggtcagcgaagaagaggaaggccaggagcggctccagcgccaccccagcctccaccatgtaccagatgctccagctgattcaaaccgaaggatggagtgggttgtacagcggcctcaagccctctctcatcggcactgccgcgtcgcagggaatctattactacttctaccagatcctcaagaacaaggtggaagatatagcggttgctcgtagcaagaagggccttggggatggtactgtcgggatgctttcttggcttggtattgcagctgttgctgggtcaatcaatgttcttctaaccaatccaatatgggttcttgtgacacgtatgcagacacatactcaagcgaaaagaaaaatattggagtctaagagggagcttttactgaaagaaatgtctagggcgaattcgttggaggttgcaattctgaaggataggctggttaaattggagtcagaaaaacctcgtccatatggtactcttcaagcgatccaggaggtttaccatgagtctggtataagaggattttggaaagggcttattccaacattaatcatggtatgtaatccatcgattcagttcatgatctatgaaacattggcaaagcgtctgcagtcaaagcgttctggaaagcagctaccaaaaaggcacctcacagctatggaggtttttttattgggtgcattagcaaaacttggagctactttagtcacctatccattgctagtcgtgaagtcaaggttgcaggcaaaacaagaaattggcagcaatgtgatgtccagatacacgggtacaatagatgcgataataaagatggtttcgctacgaaggactacacgggttttacaaaggaatgggcacaaagattgtacaaagtgtctttgctgcctcggttctctttatggttaaagaggaattggtcaagttagcagtgcttttagttgggagtagtaggactattcttattactacatccaagaaacaataggtggtcgtgtatttgggagaaaagttctttttttttttttgcctcaacttgtaatgtatagggtcccattatacatatcctgttcaagatcaatatgaaattntttactggtt

SEQ ID NO: 18755 - protein, 338 aa, Zea mays subsp. mays
  peptide (1)..(338): Ceres Seq. ID no. 12418585
  misc_feature (7)..(152): Homolog of NCBI NO: 32404402 NR Description: hypothetical protein [Neurospora crassa]
  misc_feature (187)..(307): Homolog of NCBI NO: 40739628 NR Description: hypothetical protein AN4280.2 [Aspergillus
  misc_feature (2)..(153): Homolog of NCBI NO: 40739628 NR Description: hypothetical protein AN4280.2 [Aspergillus
  misc_feature (173)..(308): Homolog of NCBI NO: 28828484 NR Description: hypothetical protein [Dictyostelium discoideum]
  misc_feature (1)..(150): Homolog of NCBI NO: 28828484 NR Description: hypothetical protein [Dictyostelium discoideum]
  misc_feature (186)..(309): Homolog of NCBI NO: 15225602 NR Description: 36kDa-peroxisomal membrane protein (PMP36)
  misc_feature (186)..(309): Homolog of NCBI NO: 21593883 NR Description: putative peroxisomal membrane carrier protein
  misc_feature (1)..(247): Homolog of NCBI NO: 15225602 NR Description: 36kDa-peroxisomal membrane protein (PMP36)
  misc_feature (1)..(247): Homolog of NCBI NO: 21593883 NR Description: putative peroxisomal membrane carrier protein
  misc_feature (1)..(309): Homolog of NCBI NO: 34901996 NR Description: unknown protein [Oryza sativa (japonica
MSSAAVNGLSGAGGGIIAQIITYPLQTVNTRQQTERSAKKRKARSGSSATPASTMYQMLQLIQTEGWSGLYSGLKPSLIGTAASQGIYYYFYQILKNKVEDIAVARSKKGLGDGTVGMLSWLGIAAVAGSINVLLTNPIWVLVTRMQTHTQAKRKILESKRELLLKEMSRANSLEVAILKDRLVKLESEKPRPYGTLQAIQEVYHESGIRGFWKGLIPTLIMVCNPSIQFMIYETLAKRLQSKRSGKQLPKRHLTAMEVFLLGALAKLGATLVTYPLLVVKSRLQAKQEIGSNVMSRYTGTIDAIIKMVSLRRTTRVLQRNGHKDCTKCLCCLGSLYG

SEQ ID NO: 18756 - protein, 284 aa, Zea mays subsp. mays
  peptide (1)..(284): Ceres Seq. ID no. 12418586
  misc_feature (1)..(98): Homolog of NCBI NO: 32404402 NR Description: hypothetical protein [Neurospora crassa]
  misc_feature (133)..(253): Homolog of NCBI NO: 40739628 NR Description: hypothetical protein AN4280.2 [Aspergillus
  misc_feature (1)..(99): Homolog of NCBI NO: 40739628 NR Description: hypothetical protein AN4280.2 [Aspergillus
  misc_feature (119)..(254): Homolog of NCBI NO: 28828484 NR Description: hypothetical protein [Dictyostelium discoideum]
  misc_feature (1)..(96): Homolog of NCBI NO: 28828484 NR Description: hypothetical protein [Dictyostelium discoideum]
  misc_feature (132)..(255): Homolog of NCBI NO: 15225602 NR Description: 36kDa-peroxisomal membrane protein (PMP36)
  misc_feature (132)..(255): Homolog of NCBI NO: 21593883 NR Description: putative peroxisomal membrane carrier protein
  misc_feature (1)..(193): Homolog of NCBI NO: 15225602 NR Description: 36kDa-peroxisomal membrane protein (PMP36)
  misc_feature (1)..(193): Homolog of NCBI NO: 21593883 NR Description: putative peroxisomal membrane carrier protein
  misc_feature (1)..(255): Homolog of NCBI NO: 34901996 NR Description: unknown protein [Oryza sativa (japonica
MYQMLQLIQTEGWSGLYSGLKPSLIGTAASQGIYYYFYQILKNKVEDIAVARSKKGLGDGTVGMLSWLGIAAVAGSINVLLTNPIWVLVTRMQTHTQAKRKILESKRELLLKEMSRANSLEVAILKDRLVKLESEKPRPYGTLQAIQEVYHESGIRGFWKGLIPTLIMVCNPSIQFMIYETLAKRLQSKRSGKQLPKRHLTAMEVFLLGALAKLGATLVTYPLLVVKSRLQAKQEIGSNVMSRYTGTIDAIIKMVSLRRTTRVLQRNGHKDCTKCLCCLGSLYG

SEQ ID NO: 18757 - protein, 281 aa, Zea mays subsp. mays
  peptide (1)..(281): Ceres Seq. ID no. 12418587
  misc_feature (1)..(95): Homolog of NCBI NO: 32404402 NR Description: hypothetical protein [Neurospora crassa]
  misc_feature (130)..(250): Homolog of NCBI NO: 40739628 NR Description: hypothetical protein AN4280.2 [Aspergillus
  misc_feature (1)..(96): Homolog of NCBI NO: 40739628 NR Description: hypothetical protein AN4280.2 [Aspergillus
  misc_feature (116)..(251): Homolog of NCBI NO: 28828484 NR Description: hypothetical protein [Dictyostelium discoideum]
  misc_feature (1)..(93): Homolog of NCBI NO: 28828484 NR Description: hypothetical protein [Dictyostelium discoideum]
  misc_feature (129)..(252): Homolog of NCBI NO: 15225602 NR Description: 36kDa-peroxisomal membrane protein (PMP36)
  misc_feature (129)..(252): Homolog of NCBI NO: 21593883 NR Description: putative peroxisomal membrane carrier protein
  misc_feature (1)..(190): Homolog of NCBI NO: 15225602 NR Description: 36kDa-peroxisomal membrane protein (PMP36)
  misc_feature (1)..(190): Homolog of NCBI NO: 21593883 NR Description: putative peroxisomal membrane carrier protein
  misc_feature (1)..(252): Homolog of NCBI NO: 34901996 NR Description: unknown protein [Oryza sativa (japonica
MLQLIQTEGWSGLYSGLKPSLIGTAASQGIYYYFYQILKNKVEDIAVARSKKGLGDGTVGMLSWLGIAAVAGSINVLLTNPIWVLVTRMQTHTQAKRKILESKRELLLKEMSRANSLEVAILKDRLVKLESEKPRPYGTLQAIQEVYHESGIRGFWKGLIPTLIMVCNPSIQFMIYETLAKRLQSKRSGKQLPKRHLTAMEVFLLGALAKLGATLVTYPLLVVKSRLQAKQEIGSNVMSRYTGTIDAIIKMVSLRRTTRVLQRNGHKDCTKCLCCLGSLYG

SEQ ID NO: 18758 - DNA, 1333 bp, Zea mays subsp. mays
  misc_feature (1)..(1333): Ceres Seq. ID no. 12425320
  misc_feature: MA Experiment ID: 108522 Result: Down-regulated in Transcription
  misc_feature: MA Experiment 108522 PARAMETER Experiment Name: Zm_42deg_Heat_P Parameter: Age (day) Value: 8
  misc_feature: MA Experiment 108522 PARAMETER Experiment Name: Zm_42deg_Heat_P Parameter: Organism Value: Zea mays
  misc_feature: MA Experiment 108522 PARAMETER Experiment Name: Zm_42deg_Heat_P Parameter: Plant Line Value: 35A19
  misc_feature: MA Experiment 108522 PARAMETER Experiment Name: Zm_42deg_Heat_P Parameter: Temperature (deg C) Value: 42 vs. 22
  misc_feature: MA Experiment 108522 PARAMETER Experiment Name: Zm_42deg_Heat_P Parameter: Timepoint (hr) Value: 1
  misc_feature: MA Experiment 108522 PARAMETER Experiment Name: Zm_42deg_Heat_P Parameter: Tissue Value: Aerial
  misc_feature: MA Experiment ID: 108543 Result: Down-regulated in Transcription
  misc_feature: MA Experiment ID: 108689 Result: Down-regulated in Transcription
  misc_feature: MA Experiment 108689 PARAMETER Experiment Name: Zm_Drought_Roots_P Parameter: Age (day) Value: 9
  misc_feature: MA Experiment 108689 PARAMETER Experiment Name: Zm_Drought_Roots_P Parameter: Organism Value: Zea mays
  misc_feature: MA Experiment 108689 PARAMETER Experiment Name: Zm_Drought_Roots_P Parameter: Plant Line Value: 35A19
  misc_feature: MA Experiment 108689 PARAMETER Experiment Name: Zm_Drought_Roots_P Parameter: Timepoint (hr) Value: 24
  misc_feature: MA Experiment 108689 PARAMETER Experiment Name: Zm_Drought_Roots_P Parameter: Tissue Value: Roots
  misc_feature: MA Experiment 108689 PARAMETER Experiment Name: Zm_Drought_Roots_P Parameter: Treatment Value: Drought vs. No Drought
  misc_feature: MA Experiment ID: 20000487 Result: Up-regulated in Transcription
  misc_feature: MA Experiment 20000487 PARAMETER Experiment Name: Zm_50mM_NH4NO3_L_to_H_P Parameter: Organism Value: Zea mays
  misc_feature: MA Experiment 20000487 PARAMETER Experiment Name: Zm_50mM_NH4NO3_L_to_H_P Parameter: Timepoint (hr) Value: 4
  misc_feature: MA Experiment 20000487 PARAMETER Experiment Name: Zm_50mM_NH4NO3_L_to_H_P Parameter: Tissue Value: Leaves
  misc_feature: MA Experiment 20000487 PARAMETER Experiment Name: Zm_50mM_NH4NO3_L_to_H_P Parameter: Treatment Value: 50mM NH4NO3 vs. 100mM Mannitol
  misc_feature: MA Experiment ID: 20000488 Result: Up-regulated in Transcription
  misc_feature: MA Experiment 20000488 PARAMETER Experiment Name: Zm_50mM_NH4NO3_L_to_H_P Parameter: Organism Value: Zea mays
  misc_feature: MA Experiment 20000488 PARAMETER Experiment Name: Zm_50mM_NH4NO3_L_to_H_P Parameter: Timepoint (hr) Value: 8
  misc_feature: MA Experiment 20000488 PARAMETER Experiment Name: Zm_50mM_NH4NO3_L_to_H_P Parameter: Tissue Value: Leaves
  misc_feature: MA Experiment 20000488 PARAMETER Experiment Name: Zm_50mM_NH4NO3_L_to_H_P Parameter: Treatment Value: 50mM NH4NO3 vs. 100mM Mannitol
  misc_feature: MA Experiment ID: 20000492 Result: Up-regulated in Transcription
  misc_feature: MA Experiment 20000492 PARAMETER Experiment Name: Zm_Hybrid_Seed_Dev_P Parameter: DAP Value: 12
  misc_feature: MA Experiment 20000492 PARAMETER Experiment Name: Zm_Hybrid_Seed_Dev_P Parameter: Organism Value: Zea mays
  misc_feature: MA Experiment 20000492 PARAMETER Experiment Name: Zm_Hybrid_Seed_Dev_P Parameter: Plant Line Value: 35A19
  misc_feature: MA Experiment 20000492 PARAMETER Experiment Name: Zm_Hybrid_Seed_Dev_P Parameter: Tissue Value: Fert Kernel vs. Unfert Floret
  misc_feature: MA Experiment ID: 20000626 Result: Up-regulated in Transcription
  misc_feature: MA Experiment 20000626 PARAMETER Experiment Name: Zm_Herbicide-Treatments_P Parameter: Timepoint (hr) Value: 12
  misc_feature: MA Experiment 20000626 PARAMETER Experiment Name: Zm_Herbicide-Treatments_P Parameter: Tissue Value: Aerial
  misc_feature: MA Experiment 20000626 PARAMETER Experiment Name: Zm_Herbicide-Treatments_P Parameter: Treatment Value: Roundup vs. No Treatment
  misc_feature: MA Experiment ID: 20001606 Result: Up-regulated in Transcription
  misc_feature: MA Experiment 20001606 PARAMETER Experiment Name: Zm_50ppm_KNO3_L-to-H_P Parameter: Age (day) Value: 19
  misc_feature: MA Experiment 20001606 PARAMETER Experiment Name: Zm_50ppm_KNO3_L-to-H_P Parameter: Organism Value: Zea mays
  misc_feature: MA Experiment 20001606 PARAMETER Experiment Name: Zm_50ppm_KNO3_L-to-H_P Parameter: Plant Line Value: 35A19
  misc_feature: MA Experiment 20001606 PARAMETER Experiment Name: Zm_50ppm_KNO3_L-to-H_P Parameter: Timepoint (hr) Value: 8
  misc_feature: MA Experiment 20001606 PARAMETER Experiment Name: Zm_50ppm_KNO3_L-to-H_P Parameter: Tissue Value: Shoots
  misc_feature: MA Experiment 20001606 PARAMETER Experiment Name: Zm_50ppm_KNO3_L-to-H_P Parameter: Treatment Value: 50ppm KNO3 vs. 50ppm KCl
gccgcacgccggggctcaatctgctccgattccctccagcctttgtttcctccatcccccgcgtcaatcctgcagcctcctgctcgcgcgcttactgtagccgcagctttctccacccttggcaatggaggccgcgatcgctcacgctccatctgctccggtcctgcgccgctcgcgtagcctcaaccccacgcccgccgtccggccgcacccaaaaccctggcagggggtgctttcggcgaggcacccgtcgaacgccgtcaggtgcgagccgtcccagcgcccagaggcgcgcccgcgcctgcgcgcggcgcagccggctggtgctgacgcggcggccgggaggaagcggctggcagtgttcgtgtccggagggggatcaaacttccgggcgatccatgaggccgcgctgggcggtgccgtgcacggagatgtcgtcgcgcttgtcaccgacaagccaggtgaaggaaactgcatcccgcgacgctacccacattgttagcggaggctaaaactgcaataactacattgcaggttgtggtggcgcggaatatgctaggagcaatgacatccctgtgctcgtatttcccaagtccaagtntgcgcccgaggggatttcggttgctcaactgctggatactctgaggggaaacaatgtagattttgttcttcttgccggttacctgaagcttatacccactgaattgatccaggaatacccaaaatccatattaaatatccacccttctctccttccagcattcggagggaaaggtttctatggttcaaaggtgcataaagctgttattgcctctggagcaagatactcgggtccaaccgtacattttgtggatgagcactatgataccggtaaaacgttagcccagagggttgtgcctgtgttcgcagatgacacgccagagttattggctgcaagagtcctccatgaggaacatatggtctatgttgaagcagttgctgctttgtgcgaggaccgcgtcgtatggagggaagatggtgtcccacttatcaaaagtcggacaaatccagctgtgtacatctaattgacaatacggcaatagtagcactattttggagtaataatggaatttgtagagcccttgccacttttcccggtaaaaggggtacttagcagttgacgtagggttgatatacagggcacaacttatttgccaccgaaacatttccatgcgttggaagtgagaaacattgcccccaataggccgcagtatccattactgcatggaacaaggttgaaattttaccttgatttgagataactatcaaatactgcgaatgcattattcttccg

SEQ ID NO: 18759 - protein, 169 aa, Zea mays subsp. mays
  peptide (1)..(169): Ceres Seq. ID no. 12425321
  misc_feature (133)..(169): Homolog of NCBI NO: 39936115 NR Description: phosphoribosylglycinamide formyltransferase
RTPGLNLLRFPPAFVSSIPRVNPAASCSRAYCSRSFLHPWQWRPRSLTLHLLRSCAARVASTPRPPSGRTQNPGRGCFRRGTRRTPSGASRPSAQRRARACARRSRLVLTRRPGGSGWQCSCPEGDQTSGRSMRPRWAVPCTEMSSRLSPTSQVKETASRDATHIVSGG

SEQ ID NO: 18760 - protein, 125 aa, Zea mays subsp. mays
  peptide (1)..(125): Ceres Seq. ID no. 12425322
  misc_feature (32)..(111): Homolog of NCBI NO: 15221650 NR Description: putative phosphoribosylglycinamide
  misc_feature (1)..(111): Homolog of NCBI NO: 7433568 NR Description: phosphoribosylglycinamide formyltransferase (EC
  misc_feature (1)..(111): Homolog of NCBI NO: 12644307 NR Description: Phosphoribosylglycinamide formyltransferase, precursor (GART) (GAR transformylase)
MEAAIAHAPSAPVLRRSRSLNPTPAVRPHPKPWQGVLSARHPSNAVRCEPSQRPEARPRLRAAQPAGADAAAGRKRLAVFVSGGGSNFRAIHEAALGGAVHGDVVALVTDKPGEGNCIPRRYPHC

SEQ ID NO: 18761 - DNA, 1231 bp, Zea mays subsp. mays
  misc_feature (1)..(1231): Ceres Seq. ID no. 12388992
  misc_feature: MA Experiment ID: 108527 Result: Up-regulated in Transcription
  misc_feature: MA Experiment 108527 PARAMETER Experiment Name: Zm_5mM_NO_P Parameter: Age (day) Value: 8
  misc_feature: MA Experiment 108527 PARAMETER Experiment Name: Zm_5mM_NO_P Parameter: Organism Value: Zea mays
  misc_feature: MA Experiment 108527 PARAMETER Experiment Name: Zm_5mM_NO_P Parameter: Plant Line Value: 35A19
  misc_feature: MA Experiment 108527 PARAMETER Experiment Name: Zm_5mM_NO_P Parameter: Timepoint (hr) Value: 6
  misc_feature: MA Experiment 108527 PARAMETER Experiment Name: Zm_5mM_NO_P Parameter: Tissue Value: Aerial
  misc_feature: MA Experiment 108527 PARAMETER Experiment Name: Zm_5mM_NO_P Parameter: Treatment Value: 5mM NO vs. No Treatment
  misc_feature: MA Experiment ID: 108528 Result: Down-regulated in Transcription
  misc_feature: MA Experiment 108528 PARAMETER Experiment Name: Zm_Imbibed_Seeds_P Parameter: Age (day) Value: 5 vs. 2
  misc_feature: MA Experiment 108528 PARAMETER Experiment Name: Zm_Imbibed_Seeds_P Parameter: Organism Value: Zea mays
  misc_feature: MA Experiment 108528 PARAMETER Experiment Name: Zm_Imbibed_Seeds_P Parameter: Plant Line Value: 35A19
  misc_feature: MA Experiment 108528 PARAMETER Experiment Name: Zm_Imbibed_Seeds_P Parameter: Tissue Value: Aerial vs. Embryo
  misc_feature: MA Experiment ID: 108529 Result: Up-regulated in Transcription
  misc_feature: MA Experiment 108529 PARAMETER Experiment Name: Zm_Imbibed_Seeds_P Parameter: Age (day) Value: 5 vs. 2
  misc_feature: MA Experiment 108529 PARAMETER Experiment Name: Zm_Imbibed_Seeds_P Parameter: Organism Value: Zea mays
  misc_feature: MA Experiment 108529 PARAMETER Experiment Name: Zm_Imbibed_Seeds_P Parameter: Plant Line Value: 35A19
  misc_feature: MA Experiment 108529 PARAMETER Experiment Name: Zm_Imbibed_Seeds_P Parameter: Tissue Value: Roots vs. Embryo
  misc_feature: MA Experiment ID: 108533 Result: Up-regulated in Transcription
  misc_feature: MA Experiment 108533 PARAMETER Experiment Name: Zm_4deg_Cold_P Parameter: Age (hr) Value: 8
  misc_feature: MA Experiment 108533 PARAMETER Experiment Name: Zm_4deg_Cold_P Parameter: Organism Value: Zea mays
  misc_feature: MA Experiment 108533 PARAMETER Experiment Name: Zm_4deg_Cold_P Parameter: Plant Line Value: 35A19
  misc_feature: MA Experiment 108533 PARAMETER Experiment Name: Zm_4deg_Cold_P Parameter: Temperature (deg C) Value: 4 vs. 22
  misc_feature: MA Experiment 108533 PARAMETER Experiment Name: Zm_4deg_Cold_P Parameter: Timepoint (hr) Value: 1
  misc_feature: MA Experiment 108533 PARAMETER Experiment Name: Zm_4deg_Cold_P Parameter: Tissue Value: Aerial
  misc_feature: MA Experiment ID: 108534 Result: Up-regulated in Transcription
  misc_feature: MA Experiment 108534 PARAMETER Experiment Name: Zm_4deg_Cold_P Parameter: Age (hr) Value: 8
  misc_feature: MA Experiment 108534 PARAMETER Experiment Name: Zm_4deg_Cold_P Parameter: Organism Value: Zea mays
  misc_feature: MA Experiment 108534 PARAMETER Experiment Name: Zm_4deg_Cold_P Parameter: Plant Line Value: 35A19
  misc_feature: MA Experiment 108534 PARAMETER Experiment Name: Zm_4deg_Cold_P Parameter: Temperature (deg C) Value: 4 vs. 22
  misc_feature: MA Experiment 108534 PARAMETER Experiment Name: Zm_4deg_Cold_P Parameter: Timepoint (hr) Value: 6
  misc_feature: MA Experiment 108534 PARAMETER Experiment Name: Zm_4deg_Cold_P Parameter: Tissue Value: Aerial
  misc_feature: MA Experiment ID: 108535 Result: Down-regulated in Transcription
  misc_feature: MA Experiment 108535 PARAMETER Experiment Name: Zm_Meristem_P Parameter: Age (day) Value: 8
  misc_feature: MA Experiment 108535 PARAMETER Experiment Name: Zm_Meristem_P Parameter: Organism Value: Zea mays
  misc_feature: MA Experiment 108535 PARAMETER Experiment Name: Zm_Meristem_P Parameter: Plant Line Value: 35A19
  misc_feature: MA Experiment 108535 PARAMETER Experiment Name: Zm_Meristem_P Parameter: Tissue Value: Root Meristem vs. Above Root Meristem
  misc_feature: MA Experiment ID: 108536 Result: Up-regulated in Transcription
  misc_feature: MA Experiment 108536 PARAMETER Experiment Name: Zm_Meristem_P Parameter: Age (day) Value: 8
  misc_feature: MA Experiment 108536 PARAMETER Experiment Name: Zm_Meristem_P Parameter: Organism Value: Zea mays
  misc_feature: MA Experiment 108536 PARAMETER Experiment Name: Zm_Meristem_P Parameter: Plant Line Value: 35A19
  misc_feature: MA Experiment 108536 PARAMETER Experiment Name: Zm_Meristem_P Parameter: Tissue Value: Shoot Meristem vs. Above Shoot Meristem
  misc_feature: MA Experiment ID: 108543 Result: Up-regulated in Transcription
  misc_feature: MA Experiment ID: 108545 Result: Down-regulated in Transcription
  misc_feature: MA Experiment 108545 PARAMETER Experiment Name: Zm_Imbibed_Seeds_P Parameter: Age (day) Value: 3 vs. 2
  misc_feature: MA Experiment 108545 PARAMETER Experiment Name: Zm_Imbibed_Seeds_P Parameter: Organism Value: Zea mays
  misc_feature: MA Experiment 108545 PARAMETER Experiment Name: Zm_Imbibed_Seeds_P Parameter: Plant Line Value: 35A19
  misc_feature: MA Experiment 108545 PARAMETER Experiment Name: Zm_Imbibed_Seeds_P Parameter: Tissue Value: Aerial vs. Embryo
  misc_feature: MA Experiment ID: 108687 Result: Up-regulated in Transcription
  misc_feature: MA Experiment 108687 PARAMETER Experiment Name: Zm_Embryos-Flowers__P Parameter: Tissue Value: Embryo vs. Aerial+
  misc_feature: MA Experiment ID: 108689 Result: Down-regulated in Transcription
  misc_feature: MA Experiment 108689 PARAMETER Experiment Name: Zm_Drought_Roots_P Parameter: Age (day) Value: 9
  misc_feature: MA Experiment 108689 PARAMETER Experiment Name: Zm_Drought_Roots_P Parameter: Organism Value: Zea mays
  misc_feature: MA Experiment 108689 PARAMETER Experiment Name: Zm_Drought_Roots_P Parameter: Plant Line Value: 35A19
  misc_feature: MA Experiment 108689 PARAMETER Experiment Name: Zm_Drought_Roots_P Parameter: Timepoint (hr) Value: 24
  misc_feature: MA Experiment 108689 PARAMETER Experiment Name: Zm_Drought_Roots_P Parameter: Tissue Value: Roots
  misc_feature: MA Experiment 108689 PARAMETER Experiment Name: Zm_Drought_Roots_P Parameter: Treatment Value: Drought vs. No Drought
  misc_feature: MA Experiment ID: 20000630 Result: Up-regulated in Transcription
  misc_feature: MA Experiment 20000630 PARAMETER Experiment Name: Zm_Herbicide-Treatments_P Parameter: Timepoint (hr) Value: 4
  misc_feature: MA Experiment 20000630 PARAMETER Experiment Name: Zm_Herbicide-Treatments_P Parameter: Tissue Value: Aerial
  misc_feature: MA Experiment 20000630 PARAMETER Experiment Name: Zm_Herbicide-Treatments_P Parameter: Treatment Value: Roundup vs. No Treatment
  misc_feature: MA Experiment ID: 20001608 Result: Down-regulated in Transcription
  misc_feature: MA Experiment 20001608 PARAMETER Experiment Name: Zm_50ppm_KNO3_L-to-H_P Parameter: Age (day) Value: 21
  misc_feature: MA Experiment 20001608 PARAMETER Experiment Name: Zm_50ppm_KNO3_L-to-H_P Parameter: Organism Value: Zea mays
  misc_feature: MA Experiment 20001608 PARAMETER Experiment Name: Zm_50ppm_KNO3_L-to-H_P Parameter: Plant Line Value: 35A19
  misc_feature: MA Experiment 20001608 PARAMETER Experiment Name: Zm_50ppm_KNO3_L-to-H_P Parameter: Timepoint (hr) Value: 48
  misc_feature: MA Experiment 20001608 PARAMETER Experiment Name: Zm_50ppm_KNO3_L-to-H_P Parameter: Tissue Value: Shoots
  misc_feature: MA Experiment 20001608 PARAMETER Experiment Name: Zm_50ppm_KNO3_L-to-H_P Parameter: Treatment Value: 50ppm KNO3 vs. 50ppm KCl
aggctctagttccaacctccacctgcgccgcccgatagcaaaacgcagcgacctcgccccccctgccccgctcctccccttttcccggtagcagagacggagcaccgcagcccgccagaaaggaagacgaaacgcgccgcggcgcaacgcaccgcgtgctagtgaaagggcgcagcggaaggccgccgccgcgctgctatttagacaggaagcggggcgatcgaatcgcgtctctcaaccaatcgataaatctgccggtaggtcgatcaaggagagcgcggtccacgtctccgttccgttccgttgcggggaaggaaggaaggagagagaggagcgatggcgtccgggtaccgcgcggaggaggagtacgactacctgttcaaggtggtgctgatcggggacagcggcgtggggaagtcgaacctgctgtcgcggttcgccagggacgagttcagcctcgagaccaggtccaccatcggcgtcgagttcgccaccaagaccgtccaggtcgacgacaagctcgtcaaggcacagatctgggacaccgccgggcaggagaggtaccgcgccatcacgagcgcatactaccgcggcgcggtgggcgcgctggtggtgtacgacgtgagccgccgcaccaccttcgacaacgcggagcgctggctgcgggagccgcgggaccacacggacgccaacatcgtggtcatgctggtgggcaacaaggccgacctgcgccacctccgcgccgtctcgcccgaggacgcggcggccttcgccgagcggcacggcaccttctccatggagacgtcggcgctggacgccaccaacgtggagcgcgccttcgccgaggtgctccgccagatctaccacgtcgtcagccggaacgcgctcgacatcggggacgaccccgccgcgccgcccaggggcaagaccatcgacgtcagcgccgccaaggacgaggtctcccctgtgaacgcgggcgggtgctgctcgtcggcttagccctggtcaaacatacgctttgctgattaaggaagacataacgtgatgacaatctttgttgacttcgtcaagcggttgggggtggttggcgctcgtgatgtgtttgcagactagcaatcgctgtcctcgattgtatttttcgggctattttttgattgatgcacttgggtgacgcacacatttacaagtggcaggttatggaccatatggggagcgatttacactgatttgg

SEQ ID NO: 18762 - protein, 220 aa, Zea mays subsp. mays
  peptide (1)..(220): Ceres Seq. ID no. 12388993
  misc_feature (16)..(176): Pfam Name: Ras family Pfam Description: Ras family
  misc_feature (1)..(218): Homolog of NCBI NO: 13195452 NR Description: GTP-binding protein [Oryza sativa]
  misc_feature (5)..(218): Homolog of NCBI NO: 15233873 NR Description: membrane-bound small GTP-binding - like protein
  misc_feature (5)..(219): Homolog of NCBI NO: 15218719 NR Description: GTP-binding protein, putative; protein id:
  misc_feature (5)..(219): Homolog of NCBI NO: 1370156 NR Description: RAB11H [Lotus japonicus]
  misc_feature (3)..(219): Homolog of NCBI NO: 15232477 NR Description: Ras family GTP-binding protein, putative; protein
  misc_feature (12)..(219): Homolog of NCBI NO: 7438389 NR Description: GTP-binding protein, ras-like (clone vfa-ypt3a) -
  misc_feature (5)..(219): Homolog of NCBI NO: 7438432 NR Description: GTP-binding protein - garden pea
  misc_feature (1)..(219): Homolog of NCBI NO: 3024504 NR Description: RAS-RELATED PROTEIN RAB11B
  misc_feature (3)..(219): Homolog of NCBI NO: 15239462 NR Description: GTP-binding protein, putative; protein id:
  misc_feature (1)..(219): Homolog of NCBI NO: 34910940 NR Description: putative GTP-binding protein
MASGYRAEEEYDYLFKVVLIGDSGVGKSNLLSRFARDEFSLETRSTIGVEFATKTVQVDDKLVKAQIWDTAGQERYRAITSAYYRGAVGALVVYDVSRRTTFDNAERWLREPRDHTDANIVVMLVGNKADLRHLRAVSPEDAAAFAERHGTFSMETSALDATNVERAFAEVLRQIYHVVSRNALDIGDDPAAPPRGKTIDVSAAKDEVSPVNAGGCCSSA

SEQ ID NO: 18763 - DNA, 1471 bp, Zea mays subsp. mays
  misc_feature (1)..(1471): Ceres Seq. ID no. 13585990
  misc_feature: MA Experiment ID: 108528 Result: Up-regulated in Transcription
  misc_feature: MA Experiment 108528 PARAMETER Experiment Name: Zm_Imbibed_Seeds_P Parameter: Age (day) Value: 5 vs. 2
  misc_feature: MA Experiment 108528 PARAMETER Experiment Name: Zm_Imbibed_Seeds_P Parameter: Organism Value: Zea mays
  misc_feature: MA Experiment 108528 PARAMETER Experiment Name: Zm_Imbibed_Seeds_P Parameter: Plant Line Value: 35A19
  misc_feature: MA Experiment 108528 PARAMETER Experiment Name: Zm_Imbibed_Seeds_P Parameter: Tissue Value: Aerial vs. Embryo
  misc_feature: MA Experiment ID: 108530 Result: Up-regulated in Transcription
  misc_feature: MA Experiment 108530 PARAMETER Experiment Name: Zm_Imbibed_Seeds_P Parameter: Age (day) Value: 6 vs. 2
  misc_feature: MA Experiment 108530 PARAMETER Experiment Name: Zm_Imbibed_Seeds_P Parameter: Organism Value: Zea mays
  misc_feature: MA Experiment 108530 PARAMETER Experiment Name: Zm_Imbibed_Seeds_P Parameter: Plant Line Value: 35A19
  misc_feature: MA Experiment 108530 PARAMETER Experiment Name: Zm_Imbibed_Seeds_P Parameter: Tissue Value: Aerial vs. Embryo
  misc_feature: MA Experiment ID: 108536 Result: Down-regulated in Transcription
  misc_feature: MA Experiment 108536 PARAMETER Experiment Name: Zm_Meristem_P Parameter: Age (day) Value: 8
  misc_feature: MA Experiment 108536 PARAMETER Experiment Name: Zm_Meristem_P Parameter: Organism Value: Zea mays
  misc_feature: MA Experiment 108536 PARAMETER Experiment Name: Zm_Meristem_P Parameter: Plant Line Value: 35A19
  misc_feature: MA Experiment 108536 PARAMETER Experiment Name: Zm_Meristem_P Parameter: Tissue Value: Shoot Meristem vs. Above Shoot Meristem
  misc_feature: MA Experiment ID: 108543 Result: Up-regulated in Transcription
  misc_feature: MA Experiment ID: 108545 Result: Up-regulated in Transcription
  misc_feature: MA Experiment 108545 PARAMETER Experiment Name: Zm_Imbibed_Seeds_P Parameter: Age (day) Value: 3 vs. 2
  misc_feature: MA Experiment 108545 PARAMETER Experiment Name: Zm_Imbibed_Seeds_P Parameter: Organism Value: Zea mays
  misc_feature: MA Experiment 108545 PARAMETER Experiment Name: Zm_Imbibed_Seeds_P Parameter: Plant Line Value: 35A19
  misc_feature: MA Experiment 108545 PARAMETER Experiment Name: Zm_Imbibed_Seeds_P Parameter: Tissue Value: Aerial vs. Embryo
  misc_feature: MA Experiment ID: 108547 Result: Up-regulated in Transcription
  misc_feature: MA Experiment 108547 PARAMETER Experiment Name: Zm_Imbibed_Seeds_P Parameter: Age (day) Value: 4 vs. 2
  misc_feature: MA Experiment 108547 PARAMETER Experiment Name: Zm_Imbibed_Seeds_P Parameter: Organism Value: Zea mays
  misc_feature: MA Experiment 108547 PARAMETER Experiment Name: Zm_Imbibed_Seeds_P Parameter: Plant Line Value: 35A19
  misc_feature: MA Experiment 108547 PARAMETER Experiment Name: Zm_Imbibed_Seeds_P Parameter: Tissue Value: Aerial vs. Embryo
  misc_feature: MA Experiment ID: 108687 Result: Down-regulated in Transcription
  misc_feature: MA Experiment 108687 PARAMETER Experiment Name: Zm_Embryos-Flowers__P Parameter: Tissue Value: Embryo vs. Aerial+
  misc_feature: MA Experiment ID: 20000535 Result: Down-regulated in Transcription
  misc_feature: MA Experiment 20000535 PARAMETER Experiment Name: Zm_Hybrid_Seed_Dev_P Parameter: DAP Value: 30 vs. 12
  misc_feature: MA Experiment 20000535 PARAMETER Experiment Name: Zm_Hybrid_Seed_Dev_P Parameter: Organism Value: Zea mays
  misc_feature: MA Experiment 20000535 PARAMETER Experiment Name: Zm_Hybrid_Seed_Dev_P Parameter: Plant Line Value: 35A19
  misc_feature: MA Experiment 20000535 PARAMETER Experiment Name: Zm_Hybrid_Seed_Dev_P Parameter: Tissue Value: Embryo vs. Unfert Floret
gattactacgatccaacagttctagagcaagagagaggaagacacaccgcagagttagcaggctaataacttgcaggagcagcaggaatggcggcgacgcgtcgcctctcttgctttctcctcgccgtgcttctggcaggagtggccgctgccaccgccttcgacgaagcggctgctgccggcttcgggcttggccacggcgcgcgtttcgcgcgcaagcatggacgtgctgccgctgagatgccccagccggagccacaacctaaaactaagccggagccccatatgcagccactgccccagccagaacctaaaccgaaacctatgccacatccagagccaaagcctgaacctcaaccaaagcccaaccctgaacctcaaccaatgcccaagcctcaaccaaaatccaaaccagagccattgcctacaccgaagcctgaacctaagcccgaacctaagccagagcctaagcccgaacctaaaataaaaccaaagccaaaacctgaaccaaaaccagagcctaagccagagcataaacctgagccaaagccagagcctaaacccaaaccgaaaccagagccaaagccagagccacaaccaaaaccagagcctaagccagagcctaaacccgaaccgaaaccggagccaaagccagagccccaacctaagccagagcctaagcctgagccgaaaccagaaccaaagccagagccacaaccaaagcctgagcctaaaccagaaccaaaaccagagccaaagccagagcctaagcccgaaccaaaaccagagccaaagcctgagcctaaacccgaaccaaggccagaacctaagccagagccaaagcctgagccgaaaccgaaaccagatccaaagccagagccacaaccaaagccagagcctaagccagaaccaaaaccagagccaaagccagagcctaagcccgaaccaaaaccagagccaaagcctgagcctaaacccgaaccaagaccagaaccagaaccaaagccagagcctaaacctgaaccaaaaccgaaaccagaaccggagccacaaccaaagccagagcctaagcctgatccaaaaccagagcctaaacccgaaccaaaaccagagccccaaccaaaaccagaacctaagcccgaaccaaaaccacagccagaacctaagcccgagcccaaaccaaagcctgaccctccacacatcccaccagcagctatcaactgaggaagtggctattaacaattattgtagtgtttaaataaaatgccatgttgcagcgtgcttttgtaggtgctgctacttgttgtatctatcctatcttttctttgtcattttttgtatgttatgctattatatgatcttagtgcagtttagcttgttccgtgtatacacgcatttatgcactcagtgggtttttgttatatgttggttgttatgtatatatgttcgctgtttcgagcagctaactaac

SEQ ID NO: 18764 - protein, 378 aa, Zea mays subsp. mays
  peptide (1)..(378): Ceres Seq. ID no. 13585991
  misc_feature (3)..(111): Pfam Name: Procyclic acidic repetitive protein (PARP) Pfam Description: Procyclic acidic repetitive protein (PARP)
  misc_feature (53)..(369): Homolog of NCBI NO: 7861746 NR Description: GABA-A receptor epsilon-like subunit [Mus
  misc_feature (53)..(369): Homolog of NCBI NO: 8393396 NR Description: gamma-aminobutyric acid (GABA-A) receptor,
  misc_feature (53)..(373): Homolog of NCBI NO: 12831207 NR Description: gamma-aminobutyric acid  A receptor, epsilon
  misc_feature (53)..(373): Homolog of NCBI NO: 11610622 NR Description: GABA-A epsilon subunit splice variant [Rattus
  misc_feature (5)..(375): Homolog of NCBI NO: 18478606 NR Description: repetitive proline rich protein [Oryza sativa]
  misc_feature (53)..(374): Homolog of NCBI NO: 29367369 NR Description: proline-rich protein [Oryza sativa (japonica
  misc_feature (11)..(370): Homolog of NCBI NO: 100798 NR Description: proline-rich protein - wheat
  misc_feature (53)..(375): Homolog of NCBI NO: 29367369 NR Description: proline-rich protein [Oryza sativa (japonica
  misc_feature (5)..(373): Homolog of NCBI NO: 29367369 NR Description: proline-rich protein [Oryza sativa (japonica
  misc_feature (1)..(378): Homolog of NCBI NO: 4138732 NR Description: proline-rich protein [Zea mays]
MAATRRLSCFLLAVLLAGVAAATAFDEAAAAGFGLGHGARFARKHGRAAAEMPQPEPQPKTKPEPHMQPLPQPEPKPKPMPHPEPKPEPQPKPNPEPQPMPKPQPKSKPEPLPTPKPEPKPEPKPEPKPEPKIKPKPKPEPKPEPKPEHKPEPKPEPKPKPKPEPKPEPQPKPEPKPEPKPEPKPEPKPEPQPKPEPKPEPKPEPKPEPQPKPEPKPEPKPEPKPEPKPEPKPEPKPEPKPEPRPEPKPEPKPEPKPKPDPKPEPQPKPEPKPEPKPEPKPEPKPEPKPEPKPEPKPEPRPEPEPKPEPKPEPKPKPEPEPQPKPEPKPDPKPEPKPEPKPEPQPKPEPKPEPKPQPEPKPEPKPKPDPPHIPPAAIN

SEQ ID NO: 18765 - protein, 327 aa, Zea mays subsp. mays
  peptide (1)..(327): Ceres Seq. ID no. 13585992
  misc_feature (1)..(60): Pfam Name: Procyclic acidic repetitive protein (PARP) Pfam Description: Procyclic acidic repetitive protein (PARP)
  misc_feature (2)..(318): Homolog of NCBI NO: 7861746 NR Description: GABA-A receptor epsilon-like subunit [Mus
  misc_feature (2)..(318): Homolog of NCBI NO: 8393396 NR Description: gamma-aminobutyric acid (GABA-A) receptor,
  misc_feature (2)..(322): Homolog of NCBI NO: 12831207 NR Description: gamma-aminobutyric acid  A receptor, epsilon
  misc_feature (2)..(322): Homolog of NCBI NO: 11610622 NR Description: GABA-A epsilon subunit splice variant [Rattus
  misc_feature (1)..(324): Homolog of NCBI NO: 18478606 NR Description: repetitive proline rich protein [Oryza sativa]
  misc_feature (2)..(323): Homolog of NCBI NO: 29367369 NR Description: proline-rich protein [Oryza sativa (japonica
  misc_feature (1)..(319): Homolog of NCBI NO: 100798 NR Description: proline-rich protein - wheat
  misc_feature (2)..(324): Homolog of NCBI NO: 29367369 NR Description: proline-rich protein [Oryza sativa (japonica
  misc_feature (1)..(322): Homolog of NCBI NO: 29367369 NR Description: proline-rich protein [Oryza sativa (japonica
  misc_feature (1)..(327): Homolog of NCBI NO: 4138732 NR Description: proline-rich protein [Zea mays]
MPQPEPQPKTKPEPHMQPLPQPEPKPKPMPHPEPKPEPQPKPNPEPQPMPKPQPKSKPEPLPTPKPEPKPEPKPEPKPEPKIKPKPKPEPKPEPKPEHKPEPKPEPKPKPKPEPKPEPQPKPEPKPEPKPEPKPEPKPEPQPKPEPKPEPKPEPKPEPQPKPEPKPEPKPEPKPEPKPEPKPEPKPEPKPEPRPEPKPEPKPEPKPKPDPKPEPQPKPEPKPEPKPEPKPEPKPEPKPEPKPEPKPEPRPEPEPKPEPKPEPKPKPEPEPQPKPEPKPDPKPEPKPEPKPEPQPKPEPKPEPKPQPEPKPEPKPKPDPPHIPPAAIN

SEQ ID NO: 18766 - protein, 312 aa, Zea mays subsp. mays
  peptide (1)..(312): Ceres Seq. ID no. 13585993
  misc_feature (5)..(291): Pfam Name: Formin Homology 2 Domain Pfam Description: Formin Homology 2 Domain
  misc_feature (1)..(308): Homolog of NCBI NO: 29367369 NR Description: proline-rich protein [Oryza sativa (japonica
  misc_feature (1)..(304): Homolog of NCBI NO: 100798 NR Description: proline-rich protein - wheat
  misc_feature (1)..(309): Homolog of NCBI NO: 29367369 NR Description: proline-rich protein [Oryza sativa (japonica
  misc_feature (1)..(303): Homolog of NCBI NO: 8393396 NR Description: gamma-aminobutyric acid (GABA-A) receptor,
  misc_feature (1)..(307): Homolog of NCBI NO: 11610622 NR Description: GABA-A epsilon subunit splice variant [Rattus
  misc_feature (1)..(309): Homolog of NCBI NO: 18478606 NR Description: repetitive proline rich protein [Oryza sativa]
  misc_feature (1)..(307): Homolog of NCBI NO: 12831207 NR Description: gamma-aminobutyric acid  A receptor, epsilon
  misc_feature (1)..(303): Homolog of NCBI NO: 7861746 NR Description: GABA-A receptor epsilon-like subunit [Mus
  misc_feature (1)..(307): Homolog of NCBI NO: 29367369 NR Description: proline-rich protein [Oryza sativa (japonica
  misc_feature (1)..(312): Homolog of NCBI NO: 4138732 NR Description: proline-rich protein [Zea mays]
MQPLPQPEPKPKPMPHPEPKPEPQPKPNPEPQPMPKPQPKSKPEPLPTPKPEPKPEPKPEPKPEPKIKPKPKPEPKPEPKPEHKPEPKPEPKPKPKPEPKPEPQPKPEPKPEPKPEPKPEPKPEPQPKPEPKPEPKPEPKPEPQPKPEPKPEPKPEPKPEPKPEPKPEPKPEPKPEPRPEPKPEPKPEPKPKPDPKPEPQPKPEPKPEPKPEPKPEPKPEPKPEPKPEPKPEPRPEPEPKPEPKPEPKPKPEPEPQPKPEPKPDPKPEPKPEPKPEPQPKPEPKPEPKPQPEPKPEPKPKPDPPHIPPAAIN

SEQ ID NO: 18767 - DNA, 1491 bp, Zea mays subsp. mays
  misc_feature (1)..(1491): Ceres Seq. ID no. 15180137
  misc_feature: MA Experiment ID: 108504 Result: Down-regulated in Transcription
  misc_feature: MA Experiment 108504 PARAMETER Experiment Name: Zm_Drought_P Parameter: Age (day) Value: 8
  misc_feature: MA Experiment 108504 PARAMETER Experiment Name: Zm_Drought_P Parameter: Organism Value: Zea mays
  misc_feature: MA Experiment 108504 PARAMETER Experiment Name: Zm_Drought_P Parameter: Plant Line Value: 35A19
  misc_feature: MA Experiment 108504 PARAMETER Experiment Name: Zm_Drought_P Parameter: Timepoint (hr) Value: 12
  misc_feature: MA Experiment 108504 PARAMETER Experiment Name: Zm_Drought_P Parameter: Tissue Value: Aerial
  misc_feature: MA Experiment 108504 PARAMETER Experiment Name: Zm_Drought_P Parameter: Treatment Value: Drought vs. No Drought
  misc_feature: MA Experiment ID: 108527 Result: Down-regulated in Transcription
  misc_feature: MA Experiment 108527 PARAMETER Experiment Name: Zm_5mM_NO_P Parameter: Age (day) Value: 8
  misc_feature: MA Experiment 108527 PARAMETER Experiment Name: Zm_5mM_NO_P Parameter: Organism Value: Zea mays
  misc_feature: MA Experiment 108527 PARAMETER Experiment Name: Zm_5mM_NO_P Parameter: Plant Line Value: 35A19
  misc_feature: MA Experiment 108527 PARAMETER Experiment Name: Zm_5mM_NO_P Parameter: Timepoint (hr) Value: 6
  misc_feature: MA Experiment 108527 PARAMETER Experiment Name: Zm_5mM_NO_P Parameter: Tissue Value: Aerial
  misc_feature: MA Experiment 108527 PARAMETER Experiment Name: Zm_5mM_NO_P Parameter: Treatment Value: 5mM NO vs. No Treatment
  misc_feature: MA Experiment ID: 108528 Result: Up-regulated in Transcription
  misc_feature: MA Experiment 108528 PARAMETER Experiment Name: Zm_Imbibed_Seeds_P Parameter: Age (day) Value: 5 vs. 2
  misc_feature: MA Experiment 108528 PARAMETER Experiment Name: Zm_Imbibed_Seeds_P Parameter: Organism Value: Zea mays
  misc_feature: MA Experiment 108528 PARAMETER Experiment Name: Zm_Imbibed_Seeds_P Parameter: Plant Line Value: 35A19
  misc_feature: MA Experiment 108528 PARAMETER Experiment Name: Zm_Imbibed_Seeds_P Parameter: Tissue Value: Aerial vs. Embryo
  misc_feature: MA Experiment ID: 108529 Result: Up-regulated in Transcription
  misc_feature: MA Experiment 108529 PARAMETER Experiment Name: Zm_Imbibed_Seeds_P Parameter: Age (day) Value: 5 vs. 2
  misc_feature: MA Experiment 108529 PARAMETER Experiment Name: Zm_Imbibed_Seeds_P Parameter: Organism Value: Zea mays
  misc_feature: MA Experiment 108529 PARAMETER Experiment Name: Zm_Imbibed_Seeds_P Parameter: Plant Line Value: 35A19
  misc_feature: MA Experiment 108529 PARAMETER Experiment Name: Zm_Imbibed_Seeds_P Parameter: Tissue Value: Roots vs. Embryo
  misc_feature: MA Experiment ID: 108535 Result: Down-regulated in Transcription
  misc_feature: MA Experiment 108535 PARAMETER Experiment Name: Zm_Meristem_P Parameter: Age (day) Value: 8
  misc_feature: MA Experiment 108535 PARAMETER Experiment Name: Zm_Meristem_P Parameter: Organism Value: Zea mays
  misc_feature: MA Experiment 108535 PARAMETER Experiment Name: Zm_Meristem_P Parameter: Plant Line Value: 35A19
  misc_feature: MA Experiment 108535 PARAMETER Experiment Name: Zm_Meristem_P Parameter: Tissue Value: Root Meristem vs. Above Root Meristem
  misc_feature: MA Experiment ID: 108540 Result: Down-regulated in Transcription
  misc_feature: MA Experiment 108540 PARAMETER Experiment Name: Zm_20percent_PEG_P Parameter: Age (day) Value: 8
  misc_feature: MA Experiment 108540 PARAMETER Experiment Name: Zm_20percent_PEG_P Parameter: Organism Value: Zea mays
  misc_feature: MA Experiment 108540 PARAMETER Experiment Name: Zm_20percent_PEG_P Parameter: Plant Line Value: 35A19
  misc_feature: MA Experiment 108540 PARAMETER Experiment Name: Zm_20percent_PEG_P Parameter: Timepoint (hr) Value: 6
  misc_feature: MA Experiment 108540 PARAMETER Experiment Name: Zm_20percent_PEG_P Parameter: Tissue Value: Aerial
  misc_feature: MA Experiment 108540 PARAMETER Experiment Name: Zm_20percent_PEG_P Parameter: Treatment Value: 20percent PEG vs. No Treatment
  misc_feature: MA Experiment ID: 108543 Result: Up-regulated in Transcription
  misc_feature: MA Experiment ID: 108545 Result: Up-regulated in Transcription
  misc_feature: MA Experiment 108545 PARAMETER Experiment Name: Zm_Imbibed_Seeds_P Parameter: Age (day) Value: 3 vs. 2
  misc_feature: MA Experiment 108545 PARAMETER Experiment Name: Zm_Imbibed_Seeds_P Parameter: Organism Value: Zea mays
  misc_feature: MA Experiment 108545 PARAMETER Experiment Name: Zm_Imbibed_Seeds_P Parameter: Plant Line Value: 35A19
  misc_feature: MA Experiment 108545 PARAMETER Experiment Name: Zm_Imbibed_Seeds_P Parameter: Tissue Value: Aerial vs. Embryo
  misc_feature: MA Experiment ID: 108547 Result: Up-regulated in Transcription
  misc_feature: MA Experiment 108547 PARAMETER Experiment Name: Zm_Imbibed_Seeds_P Parameter: Age (day) Value: 4 vs. 2
  misc_feature: MA Experiment 108547 PARAMETER Experiment Name: Zm_Imbibed_Seeds_P Parameter: Organism Value: Zea mays
  misc_feature: MA Experiment 108547 PARAMETER Experiment Name: Zm_Imbibed_Seeds_P Parameter: Plant Line Value: 35A19
  misc_feature: MA Experiment 108547 PARAMETER Experiment Name: Zm_Imbibed_Seeds_P Parameter: Tissue Value: Aerial vs. Embryo
  misc_feature: MA Experiment ID: 108559 Result: Down-regulated in Transcription
  misc_feature: MA Experiment 108559 PARAMETER Experiment Name: Zm_5mM_NO_P Parameter: Age (day) Value: 8
  misc_feature: MA Experiment 108559 PARAMETER Experiment Name: Zm_5mM_NO_P Parameter: Organism Value: Zea mays
  misc_feature: MA Experiment 108559 PARAMETER Experiment Name: Zm_5mM_NO_P Parameter: Plant Line Value: 35A19
  misc_feature: MA Experiment 108559 PARAMETER Experiment Name: Zm_5mM_NO_P Parameter: Timepoint (hr) Value: 12
  misc_feature: MA Experiment 108559 PARAMETER Experiment Name: Zm_5mM_NO_P Parameter: Tissue Value: Aerial
  misc_feature: MA Experiment 108559 PARAMETER Experiment Name: Zm_5mM_NO_P Parameter: Treatment Value: 5mM NO vs. No Treatment
  misc_feature: MA Experiment ID: 108597 Result: Down-regulated in Transcription
  misc_feature: MA Experiment 108597 PARAMETER Experiment Name: Zm_100uM_ABA_P Parameter: Age (day) Value: 9
  misc_feature: MA Experiment 108597 PARAMETER Experiment Name: Zm_100uM_ABA_P Parameter: Organism Value: Zea mays
  misc_feature: MA Experiment 108597 PARAMETER Experiment Name: Zm_100uM_ABA_P Parameter: Plant Line Value: 35A19
  misc_feature: MA Experiment 108597 PARAMETER Experiment Name: Zm_100uM_ABA_P Parameter: Timepoint (hr) Value: 24
  misc_feature: MA Experiment 108597 PARAMETER Experiment Name: Zm_100uM_ABA_P Parameter: Tissue Value: Aerial
  misc_feature: MA Experiment 108597 PARAMETER Experiment Name: Zm_100uM_ABA_P Parameter: Treatment Value: 100uM ABA vs. No Treatment
  misc_feature: MA Experiment ID: 20000477 Result: Down-regulated in Transcription
  misc_feature: MA Experiment 20000477 PARAMETER Experiment Name: Zm_5mM_SA_P Parameter: Age (day) Value: 10
  misc_feature: MA Experiment 20000477 PARAMETER Experiment Name: Zm_5mM_SA_P Parameter: Organism Value: Zea mays
  misc_feature: MA Experiment 20000477 PARAMETER Experiment Name: Zm_5mM_SA_P Parameter: Plant Line Value: 35A19
  misc_feature: MA Experiment 20000477 PARAMETER Experiment Name: Zm_5mM_SA_P Parameter: Timepoint (hr) Value: 48
  misc_feature: MA Experiment 20000477 PARAMETER Experiment Name: Zm_5mM_SA_P Parameter: Tissue Value: Aerial
  misc_feature: MA Experiment 20000477 PARAMETER Experiment Name: Zm_5mM_SA_P Parameter: Treatment Value: 5mM SA vs. No Treatment
  misc_feature: MA Experiment ID: 20000478 Result: Down-regulated in Transcription
  misc_feature: MA Experiment 20000478 PARAMETER Experiment Name: Zm_5mM_SA_P Parameter: Age (day) Value: 11
  misc_feature: MA Experiment 20000478 PARAMETER Experiment Name: Zm_5mM_SA_P Parameter: Organism Value: Zea mays
  misc_feature: MA Experiment 20000478 PARAMETER Experiment Name: Zm_5mM_SA_P Parameter: Plant Line Value: 35A19
  misc_feature: MA Experiment 20000478 PARAMETER Experiment Name: Zm_5mM_SA_P Parameter: Timepoint (hr) Value: 72
  misc_feature: MA Experiment 20000478 PARAMETER Experiment Name: Zm_5mM_SA_P Parameter: Tissue Value: Aerial
  misc_feature: MA Experiment 20000478 PARAMETER Experiment Name: Zm_5mM_SA_P Parameter: Treatment Value: 5mM SA vs. No Treatment
  misc_feature: MA Experiment ID: 20000479 Result: Down-regulated in Transcription
  misc_feature: MA Experiment 20000479 PARAMETER Experiment Name: Zm_Drought_P Parameter: Age (day) Value: 10
  misc_feature: MA Experiment 20000479 PARAMETER Experiment Name: Zm_Drought_P Parameter: Organism Value: Zea mays
  misc_feature: MA Experiment 20000479 PARAMETER Experiment Name: Zm_Drought_P Parameter: Plant Line Value: 35A19
  misc_feature: MA Experiment 20000479 PARAMETER Experiment Name: Zm_Drought_P Parameter: Timepoint (hr) Value: 48
  misc_feature: MA Experiment 20000479 PARAMETER Experiment Name: Zm_Drought_P Parameter: Tissue Value: Aerial
  misc_feature: MA Experiment 20000479 PARAMETER Experiment Name: Zm_Drought_P Parameter: Treatment Value: Drought vs. No Drought
  misc_feature: MA Experiment ID: 20000480 Result: Down-regulated in Transcription
  misc_feature: MA Experiment 20000480 PARAMETER Experiment Name: Zm_Drought_P Parameter: Age (day) Value: 11
  misc_feature: MA Experiment 20000480 PARAMETER Experiment Name: Zm_Drought_P Parameter: Organism Value: Zea mays
  misc_feature: MA Experiment 20000480 PARAMETER Experiment Name: Zm_Drought_P Parameter: Plant Line Value: 35A19
  misc_feature: MA Experiment 20000480 PARAMETER Experiment Name: Zm_Drought_P Parameter: Timepoint (hr) Value: 72
  misc_feature: MA Experiment 20000480 PARAMETER Experiment Name: Zm_Drought_P Parameter: Tissue Value: Aerial
  misc_feature: MA Experiment 20000480 PARAMETER Experiment Name: Zm_Drought_P Parameter: Treatment Value: Drought vs. No Drought
  misc_feature: MA Experiment ID: 20000492 Result: Down-regulated in Transcription
  misc_feature: MA Experiment 20000492 PARAMETER Experiment Name: Zm_Hybrid_Seed_Dev_P Parameter: DAP Value: 12
  misc_feature: MA Experiment 20000492 PARAMETER Experiment Name: Zm_Hybrid_Seed_Dev_P Parameter: Organism Value: Zea mays
  misc_feature: MA Experiment 20000492 PARAMETER Experiment Name: Zm_Hybrid_Seed_Dev_P Parameter: Plant Line Value: 35A19
  misc_feature: MA Experiment 20000492 PARAMETER Experiment Name: Zm_Hybrid_Seed_Dev_P Parameter: Tissue Value: Fert Kernel vs. Unfert Floret
  misc_feature: MA Experiment ID: 20000535 Result: Down-regulated in Transcription
  misc_feature: MA Experiment 20000535 PARAMETER Experiment Name: Zm_Hybrid_Seed_Dev_P Parameter: DAP Value: 30 vs. 12
  misc_feature: MA Experiment 20000535 PARAMETER Experiment Name: Zm_Hybrid_Seed_Dev_P Parameter: Organism Value: Zea mays
  misc_feature: MA Experiment 20000535 PARAMETER Experiment Name: Zm_Hybrid_Seed_Dev_P Parameter: Plant Line Value: 35A19
  misc_feature: MA Experiment 20000535 PARAMETER Experiment Name: Zm_Hybrid_Seed_Dev_P Parameter: Tissue Value: Embryo vs. Unfert Floret
gcacgttgtcctgctccctagcgccggcatgggccacctggtcccgttcgcccgcctggcggtggcgctgtcggagggacacggctgcaacgtgtccgtggccgcggtgcagcccaccgtgtcgtcggcggagtccaggctcctcgacgcgctcttcgtcgccgcggccccggccgtccgccggctcgacttccgcctggcgccgttcgacgagtccgagttcccgggcgccgaccctttcttcctccgcttcgaggccacgcgccggtccgcgccgctgctcggcccgctcctcgacgccgccgaggcgtccgcgctcgtcacggacatcgttctggcgtccgtcgccctgcccgtcgccagggagcggggcgtcccgtgctacgtcctcttcacgtcctctgccgcgatgctctccctatgcgcctatttccccgcctacctcgacgcccacgccgccgccggcagcgtgggcgtgggcgtcggcaatgtcgacatccccggcgtgttccggatcccaaagtcatccgtcccgcaggcgctgcacgaccccgaccatctcttcacccaacagttcgtcgccaacggtcgctgcctcgtggcctgtgacggcatccttgtcaacacgttcgacgcctttgagccggacgccgttacggccctgcgccaaggctccattactgtctccggcggcttcccgcctgtgttctccgtggggcccatgcttccggtgagatttcaggcggaggagacggcggattacatgagatggctcagcgcgcagccgccacggtctgtggtgtacgtcagcttcggcagccgtaaggccataccgagggaccagctccgggagctcgcagccgggctcgaggccagcggcaaacggttcctgtgggtggtgaagagcaccatcgtggaccgggacgacaccgccgacctcggcggcctgcttggtgacgggttcctcgagcgagtgcaggggcgcgcgttcgttaccatggggtgggtggagcaagaggagatcctgcagcacggttccgtcggcctattcatcagtcactgcgggtggaactcgttgacggaggcagcggcgttcggtgtgccggtgctagcgtggccgaggttcggcgaccagcgcgtcaacgccgcactggtggcgcgcagcgggctgggcgcgtgggaggaggggtggacctgggatggagaggaagggctgacgactcgaaaggaggtggctaagaagataaaaggcatgatggggtatgatgcggtggcggaaaaggcagcgaaggtcggcgacgccgccgccgcggcaatagccaagtgcggcacgagctaccagagcttagaggaattcgttcagcggtgtcgggacgcggagcgtaagtaggctcgactgatttctgcgagcctgtaacagatacttggttcctgtgacgctgactgtagatcattttcggttgctagagttattttcgccggcctcttcct

SEQ ID NO: 18768 - protein, 462 aa, Zea mays subsp. mays
  peptide (1)..(462): Ceres Seq. ID no. 15180138
  misc_feature (2)..(422): Pfam Name: UDP-glucoronosyl and UDP-glucosyl transferase Pfam Description: UDP-glucoronosyl and UDP-glucosyl transferase
  misc_feature (104)..(454): Homolog of NCBI NO: 7488111 NR Description: probable glucosyltransferase - Arabidopsis
  misc_feature (2)..(454): Homolog of NCBI NO: 11994646 NR Description: UTP-glucose glucosyltransferase [Arabidopsis
  misc_feature (1)..(455): Homolog of NCBI NO: 19911209 NR Description: glucosyltransferase-13 [Vigna angularis]
  misc_feature (99)..(453): Homolog of NCBI NO: 21954072 NR Description: putative UDP-glucose glucosyltransferase
  misc_feature (1)..(462): Homolog of NCBI NO: 15223396 NR Description: glycosyltransferase family [Arabidopsis thaliana]
  misc_feature (2)..(453): Homolog of NCBI NO: 34910222 NR Description: putative flavonol glucosyltransferase
  misc_feature (2)..(453): Homolog of NCBI NO: 34910218 NR Description: putative flavonol glucosyltransferase
  misc_feature (1)..(453): Homolog of NCBI NO: 34912752 NR Description: putative UTP-glucose glucosyltransferase
  misc_feature (2)..(454): Homolog of NCBI NO: 34910204 NR Description: putative flavonol glucosyltransferase
  misc_feature (2)..(459): Homolog of NCBI NO: 22535568 NR Description: putative glucosyltransferase
HVVLLPSAGMGHLVPFARLAVALSEGHGCNVSVAAVQPTVSSAESRLLDALFVAAAPAVRRLDFRLAPFDESEFPGADPFFLRFEATRRSAPLLGPLLDAAEASALVTDIVLASVALPVARERGVPCYVLFTSSAAMLSLCAYFPAYLDAHAAAGSVGVGVGNVDIPGVFRIPKSSVPQALHDPDHLFTQQFVANGRCLVACDGILVNTFDAFEPDAVTALRQGSITVSGGFPPVFSVGPMLPVRFQAEETADYMRWLSAQPPRSVVYVSFGSRKAIPRDQLRELAAGLEASGKRFLWVVKSTIVDRDDTADLGGLLGDGFLERVQGRAFVTMGWVEQEEILQHGSVGLFISHCGWNSLTEAAAFGVPVLAWPRFGDQRVNAALVARSGLGAWEEGWTWDGEEGLTTRKEVAKKIKGMMGYDAVAEKAAKVGDAAAAAIAKCGTSYQSLEEFVQRCRDAERK

SEQ ID NO: 18769 - protein, 453 aa, Zea mays subsp. mays
  peptide (1)..(453): Ceres Seq. ID no. 15180139
  misc_feature (1)..(413): Pfam Name: UDP-glucoronosyl and UDP-glucosyl transferase Pfam Description: UDP-glucoronosyl and UDP-glucosyl transferase
  misc_feature (95)..(445): Homolog of NCBI NO: 7488111 NR Description: probable glucosyltransferase - Arabidopsis
  misc_feature (1)..(445): Homolog of NCBI NO: 11994646 NR Description: UTP-glucose glucosyltransferase [Arabidopsis
  misc_feature (1)..(446): Homolog of NCBI NO: 19911209 NR Description: glucosyltransferase-13 [Vigna angularis]
  misc_feature (90)..(444): Homolog of NCBI NO: 21954072 NR Description: putative UDP-glucose glucosyltransferase
  misc_feature (1)..(453): Homolog of NCBI NO: 15223396 NR Description: glycosyltransferase family [Arabidopsis thaliana]
  misc_feature (1)..(444): Homolog of NCBI NO: 34910222 NR Description: putative flavonol glucosyltransferase
  misc_feature (1)..(444): Homolog of NCBI NO: 34910218 NR Description: putative flavonol glucosyltransferase
  misc_feature (1)..(444): Homolog of NCBI NO: 34912752 NR Description: putative UTP-glucose glucosyltransferase
  misc_feature (1)..(445): Homolog of NCBI NO: 34910204 NR Description: putative flavonol glucosyltransferase
  misc_feature (1)..(450): Homolog of NCBI NO: 22535568 NR Description: putative glucosyltransferase
MGHLVPFARLAVALSEGHGCNVSVAAVQPTVSSAESRLLDALFVAAAPAVRRLDFRLAPFDESEFPGADPFFLRFEATRRSAPLLGPLLDAAEASALVTDIVLASVALPVARERGVPCYVLFTSSAAMLSLCAYFPAYLDAHAAAGSVGVGVGNVDIPGVFRIPKSSVPQALHDPDHLFTQQFVANGRCLVACDGILVNTFDAFEPDAVTALRQGSITVSGGFPPVFSVGPMLPVRFQAEETADYMRWLSAQPPRSVVYVSFGSRKAIPRDQLRELAAGLEASGKRFLWVVKSTIVDRDDTADLGGLLGDGFLERVQGRAFVTMGWVEQEEILQHGSVGLFISHCGWNSLTEAAAFGVPVLAWPRFGDQRVNAALVARSGLGAWEEGWTWDGEEGLTTRKEVAKKIKGMMGYDAVAEKAAKVGDAAAAAIAKCGTSYQSLEEFVQRCRDAERK

SEQ ID NO: 18770 - protein, 326 aa, Zea mays subsp. mays
  peptide (1)..(326): Ceres Seq. ID no. 15180140
  misc_feature (1)..(286): Pfam Name: UDP-glucoronosyl and UDP-glucosyl transferase Pfam Description: UDP-glucoronosyl and UDP-glucosyl transferase
  misc_feature (1)..(318): Homolog of NCBI NO: 7488111 NR Description: probable glucosyltransferase - Arabidopsis
  misc_feature (1)..(318): Homolog of NCBI NO: 11994646 NR Description: UTP-glucose glucosyltransferase [Arabidopsis
  misc_feature (1)..(319): Homolog of NCBI NO: 19911209 NR Description: glucosyltransferase-13 [Vigna angularis]
  misc_feature (1)..(317): Homolog of NCBI NO: 21954072 NR Description: putative UDP-glucose glucosyltransferase
  misc_feature (1)..(326): Homolog of NCBI NO: 15223396 NR Description: glycosyltransferase family [Arabidopsis thaliana]
  misc_feature (1)..(317): Homolog of NCBI NO: 34910222 NR Description: putative flavonol glucosyltransferase
  misc_feature (1)..(317): Homolog of NCBI NO: 34910218 NR Description: putative flavonol glucosyltransferase
  misc_feature (1)..(317): Homolog of NCBI NO: 34912752 NR Description: putative UTP-glucose glucosyltransferase
  misc_feature (1)..(318): Homolog of NCBI NO: 34910204 NR Description: putative flavonol glucosyltransferase
  misc_feature (1)..(323): Homolog of NCBI NO: 22535568 NR Description: putative glucosyltransferase
MLSLCAYFPAYLDAHAAAGSVGVGVGNVDIPGVFRIPKSSVPQALHDPDHLFTQQFVANGRCLVACDGILVNTFDAFEPDAVTALRQGSITVSGGFPPVFSVGPMLPVRFQAEETADYMRWLSAQPPRSVVYVSFGSRKAIPRDQLRELAAGLEASGKRFLWVVKSTIVDRDDTADLGGLLGDGFLERVQGRAFVTMGWVEQEEILQHGSVGLFISHCGWNSLTEAAAFGVPVLAWPRFGDQRVNAALVARSGLGAWEEGWTWDGEEGLTTRKEVAKKIKGMMGYDAVAEKAAKVGDAAAAAIAKCGTSYQSLEEFVQRCRDAERK

SEQ ID NO: 18771 - DNA, 1441 bp, Zea mays subsp. mays
  misc_feature (1)..(1441): Ceres Seq. ID no. 12434855
  misc_feature: MA Experiment ID: 108527 Result: Down-regulated in Transcription
  misc_feature: MA Experiment 108527 PARAMETER Experiment Name: Zm_5mM_NO_P Parameter: Age (day) Value: 8
  misc_feature: MA Experiment 108527 PARAMETER Experiment Name: Zm_5mM_NO_P Parameter: Organism Value: Zea mays
  misc_feature: MA Experiment 108527 PARAMETER Experiment Name: Zm_5mM_NO_P Parameter: Plant Line Value: 35A19
  misc_feature: MA Experiment 108527 PARAMETER Experiment Name: Zm_5mM_NO_P Parameter: Timepoint (hr) Value: 6
  misc_feature: MA Experiment 108527 PARAMETER Experiment Name: Zm_5mM_NO_P Parameter: Tissue Value: Aerial
  misc_feature: MA Experiment 108527 PARAMETER Experiment Name: Zm_5mM_NO_P Parameter: Treatment Value: 5mM NO vs. No Treatment
  misc_feature: MA Experiment ID: 108528 Result: Up-regulated in Transcription
  misc_feature: MA Experiment 108528 PARAMETER Experiment Name: Zm_Imbibed_Seeds_P Parameter: Age (day) Value: 5 vs. 2
  misc_feature: MA Experiment 108528 PARAMETER Experiment Name: Zm_Imbibed_Seeds_P Parameter: Organism Value: Zea mays
  misc_feature: MA Experiment 108528 PARAMETER Experiment Name: Zm_Imbibed_Seeds_P Parameter: Plant Line Value: 35A19
  misc_feature: MA Experiment 108528 PARAMETER Experiment Name: Zm_Imbibed_Seeds_P Parameter: Tissue Value: Aerial vs. Embryo
  misc_feature: MA Experiment ID: 108529 Result: Down-regulated in Transcription
  misc_feature: MA Experiment 108529 PARAMETER Experiment Name: Zm_Imbibed_Seeds_P Parameter: Age (day) Value: 5 vs. 2
  misc_feature: MA Experiment 108529 PARAMETER Experiment Name: Zm_Imbibed_Seeds_P Parameter: Organism Value: Zea mays
  misc_feature: MA Experiment 108529 PARAMETER Experiment Name: Zm_Imbibed_Seeds_P Parameter: Plant Line Value: 35A19
  misc_feature: MA Experiment 108529 PARAMETER Experiment Name: Zm_Imbibed_Seeds_P Parameter: Tissue Value: Roots vs. Embryo
  misc_feature: MA Experiment ID: 108530 Result: Up-regulated in Transcription
  misc_feature: MA Experiment 108530 PARAMETER Experiment Name: Zm_Imbibed_Seeds_P Parameter: Age (day) Value: 6 vs. 2
  misc_feature: MA Experiment 108530 PARAMETER Experiment Name: Zm_Imbibed_Seeds_P Parameter: Organism Value: Zea mays
  misc_feature: MA Experiment 108530 PARAMETER Experiment Name: Zm_Imbibed_Seeds_P Parameter: Plant Line Value: 35A19
  misc_feature: MA Experiment 108530 PARAMETER Experiment Name: Zm_Imbibed_Seeds_P Parameter: Tissue Value: Aerial vs. Embryo
  misc_feature: MA Experiment ID: 108536 Result: Down-regulated in Transcription
  misc_feature: MA Experiment 108536 PARAMETER Experiment Name: Zm_Meristem_P Parameter: Age (day) Value: 8
  misc_feature: MA Experiment 108536 PARAMETER Experiment Name: Zm_Meristem_P Parameter: Organism Value: Zea mays
  misc_feature: MA Experiment 108536 PARAMETER Experiment Name: Zm_Meristem_P Parameter: Plant Line Value: 35A19
  misc_feature: MA Experiment 108536 PARAMETER Experiment Name: Zm_Meristem_P Parameter: Tissue Value: Shoot Meristem vs. Above Shoot Meristem
  misc_feature: MA Experiment ID: 108543 Result: Up-regulated in Transcription
  misc_feature: MA Experiment ID: 108545 Result: Up-regulated in Transcription
  misc_feature: MA Experiment 108545 PARAMETER Experiment Name: Zm_Imbibed_Seeds_P Parameter: Age (day) Value: 3 vs. 2
  misc_feature: MA Experiment 108545 PARAMETER Experiment Name: Zm_Imbibed_Seeds_P Parameter: Organism Value: Zea mays
  misc_feature: MA Experiment 108545 PARAMETER Experiment Name: Zm_Imbibed_Seeds_P Parameter: Plant Line Value: 35A19
  misc_feature: MA Experiment 108545 PARAMETER Experiment Name: Zm_Imbibed_Seeds_P Parameter: Tissue Value: Aerial vs. Embryo
  misc_feature: MA Experiment ID: 108547 Result: Up-regulated in Transcription
  misc_feature: MA Experiment 108547 PARAMETER Experiment Name: Zm_Imbibed_Seeds_P Parameter: Age (day) Value: 4 vs. 2
  misc_feature: MA Experiment 108547 PARAMETER Experiment Name: Zm_Imbibed_Seeds_P Parameter: Organism Value: Zea mays
  misc_feature: MA Experiment 108547 PARAMETER Experiment Name: Zm_Imbibed_Seeds_P Parameter: Plant Line Value: 35A19
  misc_feature: MA Experiment 108547 PARAMETER Experiment Name: Zm_Imbibed_Seeds_P Parameter: Tissue Value: Aerial vs. Embryo
  misc_feature: MA Experiment ID: 108556 Result: Down-regulated in Transcription
  misc_feature: MA Experiment 108556 PARAMETER Experiment Name: Zm_Drought_P Parameter: Age (day) Value: 9
  misc_feature: MA Experiment 108556 PARAMETER Experiment Name: Zm_Drought_P Parameter: Organism Value: Zea mays
  misc_feature: MA Experiment 108556 PARAMETER Experiment Name: Zm_Drought_P Parameter: Plant Line Value: 35A19
  misc_feature: MA Experiment 108556 PARAMETER Experiment Name: Zm_Drought_P Parameter: Timepoint (hr) Value: 24
  misc_feature: MA Experiment 108556 PARAMETER Experiment Name: Zm_Drought_P Parameter: Tissue Value: Aerial
  misc_feature: MA Experiment 108556 PARAMETER Experiment Name: Zm_Drought_P Parameter: Treatment Value: Drought vs. No Drought
  misc_feature: MA Experiment ID: 108559 Result: Down-regulated in Transcription
  misc_feature: MA Experiment 108559 PARAMETER Experiment Name: Zm_5mM_NO_P Parameter: Age (day) Value: 8
  misc_feature: MA Experiment 108559 PARAMETER Experiment Name: Zm_5mM_NO_P Parameter: Organism Value: Zea mays
  misc_feature: MA Experiment 108559 PARAMETER Experiment Name: Zm_5mM_NO_P Parameter: Plant Line Value: 35A19
  misc_feature: MA Experiment 108559 PARAMETER Experiment Name: Zm_5mM_NO_P Parameter: Timepoint (hr) Value: 12
  misc_feature: MA Experiment 108559 PARAMETER Experiment Name: Zm_5mM_NO_P Parameter: Tissue Value: Aerial
  misc_feature: MA Experiment 108559 PARAMETER Experiment Name: Zm_5mM_NO_P Parameter: Treatment Value: 5mM NO vs. No Treatment
  misc_feature: MA Experiment ID: 108688 Result: Down-regulated in Transcription
  misc_feature: MA Experiment 108688 PARAMETER Experiment Name: Zm_Embryos-Flowers__P Parameter: Tissue Value: Immature Flowers vs. Aerial+
  misc_feature: MA Experiment ID: 20000480 Result: Down-regulated in Transcription
  misc_feature: MA Experiment 20000480 PARAMETER Experiment Name: Zm_Drought_P Parameter: Age (day) Value: 11
  misc_feature: MA Experiment 20000480 PARAMETER Experiment Name: Zm_Drought_P Parameter: Organism Value: Zea mays
  misc_feature: MA Experiment 20000480 PARAMETER Experiment Name: Zm_Drought_P Parameter: Plant Line Value: 35A19
  misc_feature: MA Experiment 20000480 PARAMETER Experiment Name: Zm_Drought_P Parameter: Timepoint (hr) Value: 72
  misc_feature: MA Experiment 20000480 PARAMETER Experiment Name: Zm_Drought_P Parameter: Tissue Value: Aerial
  misc_feature: MA Experiment 20000480 PARAMETER Experiment Name: Zm_Drought_P Parameter: Treatment Value: Drought vs. No Drought
agcgcttctcccagccacgtcttcatcacacacggtcgcggcgcgaagcaatggcgaccacggcgccgctgctctcgccccagcgcgcttgccctacccatctccggcgccgcctctcgcccctacatctcgtattccccctcgacgcgtcagcgaggcggctgcgccttcgccgggcgccgccaccttgttcggccaagttcggcaagttcgacgcctccgacgccccggcggaggccgaggaggcggggggcgcgacggatggtgggctggcgcagcccgtggaggaggacgacagttgcttgccatcggatttggagggcgcgattcggcagtcagggaaggcgagcgcagatttcgtaaactccggaggcatgcgagctatcgcagaactgctgatccctcagttggaattcctcaacgaggaaggagcacaggctgaactctgggcgttgtcaaagattttcctggacacacttgtacaagagacaggacagaaagttactgccattttccctgacgctggagcagctgcccttctcaagcatcaatggaaagatgcacaattcaagtgtgccagtttaggtgaccggaagccagttggtcctgaagatgaggtcgcagttatgattatccctgatcatcagatgctggaagctgttgaacgcatcacatctcaactctctgatgatcctataaaacctcttgtcatgtggaacccacggcttgttagtggagatgttggagtaggctttaatgtacggaatctgcggagaaatttcttaagcacttttaccactgtttactcgatgaggccattgccaactggtgcagtctttagatgctttccagggcagtggaaagtgttttatgatgatccaaataggccaaatcggtatttgcttgcccgagaactcacaagtaggcccgatgcaactgatattgagagaatatttggtggtgccgatgagcaatctgaagaggcaccatcgttgatgaacaatgtcatgggcgtgttcagttccgtgagtcggtttatgagggtcatctccaagtgagagtcgaagcaaacattggtcacacttgaagccatcaacaatcatcatgatgcttgagttatacaagaagattattttagtgcatccatgttgttttcagtctgtaattactccatggtactgctattcggaacagtatagtttggcgttccggcacatgccaccaaatgtgtgcacataccataccgtggattcctggagtcatctgctgatcctacaccgtgaggtcatttatgtaacttaggaaaaaaaagtagatagatcctcattctggaaaaggccgggtatctgattgtaattcaatactgtgcttgatatatcacaatcagctcgcattttgtaattcaatactggacgaatataaattcaatcctttgttttgc

SEQ ID NO: 18772 - protein, 351 aa, Zea mays subsp. mays
  peptide (1)..(351): Ceres Seq. ID no. 12434856
  misc_feature (101)..(310): Homolog of NCBI NO: 33861443 NR Description: conserved hypothetical protein
  misc_feature (170)..(325): Homolog of NCBI NO: 33865786 NR Description: conserved hypothetical protein [Synechococcus sp.
  misc_feature (101)..(316): Homolog of NCBI NO: 37522361 NR Description: hypothetical protein glr2792 [Gloeobacter
  misc_feature (101)..(351): Homolog of NCBI NO: 16329818 NR Description: unknown protein [Synechocystis sp. PCC 6803]
  misc_feature (101)..(350): Homolog of NCBI NO: 23040759 NR Description: hypothetical protein [Trichodesmium erythraeum
  misc_feature (101)..(350): Homolog of NCBI NO: 17230608 NR Description: hypothetical protein [Nostoc sp. PCC 7120]
  misc_feature (101)..(350): Homolog of NCBI NO: 23130464 NR Description: hypothetical protein [Nostoc punctiforme]
  misc_feature (66)..(347): Homolog of NCBI NO: 18421131 NR Description: putative protein
RFSQPRLHHTRSRREAMATTAPLLSPQRACPTHLRRRLSPLHLVFPLDASARRLRLRRAPPPCSAKFGKFDASDAPAEAEEAGGATDGGLAQPVEEDDSCLPSDLEGAIRQSGKASADFVNSGGMRAIAELLIPQLEFLNEEGAQAELWALSKIFLDTLVQETGQKVTAIFPDAGAAALLKHQWKDAQFKCASLGDRKPVGPEDEVAVMIIPDHQMLEAVERITSQLSDDPIKPLVMWNPRLVSGDVGVGFNVRNLRRNFLSTFTTVYSMRPLPTGAVFRCFPGQWKVFYDDPNRPNRYLLARELTSRPDATDIERIFGGADEQSEEAPSLMNNVMGVFSSVSRFMRVISK

SEQ ID NO: 18773 - protein, 335 aa, Zea mays subsp. mays
  peptide (1)..(335): Ceres Seq. ID no. 12434857
  misc_feature (85)..(294): Homolog of NCBI NO: 33861443 NR Description: conserved hypothetical protein
  misc_feature (154)..(309): Homolog of NCBI NO: 33865786 NR Description: conserved hypothetical protein [Synechococcus sp.
  misc_feature (85)..(300): Homolog of NCBI NO: 37522361 NR Description: hypothetical protein glr2792 [Gloeobacter
  misc_feature (85)..(335): Homolog of NCBI NO: 16329818 NR Description: unknown protein [Synechocystis sp. PCC 6803]
  misc_feature (85)..(334): Homolog of NCBI NO: 23040759 NR Description: hypothetical protein [Trichodesmium erythraeum
  misc_feature (85)..(334): Homolog of NCBI NO: 17230608 NR Description: hypothetical protein [Nostoc sp. PCC 7120]
  misc_feature (85)..(334): Homolog of NCBI NO: 23130464 NR Description: hypothetical protein [Nostoc punctiforme]
  misc_feature (50)..(331): Homolog of NCBI NO: 18421131 NR Description: putative protein
MATTAPLLSPQRACPTHLRRRLSPLHLVFPLDASARRLRLRRAPPPCSAKFGKFDASDAPAEAEEAGGATDGGLAQPVEEDDSCLPSDLEGAIRQSGKASADFVNSGGMRAIAELLIPQLEFLNEEGAQAELWALSKIFLDTLVQETGQKVTAIFPDAGAAALLKHQWKDAQFKCASLGDRKPVGPEDEVAVMIIPDHQMLEAVERITSQLSDDPIKPLVMWNPRLVSGDVGVGFNVRNLRRNFLSTFTTVYSMRPLPTGAVFRCFPGQWKVFYDDPNRPNRYLLARELTSRPDATDIERIFGGADEQSEEAPSLMNNVMGVFSSVSRFMRVISK

SEQ ID NO: 18774 - protein, 227 aa, Zea mays subsp. mays
  peptide (1)..(227): Ceres Seq. ID no. 12434858
  misc_feature (1)..(186): Homolog of NCBI NO: 33861443 NR Description: conserved hypothetical protein
  misc_feature (46)..(201): Homolog of NCBI NO: 33865786 NR Description: conserved hypothetical protein [Synechococcus sp.
  misc_feature (1)..(192): Homolog of NCBI NO: 37522361 NR Description: hypothetical protein glr2792 [Gloeobacter
  misc_feature (1)..(227): Homolog of NCBI NO: 16329818 NR Description: unknown protein [Synechocystis sp. PCC 6803]
  misc_feature (1)..(226): Homolog of NCBI NO: 23040759 NR Description: hypothetical protein [Trichodesmium erythraeum
  misc_feature (1)..(226): Homolog of NCBI NO: 17230608 NR Description: hypothetical protein [Nostoc sp. PCC 7120]
  misc_feature (1)..(226): Homolog of NCBI NO: 23130464 NR Description: hypothetical protein [Nostoc punctiforme]
  misc_feature (1)..(223): Homolog of NCBI NO: 18421131 NR Description: putative protein
MRAIAELLIPQLEFLNEEGAQAELWALSKIFLDTLVQETGQKVTAIFPDAGAAALLKHQWKDAQFKCASLGDRKPVGPEDEVAVMIIPDHQMLEAVERITSQLSDDPIKPLVMWNPRLVSGDVGVGFNVRNLRRNFLSTFTTVYSMRPLPTGAVFRCFPGQWKVFYDDPNRPNRYLLARELTSRPDATDIERIFGGADEQSEEAPSLMNNVMGVFSSVSRFMRVISK

SEQ ID NO: 18775 - DNA, 1848 bp, Zea mays subsp. mays
  misc_feature (1)..(1848): Ceres Seq. ID no. 12566909
  misc_feature: MA Experiment ID: 108523 Result: Down-regulated in Transcription
  misc_feature: MA Experiment 108523 PARAMETER Experiment Name: Zm_42deg_Heat_P Parameter: Age (day) Value: 8
  misc_feature: MA Experiment 108523 PARAMETER Experiment Name: Zm_42deg_Heat_P Parameter: Organism Value: Zea mays
  misc_feature: MA Experiment 108523 PARAMETER Experiment Name: Zm_42deg_Heat_P Parameter: Plant Line Value: 35A19
  misc_feature: MA Experiment 108523 PARAMETER Experiment Name: Zm_42deg_Heat_P Parameter: Temperature (deg C) Value: 42 vs. 22
  misc_feature: MA Experiment 108523 PARAMETER Experiment Name: Zm_42deg_Heat_P Parameter: Timepoint (hr) Value: 6
  misc_feature: MA Experiment 108523 PARAMETER Experiment Name: Zm_42deg_Heat_P Parameter: Tissue Value: Aerial
  misc_feature: MA Experiment ID: 108543 Result: Up-regulated in Transcription
  misc_feature: MA Experiment ID: 108689 Result: Up-regulated in Transcription
  misc_feature: MA Experiment 108689 PARAMETER Experiment Name: Zm_Drought_Roots_P Parameter: Age (day) Value: 9
  misc_feature: MA Experiment 108689 PARAMETER Experiment Name: Zm_Drought_Roots_P Parameter: Organism Value: Zea mays
  misc_feature: MA Experiment 108689 PARAMETER Experiment Name: Zm_Drought_Roots_P Parameter: Plant Line Value: 35A19
  misc_feature: MA Experiment 108689 PARAMETER Experiment Name: Zm_Drought_Roots_P Parameter: Timepoint (hr) Value: 24
  misc_feature: MA Experiment 108689 PARAMETER Experiment Name: Zm_Drought_Roots_P Parameter: Tissue Value: Roots
  misc_feature: MA Experiment 108689 PARAMETER Experiment Name: Zm_Drought_Roots_P Parameter: Treatment Value: Drought vs. No Drought
  misc_feature: MA Experiment ID: 20000479 Result: Down-regulated in Transcription
  misc_feature: MA Experiment 20000479 PARAMETER Experiment Name: Zm_Drought_P Parameter: Age (day) Value: 10
  misc_feature: MA Experiment 20000479 PARAMETER Experiment Name: Zm_Drought_P Parameter: Organism Value: Zea mays
  misc_feature: MA Experiment 20000479 PARAMETER Experiment Name: Zm_Drought_P Parameter: Plant Line Value: 35A19
  misc_feature: MA Experiment 20000479 PARAMETER Experiment Name: Zm_Drought_P Parameter: Timepoint (hr) Value: 48
  misc_feature: MA Experiment 20000479 PARAMETER Experiment Name: Zm_Drought_P Parameter: Tissue Value: Aerial
  misc_feature: MA Experiment 20000479 PARAMETER Experiment Name: Zm_Drought_P Parameter: Treatment Value: Drought vs. No Drought
gcacgagaccattacctagaacatcctaatcgaaaaatacacaaacacacggagctagcagcacggatcgagagaacaatggaggaaacaagcaggatccctgggtacttcaagaacaagggcatcctgatcacgggcgcaacaggcttccttggaaagagtaagcattcctcgtggagaagatactgagggtccagccggacgtaaagaggatctacctccccgtgcgtgcgccggatgctgcatcagccaagaaacgggtggagactgaggtgatcgggaaggagctgtttgggcttctccgagagacgcacggcaagaggttccactccttcatcgaggagaaggtggtcccgttggccggcgacatcatccacgagaacctgggcgtggaggggccccagctgaggcggatgactcgggagctcaacgtcatcgtcaatggagctgccacaacaaacttctacgagaggtacgacgtggccctggacgtgaacgtgatgggagtgaagcatatctgccagttggccaagcagtgccccaatctggaggtcgtcctccatgtgtccacggcctatgtggtgggggagaagcaggggatgatcctggagcgggcgttcaagcagggcgagaccctgcggatggagacggagctggacatggacgccgagctgcgggtggccagggactaccagcagcaggtcgccggggacgacgccgagcagaagaacgagaggaaggccatgaaggagctgggcctcgccagggcccgggagttgggctggcccaacacgtacgtcttcaccaaggcgctaggggagatgatgctggcgcgggagctgggcggcgtcgtccccgccgtgatcgtgcggcccagcatcatcacaagcatccataaggagccgctgccggggtggatggaagggaccaggaccatcgacgccatcctcattggctacgccaagcagagcctctcctgcttcctagccgacctccagctcaccatggacgtgatccccggggacatggtggtgaacgcgatgatggccgcgacggtggcgcacgcgtccgcccccggcggccacaaggaggagtcgccgacggtgtaccacgcgacgtcttccctccgcaaccctgcgccgtacgcggtgctgtaccggacgggaatccgctacttctgcgaccacccgcgcgtgggcaaggacggccgccccgtgcgtacccgcaaggtgcacttcttcggcaccgtcgcagccttcaccgcctacatgctgctccgctacaggctgccgctggagcttctgcgcctgctcagcctcctctccggcggcctcctcttctcgcgcctctacgccgacctggaccgcaagtacaggttcgtcatgcatctcgtcgacctctacgggcccttcgcgctcttcaagggcatcttcgacgacgccaacatggagagactcaggatggccatgcctgttgccgaccggctggagttcaacttcgacccaaacaccatcgactgggacgactacttctacaagatccacattccaggggtcatgaagtacgtcctcaagtagcagctacatgcactgatcgccgtcgttcgtactacctacatgtacatcatgatccatccagattagtactattaattaattaaatccaccaattggcgcgcgtttgtatacacattgctatatattgttgctacgctcgacgtggatcccacccatcctctctattcctcatcaaaatgtatccagttattagcagctctgctttagctaccactacgtacttctgctctggcttgtttatttagtgttaatttagcaggacctgatgatg

SEQ ID NO: 18776 - protein, 387 aa, Zea mays subsp. mays
  peptide (1)..(387): Ceres Seq. ID no. 12566910
  misc_feature (179)..(385): Pfam Name: Male sterility protein Pfam Description: Male sterility protein
  misc_feature (1)..(386): Homolog of NCBI NO: 5020215 NR Description: acyl CoA reductase [Simmondsia chinensis]
  misc_feature (1)..(387): Homolog of NCBI NO: 11357157 NR Description: acyl CoA reductase-protein - Arabidopsis thaliana
  misc_feature (1)..(387): Homolog of NCBI NO: 15242260 NR Description: male sterility 2-like protein (emb|CAA68191.1)
  misc_feature (1)..(349): Homolog of NCBI NO: 34394121 NR Description: putative fatty acyl coA reductase
  misc_feature (1)..(384): Homolog of NCBI NO: 38346871 NR Description: OSJNBb0002N06.11 [Oryza sativa (japonica
  misc_feature (1)..(384): Homolog of NCBI NO: 38346864 NR Description: OSJNBb0002N06.4 [Oryza sativa (japonica
  misc_feature (1)..(385): Homolog of NCBI NO: 35215152 NR Description: putative fatty acyl coA reductase
  misc_feature (1)..(363): Homolog of NCBI NO: 22003086 NR Description: fatty acyl coA reductase [Triticum aestivum]
  misc_feature (1)..(386): Homolog of NCBI NO: 22003090 NR Description: fatty acyl coA reductase [Triticum aestivum]
  misc_feature (1)..(387): Homolog of NCBI NO: 22003082 NR Description: fatty acyl coA reductase [Triticum aestivum]
MTRELNVIVNGAATTNFYERYDVALDVNVMGVKHICQLAKQCPNLEVVLHVSTAYVVGEKQGMILERAFKQGETLRMETELDMDAELRVARDYQQQVAGDDAEQKNERKAMKELGLARARELGWPNTYVFTKALGEMMLARELGGVVPAVIVRPSIITSIHKEPLPGWMEGTRTIDAILIGYAKQSLSCFLADLQLTMDVIPGDMVVNAMMAATVAHASAPGGHKEESPTVYHATSSLRNPAPYAVLYRTGIRYFCDHPRVGKDGRPVRTRKVHFFGTVAAFTAYMLLRYRLPLELLRLLSLLSGGLLFSRLYADLDRKYRFVMHLVDLYGPFALFKGIFDDANMERLRMAMPVADRLEFNFDPNTIDWDDYFYKIHIPGVMKYVLK

SEQ ID NO: 18777 - protein, 358 aa, Zea mays subsp. mays
  peptide (1)..(358): Ceres Seq. ID no. 12566911
  misc_feature (150)..(356): Pfam Name: Male sterility protein Pfam Description: Male sterility protein
  misc_feature (1)..(357): Homolog of NCBI NO: 5020215 NR Description: acyl CoA reductase [Simmondsia chinensis]
  misc_feature (1)..(358): Homolog of NCBI NO: 11357157 NR Description: acyl CoA reductase-protein - Arabidopsis thaliana
  misc_feature (1)..(358): Homolog of NCBI NO: 15242260 NR Description: male sterility 2-like protein (emb|CAA68191.1)
  misc_feature (1)..(320): Homolog of NCBI NO: 34394121 NR Description: putative fatty acyl coA reductase
  misc_feature (1)..(355): Homolog of NCBI NO: 38346871 NR Description: OSJNBb0002N06.11 [Oryza sativa (japonica
  misc_feature (1)..(355): Homolog of NCBI NO: 38346864 NR Description: OSJNBb0002N06.4 [Oryza sativa (japonica
  misc_feature (1)..(356): Homolog of NCBI NO: 35215152 NR Description: putative fatty acyl coA reductase
  misc_feature (1)..(334): Homolog of NCBI NO: 22003086 NR Description: fatty acyl coA reductase [Triticum aestivum]
  misc_feature (1)..(357): Homolog of NCBI NO: 22003090 NR Description: fatty acyl coA reductase [Triticum aestivum]
  misc_feature (1)..(358): Homolog of NCBI NO: 22003082 NR Description: fatty acyl coA reductase [Triticum aestivum]
MGVKHICQLAKQCPNLEVVLHVSTAYVVGEKQGMILERAFKQGETLRMETELDMDAELRVARDYQQQVAGDDAEQKNERKAMKELGLARARELGWPNTYVFTKALGEMMLARELGGVVPAVIVRPSIITSIHKEPLPGWMEGTRTIDAILIGYAKQSLSCFLADLQLTMDVIPGDMVVNAMMAATVAHASAPGGHKEESPTVYHATSSLRNPAPYAVLYRTGIRYFCDHPRVGKDGRPVRTRKVHFFGTVAAFTAYMLLRYRLPLELLRLLSLLSGGLLFSRLYADLDRKYRFVMHLVDLYGPFALFKGIFDDANMERLRMAMPVADRLEFNFDPNTIDWDDYFYKIHIPGVMKYVLK

SEQ ID NO: 18778 - protein, 325 aa, Zea mays subsp. mays
  peptide (1)..(325): Ceres Seq. ID no. 12566912
  misc_feature (117)..(323): Pfam Name: Male sterility protein Pfam Description: Male sterility protein
  misc_feature (1)..(324): Homolog of NCBI NO: 5020215 NR Description: acyl CoA reductase [Simmondsia chinensis]
  misc_feature (1)..(325): Homolog of NCBI NO: 11357157 NR Description: acyl CoA reductase-protein - Arabidopsis thaliana
  misc_feature (1)..(325): Homolog of NCBI NO: 15242260 NR Description: male sterility 2-like protein (emb|CAA68191.1)
  misc_feature (1)..(287): Homolog of NCBI NO: 34394121 NR Description: putative fatty acyl coA reductase
  misc_feature (1)..(322): Homolog of NCBI NO: 38346871 NR Description: OSJNBb0002N06.11 [Oryza sativa (japonica
  misc_feature (1)..(322): Homolog of NCBI NO: 38346864 NR Description: OSJNBb0002N06.4 [Oryza sativa (japonica
  misc_feature (1)..(323): Homolog of NCBI NO: 35215152 NR Description: putative fatty acyl coA reductase
  misc_feature (1)..(301): Homolog of NCBI NO: 22003086 NR Description: fatty acyl coA reductase [Triticum aestivum]
  misc_feature (1)..(324): Homolog of NCBI NO: 22003090 NR Description: fatty acyl coA reductase [Triticum aestivum]
  misc_feature (1)..(325): Homolog of NCBI NO: 22003082 NR Description: fatty acyl coA reductase [Triticum aestivum]
MILERAFKQGETLRMETELDMDAELRVARDYQQQVAGDDAEQKNERKAMKELGLARARELGWPNTYVFTKALGEMMLARELGGVVPAVIVRPSIITSIHKEPLPGWMEGTRTIDAILIGYAKQSLSCFLADLQLTMDVIPGDMVVNAMMAATVAHASAPGGHKEESPTVYHATSSLRNPAPYAVLYRTGIRYFCDHPRVGKDGRPVRTRKVHFFGTVAAFTAYMLLRYRLPLELLRLLSLLSGGLLFSRLYADLDRKYRFVMHLVDLYGPFALFKGIFDDANMERLRMAMPVADRLEFNFDPNTIDWDDYFYKIHIPGVMKYVLK

SEQ ID NO: 18779 - DNA, 1364 bp, Zea mays subsp. mays
  misc_feature (1)..(1364): Ceres Seq. ID no. 12435531
  misc_feature: MA Experiment ID: 108543 Result: Down-regulated in Transcription
gcacgagaccattacctagaacatcctaatcgaaaacccccgtcacctcctctgctccgtagcgccgccatccgtggcggcggcaatctaccgaacaccgtgcgtgcgtgtgttgccgcaatggcctcgcaccacctcgccagccccgccgcggccgcaacctccgccgccaccgtctccagggctctcttcaagcatgcctacactaaaccctcttactcccttctccacgccccgctcctccgcgccgtcgccgcccggcccgcgctcctctccgccgccaccgcggtctccactacggcggcgcccgcggccgcagctatggacaacgtggaggagtgggggctgaggccgctggccgaggtcgacccggaggtgtacgacctaatcgagcgcgagaagcggcggcagcgagcgggtatcgagctcatcgcctcggagaacttcacctcgctcgctgtcatggaggcgctgggctccccgctcaccaacaagtactcggagggcatgccgggggcgcgctactacggcggcaacgaggtcatcgacgaaatcgaggagctctgccggacccgcgcgctcgccgccttccacctcgaccccgcccgctggggcgtcaacgtgcagccctactcggggtcccccgccaatttcgcggcttacacggggctgctccagccgaacgacaggatcatggggctcgacctgccgtccgggggccacctcacccacgggtactacacggcgagtggcaagaagatttctgcaacctccatctacttccagagcctgccgtataaggtgagctccgacaccgggtacgtcgactacgataagctggaggaaaaggccatggatttccgccccaagcttatcatctgtggcggtagtgcgtgccctcgggagtgggattacgccaggttcagggccatcgcagacaagtgcggggccatgttgctctgcgacatggctcatatcagtggtctcgttgctgcgcaggaggctttggatccttttgagttctctgatgtggttaccactacgacccacaaaagtcttcgagggccaaggtctggtatgattttctacaggaagggcccaaagcctccaaaaaaaggccagcctgagggtgctctgtatgactacgaggacaagatcaactttgctgtgttcccgtcactccagggggggcctcacaatcaccaaattgctgctctagctgtagccttgaaacaggccatgtcacctggattcaaggcctatatccagcaggtcaaggcaaacacagtttcccttggtaaccatttgatgagtaagggctacaagttggttactgatggaacagagaaccaccttgttctctg

SEQ ID NO: 18780 - protein, 454 aa, Zea mays subsp. mays
  peptide (1)..(454): Ceres Seq. ID no. 12435532
  misc_feature (119)..(453): Pfam Name: Serine hydroxymethyltransferase Pfam Description: Serine hydroxymethyltransferase
  misc_feature (82)..(453): Homolog of NCBI NO: 17066746 NR Description: serine hydroxymethyltransferase [Chlamydomonas
  misc_feature (111)..(453): Homolog of NCBI NO: 21537165 NR Description: putative hydroxymethyltransferase [Arabidopsis
  misc_feature (111)..(453): Homolog of NCBI NO: 15219182 NR Description: glycine hydroxymethyltransferase, putative
  misc_feature (111)..(453): Homolog of NCBI NO: 25286207 NR Description: probable hydroxymethyltransferase, 49598-47322
  misc_feature (111)..(453): Homolog of NCBI NO: 18400090 NR Description: putative hydroxymethyltransferase
  misc_feature (96)..(453): Homolog of NCBI NO: 34907298 NR Description: putative hydroxymethyltransferase
  misc_feature (108)..(453): Homolog of NCBI NO: 15236371 NR Description: glycine hydroxymethyltransferase - like protein
  misc_feature (108)..(453): Homolog of NCBI NO: 11762130 NR Description: AT4g13930 [Arabidopsis thaliana]
  misc_feature (108)..(453): Homolog of NCBI NO: 21592544 NR Description: hydroxymethyltransferase [Arabidopsis thaliana]
  misc_feature (108)..(453): Homolog of NCBI NO: 15236375 NR Description: hydroxymethyltransferase
ARDHYLEHPNRKPPSPPLLRSAAIRGGGNLPNTVRACVAAMASHHLASPAAAATSAATVSRALFKHAYTKPSYSLLHAPLLRAVAARPALLSAATAVSTTAAPAAAAMDNVEEWGLRPLAEVDPEVYDLIEREKRRQRAGIELIASENFTSLAVMEALGSPLTNKYSEGMPGARYYGGNEVIDEIEELCRTRALAAFHLDPARWGVNVQPYSGSPANFAAYTGLLQPNDRIMGLDLPSGGHLTHGYYTASGKKISATSIYFQSLPYKVSSDTGYVDYDKLEEKAMDFRPKLIICGGSACPREWDYARFRAIADKCGAMLLCDMAHISGLVAAQEALDPFEFSDVVTTTTHKSLRGPRSGMIFYRKGPKPPKKGQPEGALYDYEDKINFAVFPSLQGGPHNHQIAALAVALKQAMSPGFKAYIQQVKANTVSLGNHLMSKGYKLVTDGTENHLVL

SEQ ID NO: 18781 - protein, 414 aa, Zea mays subsp. mays
  peptide (1)..(414): Ceres Seq. ID no. 12435533
  misc_feature (79)..(413): Pfam Name: Serine hydroxymethyltransferase Pfam Description: Serine hydroxymethyltransferase
  misc_feature (42)..(413): Homolog of NCBI NO: 17066746 NR Description: serine hydroxymethyltransferase [Chlamydomonas
  misc_feature (71)..(413): Homolog of NCBI NO: 21537165 NR Description: putative hydroxymethyltransferase [Arabidopsis
  misc_feature (71)..(413): Homolog of NCBI NO: 15219182 NR Description: glycine hydroxymethyltransferase, putative
  misc_feature (71)..(413): Homolog of NCBI NO: 25286207 NR Description: probable hydroxymethyltransferase, 49598-47322
  misc_feature (71)..(413): Homolog of NCBI NO: 18400090 NR Description: putative hydroxymethyltransferase
  misc_feature (56)..(413): Homolog of NCBI NO: 34907298 NR Description: putative hydroxymethyltransferase
  misc_feature (68)..(413): Homolog of NCBI NO: 15236371 NR Description: glycine hydroxymethyltransferase - like protein
  misc_feature (68)..(413): Homolog of NCBI NO: 11762130 NR Description: AT4g13930 [Arabidopsis thaliana]
  misc_feature (68)..(413): Homolog of NCBI NO: 21592544 NR Description: hydroxymethyltransferase [Arabidopsis thaliana]
  misc_feature (68)..(413): Homolog of NCBI NO: 15236375 NR Description: hydroxymethyltransferase
MASHHLASPAAAATSAATVSRALFKHAYTKPSYSLLHAPLLRAVAARPALLSAATAVSTTAAPAAAAMDNVEEWGLRPLAEVDPEVYDLIEREKRRQRAGIELIASENFTSLAVMEALGSPLTNKYSEGMPGARYYGGNEVIDEIEELCRTRALAAFHLDPARWGVNVQPYSGSPANFAAYTGLLQPNDRIMGLDLPSGGHLTHGYYTASGKKISATSIYFQSLPYKVSSDTGYVDYDKLEEKAMDFRPKLIICGGSACPREWDYARFRAIADKCGAMLLCDMAHISGLVAAQEALDPFEFSDVVTTTTHKSLRGPRSGMIFYRKGPKPPKKGQPEGALYDYEDKINFAVFPSLQGGPHNHQIAALAVALKQAMSPGFKAYIQQVKANTVSLGNHLMSKGYKLVTDGTENHLVL

SEQ ID NO: 18782 - protein, 347 aa, Zea mays subsp. mays
  peptide (1)..(347): Ceres Seq. ID no. 12435534
  misc_feature (12)..(346): Pfam Name: Serine hydroxymethyltransferase Pfam Description: Serine hydroxymethyltransferase
  misc_feature (1)..(346): Homolog of NCBI NO: 17066746 NR Description: serine hydroxymethyltransferase [Chlamydomonas
  misc_feature (4)..(346): Homolog of NCBI NO: 21537165 NR Description: putative hydroxymethyltransferase [Arabidopsis
  misc_feature (4)..(346): Homolog of NCBI NO: 15219182 NR Description: glycine hydroxymethyltransferase, putative
  misc_feature (4)..(346): Homolog of NCBI NO: 25286207 NR Description: probable hydroxymethyltransferase, 49598-47322
  misc_feature (4)..(346): Homolog of NCBI NO: 18400090 NR Description: putative hydroxymethyltransferase
  misc_feature (1)..(346): Homolog of NCBI NO: 34907298 NR Description: putative hydroxymethyltransferase
  misc_feature (1)..(346): Homolog of NCBI NO: 15236371 NR Description: glycine hydroxymethyltransferase - like protein
  misc_feature (1)..(346): Homolog of NCBI NO: 11762130 NR Description: AT4g13930 [Arabidopsis thaliana]
  misc_feature (1)..(346): Homolog of NCBI NO: 21592544 NR Description: hydroxymethyltransferase [Arabidopsis thaliana]
  misc_feature (1)..(346): Homolog of NCBI NO: 15236375 NR Description: hydroxymethyltransferase
MDNVEEWGLRPLAEVDPEVYDLIEREKRRQRAGIELIASENFTSLAVMEALGSPLTNKYSEGMPGARYYGGNEVIDEIEELCRTRALAAFHLDPARWGVNVQPYSGSPANFAAYTGLLQPNDRIMGLDLPSGGHLTHGYYTASGKKISATSIYFQSLPYKVSSDTGYVDYDKLEEKAMDFRPKLIICGGSACPREWDYARFRAIADKCGAMLLCDMAHISGLVAAQEALDPFEFSDVVTTTTHKSLRGPRSGMIFYRKGPKPPKKGQPEGALYDYEDKINFAVFPSLQGGPHNHQIAALAVALKQAMSPGFKAYIQQVKANTVSLGNHLMSKGYKLVTDGTENHLVL

SEQ ID NO: 18783 - DNA, 777 bp, Zea mays subsp. mays
  misc_feature (1)..(777): Ceres Seq. ID no. 13499348
  misc_feature: MA Experiment ID: 108527 Result: Up-regulated in Transcription
  misc_feature: MA Experiment 108527 PARAMETER Experiment Name: Zm_5mM_NO_P Parameter: Age (day) Value: 8
  misc_feature: MA Experiment 108527 PARAMETER Experiment Name: Zm_5mM_NO_P Parameter: Organism Value: Zea mays
  misc_feature: MA Experiment 108527 PARAMETER Experiment Name: Zm_5mM_NO_P Parameter: Plant Line Value: 35A19
  misc_feature: MA Experiment 108527 PARAMETER Experiment Name: Zm_5mM_NO_P Parameter: Timepoint (hr) Value: 6
  misc_feature: MA Experiment 108527 PARAMETER Experiment Name: Zm_5mM_NO_P Parameter: Tissue Value: Aerial
  misc_feature: MA Experiment 108527 PARAMETER Experiment Name: Zm_5mM_NO_P Parameter: Treatment Value: 5mM NO vs. No Treatment
  misc_feature: MA Experiment ID: 108535 Result: Down-regulated in Transcription
  misc_feature: MA Experiment 108535 PARAMETER Experiment Name: Zm_Meristem_P Parameter: Age (day) Value: 8
  misc_feature: MA Experiment 108535 PARAMETER Experiment Name: Zm_Meristem_P Parameter: Organism Value: Zea mays
  misc_feature: MA Experiment 108535 PARAMETER Experiment Name: Zm_Meristem_P Parameter: Plant Line Value: 35A19
  misc_feature: MA Experiment 108535 PARAMETER Experiment Name: Zm_Meristem_P Parameter: Tissue Value: Root Meristem vs. Above Root Meristem
  misc_feature: MA Experiment ID: 108543 Result: Down-regulated in Transcription
  misc_feature: MA Experiment ID: 108544 Result: Down-regulated in Transcription
  misc_feature: MA Experiment ID: 108689 Result: Down-regulated in Transcription
  misc_feature: MA Experiment 108689 PARAMETER Experiment Name: Zm_Drought_Roots_P Parameter: Age (day) Value: 9
  misc_feature: MA Experiment 108689 PARAMETER Experiment Name: Zm_Drought_Roots_P Parameter: Organism Value: Zea mays
  misc_feature: MA Experiment 108689 PARAMETER Experiment Name: Zm_Drought_Roots_P Parameter: Plant Line Value: 35A19
  misc_feature: MA Experiment 108689 PARAMETER Experiment Name: Zm_Drought_Roots_P Parameter: Timepoint (hr) Value: 24
  misc_feature: MA Experiment 108689 PARAMETER Experiment Name: Zm_Drought_Roots_P Parameter: Tissue Value: Roots
  misc_feature: MA Experiment 108689 PARAMETER Experiment Name: Zm_Drought_Roots_P Parameter: Treatment Value: Drought vs. No Drought
  misc_feature: MA Experiment ID: 20000535 Result: Up-regulated in Transcription
  misc_feature: MA Experiment 20000535 PARAMETER Experiment Name: Zm_Hybrid_Seed_Dev_P Parameter: DAP Value: 30 vs. 12
  misc_feature: MA Experiment 20000535 PARAMETER Experiment Name: Zm_Hybrid_Seed_Dev_P Parameter: Organism Value: Zea mays
  misc_feature: MA Experiment 20000535 PARAMETER Experiment Name: Zm_Hybrid_Seed_Dev_P Parameter: Plant Line Value: 35A19
  misc_feature: MA Experiment 20000535 PARAMETER Experiment Name: Zm_Hybrid_Seed_Dev_P Parameter: Tissue Value: Embryo vs. Unfert Floret
  misc_feature: MA Experiment ID: 20000626 Result: Up-regulated in Transcription
  misc_feature: MA Experiment 20000626 PARAMETER Experiment Name: Zm_Herbicide-Treatments_P Parameter: Timepoint (hr) Value: 12
  misc_feature: MA Experiment 20000626 PARAMETER Experiment Name: Zm_Herbicide-Treatments_P Parameter: Tissue Value: Aerial
  misc_feature: MA Experiment 20000626 PARAMETER Experiment Name: Zm_Herbicide-Treatments_P Parameter: Treatment Value: Roundup vs. No Treatment
  misc_feature: MA Experiment ID: 20001610 Result: Up-regulated in Transcription
  misc_feature: MA Experiment 20001610 PARAMETER Experiment Name: Zm_50ppm_KNO3_L-to-H_P Parameter: Age (day) Value: 19
  misc_feature: MA Experiment 20001610 PARAMETER Experiment Name: Zm_50ppm_KNO3_L-to-H_P Parameter: Organism Value: Zea mays
  misc_feature: MA Experiment 20001610 PARAMETER Experiment Name: Zm_50ppm_KNO3_L-to-H_P Parameter: Plant Line Value: 35A19
  misc_feature: MA Experiment 20001610 PARAMETER Experiment Name: Zm_50ppm_KNO3_L-to-H_P Parameter: Timepoint (hr) Value: 2
  misc_feature: MA Experiment 20001610 PARAMETER Experiment Name: Zm_50ppm_KNO3_L-to-H_P Parameter: Tissue Value: Roots
  misc_feature: MA Experiment 20001610 PARAMETER Experiment Name: Zm_50ppm_KNO3_L-to-H_P Parameter: Treatment Value: 50ppm KNO3 vs. 50ppm KCl
aatcgaaaaacatgtctctctccttggagcgaagcagcagcgtggtccgcgacgtcgccacgcccgcgcctccggcgaccagtggcgccagtgcgccgtatccacgcgcgggcgcgggcgcgtcgctctccctgcccggcgcagcggcggcgcacgggcacagccagtacctgcccctcaacgaggacgactccctggacatggtcctcttcgacgtgctccgcgaggcatccggctccgcctccacctccgccgcggcgcccgccacctaccagccgccctcgtcgctgcctacgctgaaggcgctcgcttccggagccgcgcgcaggggcagcaggaccgcgtacgcaccgaaggcggccacggcggggcgccactaccgcggggtgaggcggcggccgtggggcaagtacgccgcggagatccgtgacccggcgcggcacggggcgcggctctggctcggcaccttcgccacggccgaggaggcagccgccgcgtaggaccgcgccgcggtccgcatgcgcggagccaaggcgctgctcaacttcccgccggcggtcgcgggctgcgggagcgccgcaaccgccacggcgaagcaggctgggctgacggaagccaagtgaacagcgaatgcgatctcaaaggaaccagctgcgaaactgtgtgtaatgtaattgtgtggaatagtagtatataatgtaaatgtggatgaactagagagagatttccattcatcattgaacggaccacaccaaggattccaaggcgccggttccc

SEQ ID NO: 18784 - protein, 165 aa, Zea mays subsp. mays
  peptide (1)..(165): Ceres Seq. ID no. 13499349
  misc_feature (57)..(165): Homolog of NCBI NO: 21594007 NR Description: putative ethylene response element binding
  misc_feature (57)..(165): Homolog of NCBI NO: 7489113 NR Description: DNA binding protein EREBP-2 - common tobacco
  misc_feature (18)..(165): Homolog of NCBI NO: 7489123 NR Description: ethylene-responsive transcription factor ERF1 -
  misc_feature (33)..(165): Homolog of NCBI NO: 8809571 NR Description: ethylene-responsive element binding factor
  misc_feature (57)..(165): Homolog of NCBI NO: 25350258 NR Description: ethylene responsive element binding factor 1
  misc_feature (57)..(165): Homolog of NCBI NO: 25350257 NR Description: EREBP-2 protein [imported] - Arabidopsis thaliana
  misc_feature (57)..(165): Homolog of NCBI NO: 21264420 NR Description: Ethylene responsive element binding factor 1
  misc_feature (23)..(165): Homolog of NCBI NO: 7489077 NR Description: transcription factor Pti4 - tomato (fragment)
  misc_feature (17)..(165): Homolog of NCBI NO: 7528276 NR Description: AP2-related transcription factor
  misc_feature (4)..(165): Homolog of NCBI NO: 34909594 NR Description: P0046E05.31 [Oryza sativa (japonica
SKNMSLSLERSSSVVRDVATPAPPATSGASAPYPRAGAGASLSLPGAAAAHGHSQYLPLNEDDSLDMVLFDVLREASGSASTSAAAPATYQPPSSLPTLKALASGAARRGSRTAYAPKAATAGRHYRGVRRRPWGKYAAEIRDPARHGARLWLGTFATAEEAAAA

SEQ ID NO: 18785 - protein, 162 aa, Zea mays subsp. mays
  peptide (1)..(162): Ceres Seq. ID no. 13499350
  misc_feature (54)..(162): Homolog of NCBI NO: 21594007 NR Description: putative ethylene response element binding
  misc_feature (54)..(162): Homolog of NCBI NO: 7489113 NR Description: DNA binding protein EREBP-2 - common tobacco
  misc_feature (15)..(162): Homolog of NCBI NO: 7489123 NR Description: ethylene-responsive transcription factor ERF1 -
  misc_feature (30)..(162): Homolog of NCBI NO: 8809571 NR Description: ethylene-responsive element binding factor
  misc_feature (54)..(162): Homolog of NCBI NO: 25350257 NR Description: EREBP-2 protein [imported] - Arabidopsis thaliana
  misc_feature (54)..(162): Homolog of NCBI NO: 25350258 NR Description: ethylene responsive element binding factor 1
  misc_feature (54)..(162): Homolog of NCBI NO: 21264420 NR Description: Ethylene responsive element binding factor 1
  misc_feature (20)..(162): Homolog of NCBI NO: 7489077 NR Description: transcription factor Pti4 - tomato (fragment)
  misc_feature (14)..(162): Homolog of NCBI NO: 7528276 NR Description: AP2-related transcription factor
  misc_feature (1)..(162): Homolog of NCBI NO: 34909594 NR Description: P0046E05.31 [Oryza sativa (japonica
MSLSLERSSSVVRDVATPAPPATSGASAPYPRAGAGASLSLPGAAAAHGHSQYLPLNEDDSLDMVLFDVLREASGSASTSAAAPATYQPPSSLPTLKALASGAARRGSRTAYAPKAATAGRHYRGVRRRPWGKYAAEIRDPARHGARLWLGTFATAEEAAAA

SEQ ID NO: 18786 - protein, 142 aa, Zea mays subsp. mays
  peptide (1)..(142): Ceres Seq. ID no. 13499351
IEKHVSLLGAKQQRGPRRRHARASGDQWRQCAVSTRGRGRVALPARRSGGARAQPVPAPQRGRLPGHGPLRRAPRGIRLRLHLRRGARHLPAALVAAYAEGARFRSRAQGQQDRVRTEGGHGGAPLPRGEAAAVGQVRRGDP

SEQ ID NO: 18787 - DNA, 484 bp, Zea mays subsp. mays
  misc_feature (1)..(484): Ceres Seq. ID no. 4613295
  misc_feature: MA Experiment ID: 108527 Result: Up-regulated in Transcription
  misc_feature: MA Experiment 108527 PARAMETER Experiment Name: Zm_5mM_NO_P Parameter: Age (day) Value: 8
  misc_feature: MA Experiment 108527 PARAMETER Experiment Name: Zm_5mM_NO_P Parameter: Organism Value: Zea mays
  misc_feature: MA Experiment 108527 PARAMETER Experiment Name: Zm_5mM_NO_P Parameter: Plant Line Value: 35A19
  misc_feature: MA Experiment 108527 PARAMETER Experiment Name: Zm_5mM_NO_P Parameter: Timepoint (hr) Value: 6
  misc_feature: MA Experiment 108527 PARAMETER Experiment Name: Zm_5mM_NO_P Parameter: Tissue Value: Aerial
  misc_feature: MA Experiment 108527 PARAMETER Experiment Name: Zm_5mM_NO_P Parameter: Treatment Value: 5mM NO vs. No Treatment
  misc_feature: MA Experiment ID: 108535 Result: Down-regulated in Transcription
  misc_feature: MA Experiment 108535 PARAMETER Experiment Name: Zm_Meristem_P Parameter: Age (day) Value: 8
  misc_feature: MA Experiment 108535 PARAMETER Experiment Name: Zm_Meristem_P Parameter: Organism Value: Zea mays
  misc_feature: MA Experiment 108535 PARAMETER Experiment Name: Zm_Meristem_P Parameter: Plant Line Value: 35A19
  misc_feature: MA Experiment 108535 PARAMETER Experiment Name: Zm_Meristem_P Parameter: Tissue Value: Root Meristem vs. Above Root Meristem
attggccgggctccagtgctgggcgttgtatgagaggtgagcctcccggtggagcgtgggtggtgccggggatgagctgcaacgggtgccgcgtgcttcgcaaggggtgcagcgacgcgtgcgtgctgcggccgtgcctgcagtggatcgacggcgccgaggcgcagggccacgccaccgtcttcgtcgccaagttcttcggccgcgccggcctcatgtccttcctcaccgccgtccccgagccgcagcgcccagcggtgttccagtcgttgatgtacgaggcggccgggcggacgatcaaccctgtgagcggcgccgtggggctgctcggcgcgggcagctggcagctgtgccaggcggcggtggagacggtgcttcggggcggcgccatcgggccgctgcccgagttcgacgggggccgcgacaacacgtttgctctggcggcgacggcgaggcgggccgtggggtgctcgacgttctccac

SEQ ID NO: 18788 - protein, 160 aa, Zea mays subsp. mays
  peptide (1)..(160): Ceres Seq. ID no. 4613296
  misc_feature (25)..(130): Pfam Name: Protein of unknown function DUF260 Pfam Description: Protein of unknown function DUF260
  misc_feature (24)..(133): Homolog of NCBI NO: 15219829 NR Description: hypothetical protein; protein id: At1g67100.1
  misc_feature (24)..(134): Homolog of NCBI NO: 34895540 NR Description: unnamed protein product [Oryza sativa (japonica
  misc_feature (24)..(159): Homolog of NCBI NO: 40539088 NR Description: expressed protein [Oryza sativa (japonica
  misc_feature (24)..(135): Homolog of NCBI NO: 21592894 NR Description: unknown [Arabidopsis thaliana]
  misc_feature (24)..(135): Homolog of NCBI NO: 15235604 NR Description: putative protein
  misc_feature (24)..(135): Homolog of NCBI NO: 21593577 NR Description: unknown [Arabidopsis thaliana]
  misc_feature (24)..(135): Homolog of NCBI NO: 15240739 NR Description: putative protein
  misc_feature (24)..(139): Homolog of NCBI NO: 21553886 NR Description: unknown [Arabidopsis thaliana]
  misc_feature (24)..(139): Homolog of NCBI NO: 15229644 NR Description: putative protein
  misc_feature (24)..(159): Homolog of NCBI NO: 34394489 NR Description: putative lateral organ boundaries (LOB) domain
WPGSSAGRCMRGEPPGGAWVVPGMSCNGCRVLRKGCSDACVLRPCLQWIDGAEAQGHATVFVAKFFGRAGLMSFLTAVPEPQRPAVFQSLMYEAAGRTINPVSGAVGLLGAGSWQLCQAAVETVLRGGAIGPLPEFDGGRDNTFALAATARRAVGCSTFS

SEQ ID NO: 18789 - protein, 151 aa, Zea mays subsp. mays
  peptide (1)..(151): Ceres Seq. ID no. 4613297
  misc_feature (16)..(121): Pfam Name: Protein of unknown function DUF260 Pfam Description: Protein of unknown function DUF260
  misc_feature (15)..(124): Homolog of NCBI NO: 15219829 NR Description: hypothetical protein; protein id: At1g67100.1
  misc_feature (15)..(125): Homolog of NCBI NO: 34895540 NR Description: unnamed protein product [Oryza sativa (japonica
  misc_feature (15)..(150): Homolog of NCBI NO: 40539088 NR Description: expressed protein [Oryza sativa (japonica
  misc_feature (15)..(126): Homolog of NCBI NO: 21592894 NR Description: unknown [Arabidopsis thaliana]
  misc_feature (15)..(126): Homolog of NCBI NO: 15235604 NR Description: putative protein
  misc_feature (15)..(126): Homolog of NCBI NO: 21593577 NR Description: unknown [Arabidopsis thaliana]
  misc_feature (15)..(126): Homolog of NCBI NO: 15240739 NR Description: putative protein
  misc_feature (15)..(130): Homolog of NCBI NO: 21553886 NR Description: unknown [Arabidopsis thaliana]
  misc_feature (15)..(130): Homolog of NCBI NO: 15229644 NR Description: putative protein
  misc_feature (15)..(150): Homolog of NCBI NO: 34394489 NR Description: putative lateral organ boundaries (LOB) domain
MRGEPPGGAWVVPGMSCNGCRVLRKGCSDACVLRPCLQWIDGAEAQGHATVFVAKFFGRAGLMSFLTAVPEPQRPAVFQSLMYEAAGRTINPVSGAVGLLGAGSWQLCQAAVETVLRGGAIGPLPEFDGGRDNTFALAATARRAVGCSTFS

SEQ ID NO: 18790 - protein, 137 aa, Zea mays subsp. mays
  peptide (1)..(137): Ceres Seq. ID no. 4613298
  misc_feature (2)..(107): Pfam Name: Protein of unknown function DUF260 Pfam Description: Protein of unknown function DUF260
  misc_feature (1)..(110): Homolog of NCBI NO: 15219829 NR Description: hypothetical protein; protein id: At1g67100.1
  misc_feature (1)..(111): Homolog of NCBI NO: 34895540 NR Description: unnamed protein product [Oryza sativa (japonica
  misc_feature (1)..(136): Homolog of NCBI NO: 40539088 NR Description: expressed protein [Oryza sativa (japonica
  misc_feature (1)..(112): Homolog of NCBI NO: 21592894 NR Description: unknown [Arabidopsis thaliana]
  misc_feature (1)..(112): Homolog of NCBI NO: 15235604 NR Description: putative protein
  misc_feature (1)..(112): Homolog of NCBI NO: 21593577 NR Description: unknown [Arabidopsis thaliana]
  misc_feature (1)..(112): Homolog of NCBI NO: 15240739 NR Description: putative protein
  misc_feature (1)..(116): Homolog of NCBI NO: 21553886 NR Description: unknown [Arabidopsis thaliana]
  misc_feature (1)..(116): Homolog of NCBI NO: 15229644 NR Description: putative protein
  misc_feature (1)..(136): Homolog of NCBI NO: 34394489 NR Description: putative lateral organ boundaries (LOB) domain
MSCNGCRVLRKGCSDACVLRPCLQWIDGAEAQGHATVFVAKFFGRAGLMSFLTAVPEPQRPAVFQSLMYEAAGRTINPVSGAVGLLGAGSWQLCQAAVETVLRGGAIGPLPEFDGGRDNTFALAATARRAVGCSTFS

SEQ ID NO: 18791 - DNA, 1830 bp, Zea mays subsp. mays
  misc_feature (1)..(1830): Ceres Seq. ID no. 12376720
  misc_feature: MA Experiment ID: 108504 Result: Down-regulated in Transcription
  misc_feature: MA Experiment 108504 PARAMETER Experiment Name: Zm_Drought_P Parameter: Age (day) Value: 8
  misc_feature: MA Experiment 108504 PARAMETER Experiment Name: Zm_Drought_P Parameter: Organism Value: Zea mays
  misc_feature: MA Experiment 108504 PARAMETER Experiment Name: Zm_Drought_P Parameter: Plant Line Value: 35A19
  misc_feature: MA Experiment 108504 PARAMETER Experiment Name: Zm_Drought_P Parameter: Timepoint (hr) Value: 12
  misc_feature: MA Experiment 108504 PARAMETER Experiment Name: Zm_Drought_P Parameter: Tissue Value: Aerial
  misc_feature: MA Experiment 108504 PARAMETER Experiment Name: Zm_Drought_P Parameter: Treatment Value: Drought vs. No Drought
  misc_feature: MA Experiment ID: 108535 Result: Up-regulated in Transcription
  misc_feature: MA Experiment 108535 PARAMETER Experiment Name: Zm_Meristem_P Parameter: Age (day) Value: 8
  misc_feature: MA Experiment 108535 PARAMETER Experiment Name: Zm_Meristem_P Parameter: Organism Value: Zea mays
  misc_feature: MA Experiment 108535 PARAMETER Experiment Name: Zm_Meristem_P Parameter: Plant Line Value: 35A19
  misc_feature: MA Experiment 108535 PARAMETER Experiment Name: Zm_Meristem_P Parameter: Tissue Value: Root Meristem vs. Above Root Meristem
gcacgagaccattacctagaacatcctaatcaaaaagcgtactgccaccgcaatcgtctcgtttcatacagggcagggaagtcaggaggaagatgatgcagcaggagccctggaacgccgccgccgccatggggctcctccgcccgaccaagtcggctccctgctcgcccatcaagccgccgccggcgaccatgctgcggactcacttccacgtcgcgcacaaggtgccggtcggcgacacgccctacgtgcgagccaagcgcgtccagctggtggacaaggatccggagaaggcgatcgcgctgttctggagtgcgatcaacgccggagaccgcgttgacagcgcgctcaaggacatggccatcgtgatgaagcagcagaaccgcgccgaggaggccatcgaggccatcaagtcgctgcgcagccgatgctccgaccaggcgcaggagtccctcgacaacatcctcctcgatctctacaagagatgcgggcggctggacgaccaaatctcgctgctcaagcacaagctgcagctgatcaaccagggccacgccttcaacggcaagcggaccaaaacggctcgctctcagggccgcaagttccaggtcaccctggagcaagaagccaccaggctccttggtaacctggggtgggcgctgatgcagaaggagaactacacggaagcggagggagcgtaccgtcgggcgctgctcatcgggccggacaacaacaagatgtgcaatcggcatctgccttatgaagcaggcccgcgtgctcgaggccaaggatgtgctcaagcaggtacgccccgcggcggttgatggtctgcgcggcgccgactctcacctcaaggcctacgagcgagcgcaggagatgctgcgggacctcgagaccaagctcatcggccgcccgcgcgctgaccagctcgacacgaactggctcttcgatgcgctgctgctgggatcgtcctcaagcatctggcagccgcagccgtgcaccgatcacttgctgccacctcctgttccggctccagccacggcgccgcgcggccacttcgccgatgaaaacgccggtgtgagcaagaagctggcggtgctccaggagaacatgcttaatgtggacgcgcagcccttctactctttgcgggtgtcgtcgctcgcagccaagtcacataacacgctgcctcagcggcaacagcagcagaagccagctcctgtccatgatcccctgggcaacctgaagagaacacggtccggcaattgcatggacaaggcaggagcagtggtgttcaaggagcagagcatcgacgagaacagcggcaggaggaagtcgctgtcagctgaggacaggtggccagagctacccgaccacagcgcgttcgatgaggccctcgtcgcggccgtcctggctccagtgctcgacgacgaaccaacagctactgaagtcaagctgccggcgagctgcggcacgagtccagcggtgaaggaaaagatcggcaagaggctgaggattttccaggacatcacacagacagtgaacagtttctgattcgttttggttttcttcaatttcctactcacaaattaatcagggaaggagaaagggcttgttctcctgggagctaaattaatcagggattcgattcgatttttaatttgatgctgattttaatttaatttattaacacacaaaaataacagctgattcgcttcttcagcttgacactttagaagcgcgcgcttcctttaccgcaagattctcctcgtaatagaagtggactgcatcttgttctaatttcatttcttttgaaataacaaagttcatttgtgg

SEQ ID NO: 18792 - protein, 263 aa, Zea mays subsp. mays
  peptide (1)..(263): Ceres Seq. ID no. 12376721
  misc_feature (1)..(131): Homolog of NCBI NO: 25455795 NR Description: MS5-like protein [imported] - Arabidopsis
  misc_feature (1)..(190): Homolog of NCBI NO: 15233432 NR Description: putative protein; protein id: At4g20900.1
  misc_feature (1)..(55): Homolog of NCBI NO: 4028970 NR Description: pollenless3 [Arabidopsis thaliana]
  misc_feature (1)..(190): Homolog of NCBI NO: 3859112 NR Description: male sterility MS5 [Arabidopsis thaliana]
  misc_feature (1)..(131): Homolog of NCBI NO: 15230439 NR Description: MS5-like protein; protein id: At3g51280.1
MKQARVLEAKDVLKQVRPAAVDGLRGADSHLKAYERAQEMLRDLETKLIGRPRADQLDTNWLFDALLLGSSSSIWQPQPCTDHLLPPPVPAPATAPRGHFADENAGVSKKLAVLQENMLNVDAQPFYSLRVSSLAAKSHNTLPQRQQQQKPAPVHDPLGNLKRTRSGNCMDKAGAVVFKEQSIDENSGRRKSLSAEDRWPELPDHSAFDEALVAAVLAPVLDDEPTATEVKLPASCGTSPAVKEKIGKRLRIFQDITQTVNSF

SEQ ID NO: 18793 - protein, 242 aa, Zea mays subsp. mays
  peptide (1)..(242): Ceres Seq. ID no. 12376722
  misc_feature (179)..(212): Pfam Name: TPR Domain Pfam Description: TPR Domain
  misc_feature (142)..(217): Homolog of NCBI NO: 25455795 NR Description: MS5-like protein [imported] - Arabidopsis
  misc_feature (36)..(217): Homolog of NCBI NO: 15233432 NR Description: putative protein; protein id: At4g20900.1
  misc_feature (39)..(217): Homolog of NCBI NO: 30678993 NR Description: male sterility MS5 family [Arabidopsis thaliana]
  misc_feature (39)..(217): Homolog of NCBI NO: 25406811 NR Description: hypothetical protein [imported] - Arabidopsis
  misc_feature (39)..(217): Homolog of NCBI NO: 3859116 NR Description: unknown [Oryza sativa]
  misc_feature (39)..(217): Homolog of NCBI NO: 30695554 NR Description: male sterility MS5 family [Arabidopsis thaliana]
  misc_feature (39)..(217): Homolog of NCBI NO: 9758884 NR Description: gb|AAC72543.1~gene_id:K24G6.19~similar to unknown
  misc_feature (36)..(217): Homolog of NCBI NO: 4028970 NR Description: pollenless3 [Arabidopsis thaliana]
  misc_feature (36)..(217): Homolog of NCBI NO: 3859112 NR Description: male sterility MS5 [Arabidopsis thaliana]
  misc_feature (15)..(217): Homolog of NCBI NO: 15230439 NR Description: MS5-like protein; protein id: At3g51280.1
MMQQEPWNAAAAMGLLRPTKSAPCSPIKPPPATMLRTHFHVAHKVPVGDTPYVRAKRVQLVDKDPEKAIALFWSAINAGDRVDSALKDMAIVMKQQNRAEEAIEAIKSLRSRCSDQAQESLDNILLDLYKRCGRLDDQISLLKHKLQLINQGHAFNGKRTKTARSQGRKFQVTLEQEATRLLGNLGWALMQKENYTEAEGAYRRALLIGPDNNKMCNRHLPYEAGPRARGQGCAQAGTPRGG

SEQ ID NO: 18794 - protein, 241 aa, Zea mays subsp. mays
  peptide (1)..(241): Ceres Seq. ID no. 12376723
  misc_feature (178)..(211): Pfam Name: TPR Domain Pfam Description: TPR Domain
  misc_feature (141)..(216): Homolog of NCBI NO: 25455795 NR Description: MS5-like protein [imported] - Arabidopsis
  misc_feature (35)..(216): Homolog of NCBI NO: 15233432 NR Description: putative protein; protein id: At4g20900.1
  misc_feature (38)..(216): Homolog of NCBI NO: 30678993 NR Description: male sterility MS5 family [Arabidopsis thaliana]
  misc_feature (38)..(216): Homolog of NCBI NO: 25406811 NR Description: hypothetical protein [imported] - Arabidopsis
  misc_feature (38)..(216): Homolog of NCBI NO: 3859116 NR Description: unknown [Oryza sativa]
  misc_feature (38)..(216): Homolog of NCBI NO: 30695554 NR Description: male sterility MS5 family [Arabidopsis thaliana]
  misc_feature (38)..(216): Homolog of NCBI NO: 9758884 NR Description: gb|AAC72543.1~gene_id:K24G6.19~similar to unknown
  misc_feature (35)..(216): Homolog of NCBI NO: 4028970 NR Description: pollenless3 [Arabidopsis thaliana]
  misc_feature (35)..(216): Homolog of NCBI NO: 3859112 NR Description: male sterility MS5 [Arabidopsis thaliana]
  misc_feature (14)..(216): Homolog of NCBI NO: 15230439 NR Description: MS5-like protein; protein id: At3g51280.1
MQQEPWNAAAAMGLLRPTKSAPCSPIKPPPATMLRTHFHVAHKVPVGDTPYVRAKRVQLVDKDPEKAIALFWSAINAGDRVDSALKDMAIVMKQQNRAEEAIEAIKSLRSRCSDQAQESLDNILLDLYKRCGRLDDQISLLKHKLQLINQGHAFNGKRTKTARSQGRKFQVTLEQEATRLLGNLGWALMQKENYTEAEGAYRRALLIGPDNNKMCNRHLPYEAGPRARGQGCAQAGTPRGG

SEQ ID NO: 18795 - DNA, 1055 bp, Zea mays subsp. mays
  misc_feature (1)..(1055): Ceres Seq. ID no. 12367864
  misc_feature: MA Experiment ID: 108535 Result: Down-regulated in Transcription
  misc_feature: MA Experiment 108535 PARAMETER Experiment Name: Zm_Meristem_P Parameter: Age (day) Value: 8
  misc_feature: MA Experiment 108535 PARAMETER Experiment Name: Zm_Meristem_P Parameter: Organism Value: Zea mays
  misc_feature: MA Experiment 108535 PARAMETER Experiment Name: Zm_Meristem_P Parameter: Plant Line Value: 35A19
  misc_feature: MA Experiment 108535 PARAMETER Experiment Name: Zm_Meristem_P Parameter: Tissue Value: Root Meristem vs. Above Root Meristem
  misc_feature: MA Experiment ID: 108597 Result: Up-regulated in Transcription
  misc_feature: MA Experiment 108597 PARAMETER Experiment Name: Zm_100uM_ABA_P Parameter: Age (day) Value: 9
  misc_feature: MA Experiment 108597 PARAMETER Experiment Name: Zm_100uM_ABA_P Parameter: Organism Value: Zea mays
  misc_feature: MA Experiment 108597 PARAMETER Experiment Name: Zm_100uM_ABA_P Parameter: Plant Line Value: 35A19
  misc_feature: MA Experiment 108597 PARAMETER Experiment Name: Zm_100uM_ABA_P Parameter: Timepoint (hr) Value: 24
  misc_feature: MA Experiment 108597 PARAMETER Experiment Name: Zm_100uM_ABA_P Parameter: Tissue Value: Aerial
  misc_feature: MA Experiment 108597 PARAMETER Experiment Name: Zm_100uM_ABA_P Parameter: Treatment Value: 100uM ABA vs. No Treatment
  misc_feature: MA Experiment ID: 20000488 Result: Down-regulated in Transcription
  misc_feature: MA Experiment 20000488 PARAMETER Experiment Name: Zm_50mM_NH4NO3_L_to_H_P Parameter: Organism Value: Zea mays
  misc_feature: MA Experiment 20000488 PARAMETER Experiment Name: Zm_50mM_NH4NO3_L_to_H_P Parameter: Timepoint (hr) Value: 8
  misc_feature: MA Experiment 20000488 PARAMETER Experiment Name: Zm_50mM_NH4NO3_L_to_H_P Parameter: Tissue Value: Leaves
  misc_feature: MA Experiment 20000488 PARAMETER Experiment Name: Zm_50mM_NH4NO3_L_to_H_P Parameter: Treatment Value: 50mM NH4NO3 vs. 100mM Mannitol
  misc_feature: MA Experiment ID: 20000627 Result: Up-regulated in Transcription
  misc_feature: MA Experiment 20000627 PARAMETER Experiment Name: Zm_Herbicide-Treatments_P Parameter: Timepoint (hr) Value: 12
  misc_feature: MA Experiment 20000627 PARAMETER Experiment Name: Zm_Herbicide-Treatments_P Parameter: Tissue Value: Aerial
  misc_feature: MA Experiment 20000627 PARAMETER Experiment Name: Zm_Herbicide-Treatments_P Parameter: Treatment Value: Finale vs. No Treatment
accgtcgtcctcttcttcctcctcgccctcgtcgcggagcggagtggaggcgcgcgttccgggacggcacgggacaggagcggaggaagctcatctgggtgttggcctcatcccctgcacaagctgaggaatggggcaaaaggactccaagccttcaaatggatatggctactcttctgattacgggggtacttcatcgggatataacttgagaaatactggaagtacgtcctccagttatggcgcgaggtatgtgccttcttcagagaacaatgtacagccagaaacacatgccaggttgcagaggaagtattccaggattggtgatgactatcgttctctgagtcaggtgactgaagctttggcgcaagcaggccttgaatcttcaaatcttatcgtaggcattgattttacaaagagcaatgaatggacaggtaaaatttcatttaatcgccgctgcctacatgatattggaaacactccgaacccatatgagcaagctatatctattattggaaggacactttcagtatttgatgaagataacttgattccctgctttggatttggtgacgcatcaactcatgatcaggaggtattcagcttttacccagagaaccgcccatgcaacggatttgaagaggcactagacagatacagagaaatcgttccaactcttcgattagcaggacctacatctttcgctccgatgatcgagacagcaattggaattgttgacagcactggtggtcaatatcatgttcttctgataatcgcagatggacaggttacccgaagtgtcgatacacaatctggacaattgagtccacaggagcgggatactatagatgcaatagtaagagcaagccagttccccctgtcaattgttcttgttggggttggtgatggaccatgggacatgatgcaccagtttgatgacaatatacctgctcggtcatttgacaatttccagtttgtgaacttcacggagattatgtcaaagagcatagcagctgacagaaaggaggcagaatttgcattgtcagcgctgatgg

SEQ ID NO: 18796 - protein, 308 aa, Zea mays subsp. mays
  peptide (1)..(308): Ceres Seq. ID no. 12367865
  misc_feature (62)..(307): Homolog of NCBI NO: 22328041 NR Description: putative protein
  misc_feature (62)..(307): Homolog of NCBI NO: 8777310 NR Description: gb|AAF01562.1~gene_id:MBM17.7~strong similarity
  misc_feature (20)..(307): Homolog of NCBI NO: 18412353 NR Description: expressed protein
  misc_feature (41)..(307): Homolog of NCBI NO: 34905794 NR Description: P0401G10.23 [Oryza sativa (japonica
  misc_feature (55)..(307): Homolog of NCBI NO: 18481708 NR Description: hypothetical protein [Sorghum bicolor]
  misc_feature (1)..(307): Homolog of NCBI NO: 30697566 NR Description: copine-related [Arabidopsis thaliana]
  misc_feature (1)..(307): Homolog of NCBI NO: 18408863 NR Description: F12A21.7; protein id: At1g67800.1, supported by
  misc_feature (21)..(307): Homolog of NCBI NO: 15232157 NR Description: unknown protein; protein id: At3g01650.1
  misc_feature (8)..(307): Homolog of NCBI NO: 15241400 NR Description: putative protein
  misc_feature (11)..(307): Homolog of NCBI NO: 20804894 NR Description: P0497A05.19 [Oryza sativa (japonica
MGQKDSKPSNGYGYSSDYGGTSSGYNLRNTGSTSSSYGARYVPSSENNVQPETHARLQRKYSRIGDDYRSLSQVTEALAQAGLESSNLIVGIDFTKSNEWTGKISFNRRCLHDIGNTPNPYEQAISIIGRTLSVFDEDNLIPCFGFGDASTHDQEVFSFYPENRPCNGFEEALDRYREIVPTLRLAGPTSFAPMIETAIGIVDSTGGQYHVLLIIADGQVTRSVDTQSGQLSPQERDTIDAIVRASQFPLSIVLVGVGDGPWDMMHQFDDNIPARSFDNFQFVNFTEIMSKSIAADRKEAEFALSALM

SEQ ID NO: 18797 - DNA, 947 bp, Zea mays subsp. mays
  misc_feature (1)..(947): Ceres Seq. ID no. 12633396
  misc_feature: MA Experiment ID: 108544 Result: Down-regulated in Transcription
  misc_feature: MA Experiment ID: 20000477 Result: Down-regulated in Transcription
  misc_feature: MA Experiment 20000477 PARAMETER Experiment Name: Zm_5mM_SA_P Parameter: Age (day) Value: 10
  misc_feature: MA Experiment 20000477 PARAMETER Experiment Name: Zm_5mM_SA_P Parameter: Organism Value: Zea mays
  misc_feature: MA Experiment 20000477 PARAMETER Experiment Name: Zm_5mM_SA_P Parameter: Plant Line Value: 35A19
  misc_feature: MA Experiment 20000477 PARAMETER Experiment Name: Zm_5mM_SA_P Parameter: Timepoint (hr) Value: 48
  misc_feature: MA Experiment 20000477 PARAMETER Experiment Name: Zm_5mM_SA_P Parameter: Tissue Value: Aerial
  misc_feature: MA Experiment 20000477 PARAMETER Experiment Name: Zm_5mM_SA_P Parameter: Treatment Value: 5mM SA vs. No Treatment
  misc_feature: MA Experiment ID: 20000478 Result: Down-regulated in Transcription
  misc_feature: MA Experiment 20000478 PARAMETER Experiment Name: Zm_5mM_SA_P Parameter: Age (day) Value: 11
  misc_feature: MA Experiment 20000478 PARAMETER Experiment Name: Zm_5mM_SA_P Parameter: Organism Value: Zea mays
  misc_feature: MA Experiment 20000478 PARAMETER Experiment Name: Zm_5mM_SA_P Parameter: Plant Line Value: 35A19
  misc_feature: MA Experiment 20000478 PARAMETER Experiment Name: Zm_5mM_SA_P Parameter: Timepoint (hr) Value: 72
  misc_feature: MA Experiment 20000478 PARAMETER Experiment Name: Zm_5mM_SA_P Parameter: Tissue Value: Aerial
  misc_feature: MA Experiment 20000478 PARAMETER Experiment Name: Zm_5mM_SA_P Parameter: Treatment Value: 5mM SA vs. No Treatment
  misc_feature: MA Experiment ID: 20000487 Result: Down-regulated in Transcription
  misc_feature: MA Experiment 20000487 PARAMETER Experiment Name: Zm_50mM_NH4NO3_L_to_H_P Parameter: Organism Value: Zea mays
  misc_feature: MA Experiment 20000487 PARAMETER Experiment Name: Zm_50mM_NH4NO3_L_to_H_P Parameter: Timepoint (hr) Value: 4
  misc_feature: MA Experiment 20000487 PARAMETER Experiment Name: Zm_50mM_NH4NO3_L_to_H_P Parameter: Tissue Value: Leaves
  misc_feature: MA Experiment 20000487 PARAMETER Experiment Name: Zm_50mM_NH4NO3_L_to_H_P Parameter: Treatment Value: 50mM NH4NO3 vs. 100mM Mannitol
  misc_feature: MA Experiment ID: 20000632 Result: Down-regulated in Transcription
  misc_feature: MA Experiment 20000632 PARAMETER Experiment Name: Zm_Herbicide-Treatments_P Parameter: Timepoint (hr) Value: 4
  misc_feature: MA Experiment 20000632 PARAMETER Experiment Name: Zm_Herbicide-Treatments_P Parameter: Tissue Value: Aerial
  misc_feature: MA Experiment 20000632 PARAMETER Experiment Name: Zm_Herbicide-Treatments_P Parameter: Treatment Value: Glean vs. No Treatment
aagtaaaatgataagacgtgttgtagcctgcaagacgcggcaaatttatcttgtttgagtgagcagctgacgtcaacatcgtccactgcatgctctgaaaccgtagaatgtacctccagccatcagaaacggtcacatgctagtgcaaggtccaaagatgacacccagtcctccggaaacaagcacaaggtcgacggagcccgtgtcggtgctggcacaggtgcaccttcttgcagcgccgacgttccaaagtctgatccgagcccttccacggatgctaagttggtagcgacccagcctgccagtattcgcgcaacggacctgatggaagctaccgttccgcgttgggatgatgtagacgtgccaaatataaaggtcgctgagccgcagtccaaacgcaagagcggtggctacatcttagatgagtgggacgaggagtacgaccgagggaagacgaagaaggtgcggaggtcaaagcaagactttggcgggccaaacccgttccaggaggaggcggactacgtatcgcagcggaggacgaagcagaaatcctaccgaggcaagtcttggaacaagcgggcctaacacggtagagaggggggagttgagagaatacgcgcgcgagagagagaatccccggacgcacatgctgtttgttgttacgttttagcacccattggtgagggagatttacgttaaaaaccatccgttgtcggtagtccccattagctgtcgaagttatgacgttttgggcagttttcgtagaacatttgaaacatttgttcggttgtaacggagtgctgtttagttgagttggggggaacaaaattggcgagactattttgctgcattctgctctgctgtttagttactgatgaagaataaaacgatggtggtgatcagttttatgattcagtgcttgccaatgcgatctttatccttttggg

SEQ ID NO: 18798 - protein, 86 aa, Zea mays subsp. mays
  peptide (1)..(86): Ceres Seq. ID no. 12633397
  misc_feature (1)..(75): Homolog of NCBI NO: 18424054 NR Description: ubiquitin-specific protease 23 (UBP23), putative
  misc_feature (1)..(75): Homolog of NCBI NO: 11993486 NR Description: ubiquitin-specific protease 23 [Arabidopsis
  misc_feature (1)..(75): Homolog of NCBI NO: 9758368 NR Description: contains similarity to deubiquitinating
  misc_feature (1)..(86): Homolog of NCBI NO: 29367503 NR Description: putative ubiquitin-specific protease
  misc_feature (1)..(75): Homolog of NCBI NO: 18424054 NR Description: ubiquitin-specific protease 23 (UBP23), putative
  misc_feature (1)..(75): Homolog of NCBI NO: 11993486 NR Description: ubiquitin-specific protease 23 [Arabidopsis
  misc_feature (1)..(75): Homolog of NCBI NO: 9758368 NR Description: contains similarity to deubiquitinating
  misc_feature (1)..(86): Homolog of NCBI NO: 29367503 NR Description: putative ubiquitin-specific protease
MEATVPRWDDVDVPNIKVAEPQSKRKSGGYILDEWDEEYDRGKTKKVRRSKQDFGGPNPFQEEADYVSQRRTKQKSYRGKSWNKRA

SEQ ID NO: 18799 - protein, 82 aa, Zea mays subsp. mays
  peptide (1)..(82): Ceres Seq. ID no. 12633398
MSGTRSTTEGRRRRCGGQSKTLAGQTRSRRRRTTYRSGGRSRNPTEASLGTSGPNTVERGELREYARERENPRTHMLFVVTF

SEQ ID NO: 18800 - protein, 50 aa, Zea mays subsp. mays
  peptide (1)..(50): Ceres Seq. ID no. 12633399
MLVQGPKMTPSPPETSTRSTEPVSVLAQVHLLAAPTFQSLIRALPRMLSW

SEQ ID NO: 18801 - DNA, 1270 bp, Zea mays subsp. mays
  misc_feature (1)..(1270): Ceres Seq. ID no. 12375639
  misc_feature: MA Experiment ID: 20000492 Result: Down-regulated in Transcription
  misc_feature: MA Experiment 20000492 PARAMETER Experiment Name: Zm_Hybrid_Seed_Dev_P Parameter: DAP Value: 12
  misc_feature: MA Experiment 20000492 PARAMETER Experiment Name: Zm_Hybrid_Seed_Dev_P Parameter: Organism Value: Zea mays
  misc_feature: MA Experiment 20000492 PARAMETER Experiment Name: Zm_Hybrid_Seed_Dev_P Parameter: Plant Line Value: 35A19
  misc_feature: MA Experiment 20000492 PARAMETER Experiment Name: Zm_Hybrid_Seed_Dev_P Parameter: Tissue Value: Fert Kernel vs. Unfert Floret
gcacgagaccattacctagaacatcctaatcaaaaaaaccgcgagcgcctccgcatttcgaaccaaagggggcagaactgagagatcgagagaaataataaaaaaaaatccgtcttcttgtggtcttctccaaaccctagcgcccccggccccggtctccgcccccccgccttcgccgtcgcggtcgcgccccatggcggggaagtcgcgaccgcccaagcggatcctcgagtcctataccatcaagggttcggacagagtcatcaagcctggcgattgcgtgctaatgagggcatctgatgcttcaaagccaccttatgtggcaagagttgaggcaattgaagcagcaggatctcgaggcaccaatgtgagagtacgagtgcggtggtattatcgaccagaggagtccataggtggtcggcggccatttcatggttccaaggaggttttcctctctgaccactatgatgtacaaagtgctgacaccattgaggggaaatgcaatgtccacagcttccgtagctatacaaagcttgattctgtcaatgctgaggatttcttctgccgcttcgagtataaatcagctactggcagctttgtaccagatcgtatagcagtgttttgcaagtgcgagatgccatacaatccagatgaccttatgatccaatgcgaggaatgttctgactggtttcaccctgcttgcattgggatgacaatcaaagaagcaaagaaactcgagcattttttctgccagacctgtacagctgaaaatggtaagatggttgagaattcacatgaagctacagcgcaatcagaagaaaagccggtggagtcaaaaaggcggcgaaggtgatggccgtgctgattaaatttatgaaatctatgctcggttgtacaaagccttcccacgtttcacgtttgagaactgtaattttattgttcgtcgcagtttgtggtcctgggctggggtccctctaatgtcaggcacactgtatatagcttgtaacctggtcagattgttgtattagagcacactagggtttgtgtgatagcacggaagttcggactactgagtatgtgtagagtatggcattataatgccagcatcaggtgatcaggcttcttctgggcattaggactcctgcatgatccagcaataatacttccatgcagctggacctggttagtcactagtaagttgtcaggaaacttagtactgccatgtgaactttttttgaaaccctctatgtaatgtaagcatctgtgtcct

SEQ ID NO: 18802 - protein, 219 aa, Zea mays subsp. mays
  peptide (1)..(219): Ceres Seq. ID no. 12375640
  misc_feature (23)..(139): Pfam Name: BAH domain Pfam Description: BAH domain
  misc_feature (32)..(210): Homolog of NCBI NO: 15234729 NR Description: receptor like protein (fragment); protein id:
  misc_feature (27)..(210): Homolog of NCBI NO: 11292613 NR Description: receptor like protein - Arabidopsis thaliana
  misc_feature (4)..(213): Homolog of NCBI NO: 34904940 NR Description: OSJNBa0077M12.13 [Oryza sativa (japonica
  misc_feature (4)..(210): Homolog of NCBI NO: 7484948 NR Description: ES43 protein homolog F19H22.200 - Arabidopsis
  misc_feature (4)..(216): Homolog of NCBI NO: 21595796 NR Description: ES43 like protein [Arabidopsis thaliana]
  misc_feature (4)..(216): Homolog of NCBI NO: 18420377 NR Description: ES43 like protein
  misc_feature (4)..(219): Homolog of NCBI NO: 37573088 NR Description: receptor like protein [Oryza sativa (japonica
  misc_feature (1)..(219): Homolog of NCBI NO: 34897170 NR Description: putative DNA-binding protein
  misc_feature (3)..(219): Homolog of NCBI NO: 629783 NR Description: ES43 protein - barley
  misc_feature (4)..(219): Homolog of NCBI NO: 33146914 NR Description: putative ES43 protein [Oryza sativa (japonica
MAGKSRPPKRILESYTIKGSDRVIKPGDCVLMRASDASKPPYVARVEAIEAAGSRGTNVRVRVRWYYRPEESIGGRRPFHGSKEVFLSDHYDVQSADTIEGKCNVHSFRSYTKLDSVNAEDFFCRFEYKSATGSFVPDRIAVFCKCEMPYNPDDLMIQCEECSDWFHPACIGMTIKEAKKLEHFFCQTCTAENGKMVENSHEATAQSEEKPVESKRRRR

SEQ ID NO: 18803 - protein, 188 aa, Zea mays subsp. mays
  peptide (1)..(188): Ceres Seq. ID no. 12375641
  misc_feature (1)..(108): Pfam Name: BAH domain Pfam Description: BAH domain
  misc_feature (1)..(179): Homolog of NCBI NO: 15234729 NR Description: receptor like protein (fragment); protein id:
  misc_feature (1)..(179): Homolog of NCBI NO: 11292613 NR Description: receptor like protein - Arabidopsis thaliana
  misc_feature (1)..(182): Homolog of NCBI NO: 34904940 NR Description: OSJNBa0077M12.13 [Oryza sativa (japonica
  misc_feature (1)..(179): Homolog of NCBI NO: 7484948 NR Description: ES43 protein homolog F19H22.200 - Arabidopsis
  misc_feature (1)..(185): Homolog of NCBI NO: 21595796 NR Description: ES43 like protein [Arabidopsis thaliana]
  misc_feature (1)..(185): Homolog of NCBI NO: 18420377 NR Description: ES43 like protein
  misc_feature (1)..(188): Homolog of NCBI NO: 37573088 NR Description: receptor like protein [Oryza sativa (japonica
  misc_feature (1)..(188): Homolog of NCBI NO: 34897170 NR Description: putative DNA-binding protein
  misc_feature (1)..(188): Homolog of NCBI NO: 629783 NR Description: ES43 protein - barley
  misc_feature (1)..(188): Homolog of NCBI NO: 33146914 NR Description: putative ES43 protein [Oryza sativa (japonica
MRASDASKPPYVARVEAIEAAGSRGTNVRVRVRWYYRPEESIGGRRPFHGSKEVFLSDHYDVQSADTIEGKCNVHSFRSYTKLDSVNAEDFFCRFEYKSATGSFVPDRIAVFCKCEMPYNPDDLMIQCEECSDWFHPACIGMTIKEAKKLEHFFCQTCTAENGKMVENSHEATAQSEEKPVESKRRRR

SEQ ID NO: 18804 - DNA, 1270 bp, Zea mays subsp. mays
  misc_feature (1)..(1270): Ceres Seq. ID no. 12366459
  misc_feature: MA Experiment ID: 108515 Result: Down-regulated in Transcription
  misc_feature: MA Experiment 108515 PARAMETER Experiment Name: Zm_2mM_SA_P Parameter: Age (day) Value: 8
  misc_feature: MA Experiment 108515 PARAMETER Experiment Name: Zm_2mM_SA_P Parameter: Organism Value: Zea mays
  misc_feature: MA Experiment 108515 PARAMETER Experiment Name: Zm_2mM_SA_P Parameter: Plant Line Value: 35A19
  misc_feature: MA Experiment 108515 PARAMETER Experiment Name: Zm_2mM_SA_P Parameter: Timepoint (hr) Value: 12
  misc_feature: MA Experiment 108515 PARAMETER Experiment Name: Zm_2mM_SA_P Parameter: Tissue Value: Aerial
  misc_feature: MA Experiment 108515 PARAMETER Experiment Name: Zm_2mM_SA_P Parameter: Treatment Value: 2mM SA vs. No Treatment
  misc_feature: MA Experiment ID: 108535 Result: Up-regulated in Transcription
  misc_feature: MA Experiment 108535 PARAMETER Experiment Name: Zm_Meristem_P Parameter: Age (day) Value: 8
  misc_feature: MA Experiment 108535 PARAMETER Experiment Name: Zm_Meristem_P Parameter: Organism Value: Zea mays
  misc_feature: MA Experiment 108535 PARAMETER Experiment Name: Zm_Meristem_P Parameter: Plant Line Value: 35A19
  misc_feature: MA Experiment 108535 PARAMETER Experiment Name: Zm_Meristem_P Parameter: Tissue Value: Root Meristem vs. Above Root Meristem
  misc_feature: MA Experiment ID: 108543 Result: Up-regulated in Transcription
  misc_feature: MA Experiment ID: 108597 Result: Down-regulated in Transcription
  misc_feature: MA Experiment 108597 PARAMETER Experiment Name: Zm_100uM_ABA_P Parameter: Age (day) Value: 9
  misc_feature: MA Experiment 108597 PARAMETER Experiment Name: Zm_100uM_ABA_P Parameter: Organism Value: Zea mays
  misc_feature: MA Experiment 108597 PARAMETER Experiment Name: Zm_100uM_ABA_P Parameter: Plant Line Value: 35A19
  misc_feature: MA Experiment 108597 PARAMETER Experiment Name: Zm_100uM_ABA_P Parameter: Timepoint (hr) Value: 24
  misc_feature: MA Experiment 108597 PARAMETER Experiment Name: Zm_100uM_ABA_P Parameter: Tissue Value: Aerial
  misc_feature: MA Experiment 108597 PARAMETER Experiment Name: Zm_100uM_ABA_P Parameter: Treatment Value: 100uM ABA vs. No Treatment
  misc_feature: MA Experiment ID: 108687 Result: Down-regulated in Transcription
  misc_feature: MA Experiment 108687 PARAMETER Experiment Name: Zm_Embryos-Flowers__P Parameter: Tissue Value: Embryo vs. Aerial+
  misc_feature: MA Experiment ID: 20000478 Result: Down-regulated in Transcription
  misc_feature: MA Experiment 20000478 PARAMETER Experiment Name: Zm_5mM_SA_P Parameter: Age (day) Value: 11
  misc_feature: MA Experiment 20000478 PARAMETER Experiment Name: Zm_5mM_SA_P Parameter: Organism Value: Zea mays
  misc_feature: MA Experiment 20000478 PARAMETER Experiment Name: Zm_5mM_SA_P Parameter: Plant Line Value: 35A19
  misc_feature: MA Experiment 20000478 PARAMETER Experiment Name: Zm_5mM_SA_P Parameter: Timepoint (hr) Value: 72
  misc_feature: MA Experiment 20000478 PARAMETER Experiment Name: Zm_5mM_SA_P Parameter: Tissue Value: Aerial
  misc_feature: MA Experiment 20000478 PARAMETER Experiment Name: Zm_5mM_SA_P Parameter: Treatment Value: 5mM SA vs. No Treatment
  misc_feature: MA Experiment ID: 20000479 Result: Down-regulated in Transcription
  misc_feature: MA Experiment 20000479 PARAMETER Experiment Name: Zm_Drought_P Parameter: Age (day) Value: 10
  misc_feature: MA Experiment 20000479 PARAMETER Experiment Name: Zm_Drought_P Parameter: Organism Value: Zea mays
  misc_feature: MA Experiment 20000479 PARAMETER Experiment Name: Zm_Drought_P Parameter: Plant Line Value: 35A19
  misc_feature: MA Experiment 20000479 PARAMETER Experiment Name: Zm_Drought_P Parameter: Timepoint (hr) Value: 48
  misc_feature: MA Experiment 20000479 PARAMETER Experiment Name: Zm_Drought_P Parameter: Tissue Value: Aerial
  misc_feature: MA Experiment 20000479 PARAMETER Experiment Name: Zm_Drought_P Parameter: Treatment Value: Drought vs. No Drought
  misc_feature: MA Experiment ID: 20000492 Result: Up-regulated in Transcription
  misc_feature: MA Experiment 20000492 PARAMETER Experiment Name: Zm_Hybrid_Seed_Dev_P Parameter: DAP Value: 12
  misc_feature: MA Experiment 20000492 PARAMETER Experiment Name: Zm_Hybrid_Seed_Dev_P Parameter: Organism Value: Zea mays
  misc_feature: MA Experiment 20000492 PARAMETER Experiment Name: Zm_Hybrid_Seed_Dev_P Parameter: Plant Line Value: 35A19
  misc_feature: MA Experiment 20000492 PARAMETER Experiment Name: Zm_Hybrid_Seed_Dev_P Parameter: Tissue Value: Fert Kernel vs. Unfert Floret
  misc_feature: MA Experiment ID: 20000534 Result: Down-regulated in Transcription
  misc_feature: MA Experiment 20000534 PARAMETER Experiment Name: Zm_Hybrid_Pollen_P Parameter: Age (day) Value: 8
  misc_feature: MA Experiment 20000534 PARAMETER Experiment Name: Zm_Hybrid_Pollen_P Parameter: Organism Value: Zea mays
  misc_feature: MA Experiment 20000534 PARAMETER Experiment Name: Zm_Hybrid_Pollen_P Parameter: Plant Line Value: 35A19
  misc_feature: MA Experiment 20000534 PARAMETER Experiment Name: Zm_Hybrid_Pollen_P Parameter: Tissue Value: Pollen vs. Aerial
  misc_feature: MA Experiment ID: 20000626 Result: Down-regulated in Transcription
  misc_feature: MA Experiment 20000626 PARAMETER Experiment Name: Zm_Herbicide-Treatments_P Parameter: Timepoint (hr) Value: 12
  misc_feature: MA Experiment 20000626 PARAMETER Experiment Name: Zm_Herbicide-Treatments_P Parameter: Tissue Value: Aerial
  misc_feature: MA Experiment 20000626 PARAMETER Experiment Name: Zm_Herbicide-Treatments_P Parameter: Treatment Value: Roundup vs. No Treatment
  misc_feature: MA Experiment ID: 20000632 Result: Down-regulated in Transcription
  misc_feature: MA Experiment 20000632 PARAMETER Experiment Name: Zm_Herbicide-Treatments_P Parameter: Timepoint (hr) Value: 4
  misc_feature: MA Experiment 20000632 PARAMETER Experiment Name: Zm_Herbicide-Treatments_P Parameter: Tissue Value: Aerial
  misc_feature: MA Experiment 20000632 PARAMETER Experiment Name: Zm_Herbicide-Treatments_P Parameter: Treatment Value: Glean vs. No Treatment
  misc_feature: MA Experiment ID: 20000633 Result: Down-regulated in Transcription
  misc_feature: MA Experiment 20000633 PARAMETER Experiment Name: Zm_Herbicide-Treatments_P Parameter: Timepoint (hr) Value: 4
  misc_feature: MA Experiment 20000633 PARAMETER Experiment Name: Zm_Herbicide-Treatments_P Parameter: Tissue Value: Aerial
  misc_feature: MA Experiment 20000633 PARAMETER Experiment Name: Zm_Herbicide-Treatments_P Parameter: Treatment Value: Trimec vs. No Treatment
gcacgagaccattacctagaacatcctaatcgaaaacgatatgcggacacctgttcggaagtatcttgtgcagatactatccggagtcgaaataagccactgaaatcgacacaacgaaagccaccgcaacttcatacagcaaatagagctaggccaccaagtgtgaaaagttctcaggaacttgaactggaggagctggagaaggcccccaagttcagggccaagccactaaacaaaaagattcttgagagtaagggagacattggagtgtttgtccatcctaagtctcaggtcacagctcccaaagaattccgtttttgtaccgatgttcgcttgggtcctccatcagttgctgacttatttgacaagctctctcttcactctgaatgttcttcaaacagtaacaggcaaggtgtgcctagatgcaccataccaaaccctttcagtctacaaacagaggaaagaggtcaattaaaagagaggcagctagaagcacaactcttacaaaagaaggtggaggaggaaaaggccagggttcacaaagctaacccttacccatacaccacagactatccgatggtgccgccgaagcctgaacctaagccctgtacgagaccagaaggctttcaactagagagtttggtgagacacgaattagagcagcaaaggctgatggaagaaaggcagagaatggagagagaagaagctcagaggagaatcgtcaaagctcaacctgtactgaaagaggaccctatcccacttccggagaaagagcggaaacctctcactgaagttcaacaatttgtgttgcatgttgatgagagggctgtgcatagatcagaatttgatagcatgataaaagagaaagaaaagacttacaaaaggttgagagaggagaacgaattcgcgcaaaagattgaggaggagaaggcgctgaagcagctgaggagaaccatggtgccacatgcccggcaggtccccaagtttgacaaaccattccgaccacagaaatcgacgaagcaggtgacaagaccgaagtcgccacagcttcaggtggatgagcgaggggcgaggaggcatgctttaatcagatgaccaccatcctcgcctcaagatctctgcgacgttgtttatgtatctgttcgtcgggctactaagattcttttttcgctgaccaatttgtagagcaggccagcaacccattgccgctgctgtgtgtgtaggttggtgatgttttatgattatctcaatgatgacactttttaatcgg

SEQ ID NO: 18805 - protein, 364 aa, Zea mays subsp. mays
  peptide (1)..(364): Ceres Seq. ID no. 12366460
  misc_feature (32)..(294): Homolog of NCBI NO: 28071277 NR Description: restricted expression proliferation associated
  misc_feature (209)..(354): Homolog of NCBI NO: 11358122 NR Description: hypothetical protein T20K14_120 - Arabidopsis
  misc_feature (59)..(348): Homolog of NCBI NO: 28071277 NR Description: restricted expression proliferation associated
  misc_feature (209)..(354): Homolog of NCBI NO: 15232025 NR Description: hypothetical protein; protein id: At3g01015.1
  misc_feature (209)..(354): Homolog of NCBI NO: 30685394 NR Description: expressed protein [Arabidopsis thaliana]
  misc_feature (239)..(359): Homolog of NCBI NO: 15241452 NR Description: putative protein; protein id: At5g44270.1
  misc_feature (30)..(80): Homolog of NCBI NO: 25406742 NR Description: hypothetical protein [imported] - Arabidopsis
  misc_feature (282)..(364): Homolog of NCBI NO: 25406742 NR Description: hypothetical protein [imported] - Arabidopsis
  misc_feature (2)..(286): Homolog of NCBI NO: 30678673 NR Description: expressed protein [Arabidopsis thaliana]
  misc_feature (2)..(349): Homolog of NCBI NO: 25406742 NR Description: hypothetical protein [imported] - Arabidopsis
ARDHYLEHPNRKRYADTCSEVSCADTIRSRNKPLKSTQRKPPQLHTANRARPPSVKSSQELELEELEKAPKFRAKPLNKKILESKGDIGVFVHPKSQVTAPKEFRFCTDVRLGPPSVADLFDKLSLHSECSSNSNRQGVPRCTIPNPFSLQTEERGQLKERQLEAQLLQKKVEEEKARVHKANPYPYTTDYPMVPPKPEPKPCTRPEGFQLESLVRHELEQQRLMEERQRMEREEAQRRIVKAQPVLKEDPIPLPEKERKPLTEVQQFVLHVDERAVHRSEFDSMIKEKEKTYKRLREENEFAQKIEEEKALKQLRRTMVPHARQVPKFDKPFRPQKSTKQVTRPKSPQLQVDERGARRHALIR

SEQ ID NO: 18806 - DNA, 1517 bp, Zea mays subsp. mays
  misc_feature (1)..(1517): Ceres Seq. ID no. 12375635
  misc_feature: MA Experiment ID: 108504 Result: Down-regulated in Transcription
  misc_feature: MA Experiment 108504 PARAMETER Experiment Name: Zm_Drought_P Parameter: Age (day) Value: 8
  misc_feature: MA Experiment 108504 PARAMETER Experiment Name: Zm_Drought_P Parameter: Organism Value: Zea mays
  misc_feature: MA Experiment 108504 PARAMETER Experiment Name: Zm_Drought_P Parameter: Plant Line Value: 35A19
  misc_feature: MA Experiment 108504 PARAMETER Experiment Name: Zm_Drought_P Parameter: Timepoint (hr) Value: 12
  misc_feature: MA Experiment 108504 PARAMETER Experiment Name: Zm_Drought_P Parameter: Tissue Value: Aerial
  misc_feature: MA Experiment 108504 PARAMETER Experiment Name: Zm_Drought_P Parameter: Treatment Value: Drought vs. No Drought
  misc_feature: MA Experiment ID: 108528 Result: Up-regulated in Transcription
  misc_feature: MA Experiment 108528 PARAMETER Experiment Name: Zm_Imbibed_Seeds_P Parameter: Age (day) Value: 5 vs. 2
  misc_feature: MA Experiment 108528 PARAMETER Experiment Name: Zm_Imbibed_Seeds_P Parameter: Organism Value: Zea mays
  misc_feature: MA Experiment 108528 PARAMETER Experiment Name: Zm_Imbibed_Seeds_P Parameter: Plant Line Value: 35A19
  misc_feature: MA Experiment 108528 PARAMETER Experiment Name: Zm_Imbibed_Seeds_P Parameter: Tissue Value: Aerial vs. Embryo
  misc_feature: MA Experiment ID: 108529 Result: Down-regulated in Transcription
  misc_feature: MA Experiment 108529 PARAMETER Experiment Name: Zm_Imbibed_Seeds_P Parameter: Age (day) Value: 5 vs. 2
  misc_feature: MA Experiment 108529 PARAMETER Experiment Name: Zm_Imbibed_Seeds_P Parameter: Organism Value: Zea mays
  misc_feature: MA Experiment 108529 PARAMETER Experiment Name: Zm_Imbibed_Seeds_P Parameter: Plant Line Value: 35A19
  misc_feature: MA Experiment 108529 PARAMETER Experiment Name: Zm_Imbibed_Seeds_P Parameter: Tissue Value: Roots vs. Embryo
  misc_feature: MA Experiment ID: 108530 Result: Up-regulated in Transcription
  misc_feature: MA Experiment 108530 PARAMETER Experiment Name: Zm_Imbibed_Seeds_P Parameter: Age (day) Value: 6 vs. 2
  misc_feature: MA Experiment 108530 PARAMETER Experiment Name: Zm_Imbibed_Seeds_P Parameter: Organism Value: Zea mays
  misc_feature: MA Experiment 108530 PARAMETER Experiment Name: Zm_Imbibed_Seeds_P Parameter: Plant Line Value: 35A19
  misc_feature: MA Experiment 108530 PARAMETER Experiment Name: Zm_Imbibed_Seeds_P Parameter: Tissue Value: Aerial vs. Embryo
  misc_feature: MA Experiment ID: 108536 Result: Down-regulated in Transcription
  misc_feature: MA Experiment 108536 PARAMETER Experiment Name: Zm_Meristem_P Parameter: Age (day) Value: 8
  misc_feature: MA Experiment 108536 PARAMETER Experiment Name: Zm_Meristem_P Parameter: Organism Value: Zea mays
  misc_feature: MA Experiment 108536 PARAMETER Experiment Name: Zm_Meristem_P Parameter: Plant Line Value: 35A19
  misc_feature: MA Experiment 108536 PARAMETER Experiment Name: Zm_Meristem_P Parameter: Tissue Value: Shoot Meristem vs. Above Shoot Meristem
  misc_feature: MA Experiment ID: 108543 Result: Down-regulated in Transcription
  misc_feature: MA Experiment ID: 108547 Result: Up-regulated in Transcription
  misc_feature: MA Experiment 108547 PARAMETER Experiment Name: Zm_Imbibed_Seeds_P Parameter: Age (day) Value: 4 vs. 2
  misc_feature: MA Experiment 108547 PARAMETER Experiment Name: Zm_Imbibed_Seeds_P Parameter: Organism Value: Zea mays
  misc_feature: MA Experiment 108547 PARAMETER Experiment Name: Zm_Imbibed_Seeds_P Parameter: Plant Line Value: 35A19
  misc_feature: MA Experiment 108547 PARAMETER Experiment Name: Zm_Imbibed_Seeds_P Parameter: Tissue Value: Aerial vs. Embryo
  misc_feature: MA Experiment ID: 108688 Result: Down-regulated in Transcription
  misc_feature: MA Experiment 108688 PARAMETER Experiment Name: Zm_Embryos-Flowers__P Parameter: Tissue Value: Immature Flowers vs. Aerial+
  misc_feature: MA Experiment ID: 20000480 Result: Down-regulated in Transcription
  misc_feature: MA Experiment 20000480 PARAMETER Experiment Name: Zm_Drought_P Parameter: Age (day) Value: 11
  misc_feature: MA Experiment 20000480 PARAMETER Experiment Name: Zm_Drought_P Parameter: Organism Value: Zea mays
  misc_feature: MA Experiment 20000480 PARAMETER Experiment Name: Zm_Drought_P Parameter: Plant Line Value: 35A19
  misc_feature: MA Experiment 20000480 PARAMETER Experiment Name: Zm_Drought_P Parameter: Timepoint (hr) Value: 72
  misc_feature: MA Experiment 20000480 PARAMETER Experiment Name: Zm_Drought_P Parameter: Tissue Value: Aerial
  misc_feature: MA Experiment 20000480 PARAMETER Experiment Name: Zm_Drought_P Parameter: Treatment Value: Drought vs. No Drought
  misc_feature: MA Experiment ID: 20000492 Result: Down-regulated in Transcription
  misc_feature: MA Experiment 20000492 PARAMETER Experiment Name: Zm_Hybrid_Seed_Dev_P Parameter: DAP Value: 12
  misc_feature: MA Experiment 20000492 PARAMETER Experiment Name: Zm_Hybrid_Seed_Dev_P Parameter: Organism Value: Zea mays
  misc_feature: MA Experiment 20000492 PARAMETER Experiment Name: Zm_Hybrid_Seed_Dev_P Parameter: Plant Line Value: 35A19
  misc_feature: MA Experiment 20000492 PARAMETER Experiment Name: Zm_Hybrid_Seed_Dev_P Parameter: Tissue Value: Fert Kernel vs. Unfert Floret
  misc_feature: MA Experiment ID: 20000535 Result: Down-regulated in Transcription
  misc_feature: MA Experiment 20000535 PARAMETER Experiment Name: Zm_Hybrid_Seed_Dev_P Parameter: DAP Value: 30 vs. 12
  misc_feature: MA Experiment 20000535 PARAMETER Experiment Name: Zm_Hybrid_Seed_Dev_P Parameter: Organism Value: Zea mays
  misc_feature: MA Experiment 20000535 PARAMETER Experiment Name: Zm_Hybrid_Seed_Dev_P Parameter: Plant Line Value: 35A19
  misc_feature: MA Experiment 20000535 PARAMETER Experiment Name: Zm_Hybrid_Seed_Dev_P Parameter: Tissue Value: Embryo vs. Unfert Floret
gcacgagaccattacctagaacatcctaatcgaaaaatcattcatctatctgatctcatctcctatcttccctctctctcctccccgtcgtctgcctcctttgcccggcaagaccgcctgcccatgtccgtggcgccgtgcaatccgcttcttcagcgcagctccgatccgccaacgccgcccaaggagccgggatcggccgagagagcgtgctgacgagaggcaggcagcggaacagagcagcggcccgcaaggcgattgctctattctgccctgttccagcgttccatgcatggatgccaaggaactcatctcacagtccgacctgcagtcgttctaccagcagcaacaacagcagcaccgtgccttcggcggccaccatagcccgtcctcgctggctgggatgcactccgtcatccgacccatgcccaacatgaatatgagcccaactgctatccttaactccatcagcgggggttccctcgccggcatgcagttccagatggacccgcccccaccattgctgcacaagatcaacgccaccggcgctgtcacaccggcccctgcggagcctctcaagcgcaaacgaggaaggccgcgcaaatacggacctgatggcaccatgaggcaacaacaacaacagcaacaggccgcgtcatcgcagcagcagcagcagcagctcgtcgctacacaaccgaggatatgttctctatcatcgggtcccgacatgctcggcagctccggtatggaggaccccgcgcagaagaagcggcgcggccggccgccgggcaccggcaagaagcaccagccctcgacctcacaaggcaacgcgttcgccggttcggctggaacgaacttcactccgcacatcatcacggcgtctccttcagaggacgtggcggcgaagatcgttgcgttcgccagccagtcgtcaaaggcgatgtgcgtcctctcggcgatgggttccgtctccagggccgtcctccgccacccggccgacggctctcccatggcgagggttcacgcgtcgccgcagccgtacaagaaccctgctgtctacgagggtttctacgagatcctgagcctaaccggctcgtacaacctggcacacggcggcggcctcagcgtcacgctctgcagccctgagaggaacgtgatcggaggcgttctgggcggcccactggtagctgcaggcaccgtgcaggtggttctggggagttttcaccagggagggtcgagatccaagtccaagaaagccgggaagcagcagcaggcggcggccttcagccccgactcgctcaccggcggccaggaggcgtcgccccagctccgggcacaaccaaaatctaacgccgccgccctccgtgacgggagggtggcccacctccggcatatttgacaccagaagttccagcattgatatcaactcgtctagaggctagctcattcgtcgatatagttccagctcgacagaaattttctgttttcgcacaagaatacccaaaaaccatacttcc

SEQ ID NO: 18807 - protein, 368 aa, Zea mays subsp. mays
  peptide (1)..(368): Ceres Seq. ID no. 12375636
  misc_feature (17)..(109): Homolog of NCBI NO: 11281387 NR Description: probable DNA-binding protein - Arabidopsis
  misc_feature (139)..(321): Homolog of NCBI NO: 30695388 NR Description: DNA-binding protein -related [Arabidopsis
  misc_feature (139)..(321): Homolog of NCBI NO: 11281387 NR Description: probable DNA-binding protein - Arabidopsis
  misc_feature (32)..(124): Homolog of NCBI NO: 38346715 NR Description: OSJNBa0086O06.13 [Oryza sativa (japonica
  misc_feature (141)..(356): Homolog of NCBI NO: 38346715 NR Description: OSJNBa0086O06.13 [Oryza sativa (japonica
  misc_feature (1)..(111): Homolog of NCBI NO: 15225902 NR Description: putative AT-hook DNA-binding protein
  misc_feature (156)..(367): Homolog of NCBI NO: 15225902 NR Description: putative AT-hook DNA-binding protein
  misc_feature (1)..(126): Homolog of NCBI NO: 2213534 NR Description: DNA-binding PD1-like protein [Pisum sativum]
  misc_feature (139)..(343): Homolog of NCBI NO: 2213534 NR Description: DNA-binding PD1-like protein [Pisum sativum]
  misc_feature (17)..(109): Homolog of NCBI NO: 30695388 NR Description: DNA-binding protein -related [Arabidopsis
MDAKELISQSDLQSFYQQQQQQHRAFGGHHSPSSLAGMHSVIRPMPNMNMSPTAILNSISGGSLAGMQFQMDPPPPLLHKINATGAVTPAPAEPLKRKRGRPRKYGPDGTMRQQQQQQQAASSQQQQQQLVATQPRICSLSSGPDMLGSSGMEDPAQKKRRGRPPGTGKKHQPSTSQGNAFAGSAGTNFTPHIITASPSEDVAAKIVAFASQSSKAMCVLSAMGSVSRAVLRHPADGSPMARVHASPQPYKNPAVYEGFYEILSLTGSYNLAHGGGLSVTLCSPERNVIGGVLGGPLVAAGTVQVVLGSFHQGGSRSKSKKAGKQQQAAAFSPDSLTGGQEASPQLRAQPKSNAAALRDGRVAHLRHI

SEQ ID NO: 18808 - protein, 331 aa, Zea mays subsp. mays
  peptide (1)..(331): Ceres Seq. ID no. 12375637
  misc_feature (1)..(89): Homolog of NCBI NO: 2213534 NR Description: DNA-binding PD1-like protein [Pisum sativum]
  misc_feature (102)..(306): Homolog of NCBI NO: 2213534 NR Description: DNA-binding PD1-like protein [Pisum sativum]
  misc_feature (1)..(72): Homolog of NCBI NO: 30695388 NR Description: DNA-binding protein -related [Arabidopsis
  misc_feature (1)..(72): Homolog of NCBI NO: 11281387 NR Description: probable DNA-binding protein - Arabidopsis
  misc_feature (102)..(284): Homolog of NCBI NO: 30695388 NR Description: DNA-binding protein -related [Arabidopsis
  misc_feature (102)..(284): Homolog of NCBI NO: 11281387 NR Description: probable DNA-binding protein - Arabidopsis
  misc_feature (1)..(87): Homolog of NCBI NO: 38346715 NR Description: OSJNBa0086O06.13 [Oryza sativa (japonica
  misc_feature (104)..(319): Homolog of NCBI NO: 38346715 NR Description: OSJNBa0086O06.13 [Oryza sativa (japonica
  misc_feature (1)..(74): Homolog of NCBI NO: 15225902 NR Description: putative AT-hook DNA-binding protein
  misc_feature (119)..(330): Homolog of NCBI NO: 15225902 NR Description: putative AT-hook DNA-binding protein
MHSVIRPMPNMNMSPTAILNSISGGSLAGMQFQMDPPPPLLHKINATGAVTPAPAEPLKRKRGRPRKYGPDGTMRQQQQQQQAASSQQQQQQLVATQPRICSLSSGPDMLGSSGMEDPAQKKRRGRPPGTGKKHQPSTSQGNAFAGSAGTNFTPHIITASPSEDVAAKIVAFASQSSKAMCVLSAMGSVSRAVLRHPADGSPMARVHASPQPYKNPAVYEGFYEILSLTGSYNLAHGGGLSVTLCSPERNVIGGVLGGPLVAAGTVQVVLGSFHQGGSRSKSKKAGKQQQAAAFSPDSLTGGQEASPQLRAQPKSNAAALRDGRVAHLRHI

SEQ ID NO: 18809 - protein, 324 aa, Zea mays subsp. mays
  peptide (1)..(324): Ceres Seq. ID no. 12375638
  misc_feature (1)..(82): Homolog of NCBI NO: 2213534 NR Description: DNA-binding PD1-like protein [Pisum sativum]
  misc_feature (95)..(299): Homolog of NCBI NO: 2213534 NR Description: DNA-binding PD1-like protein [Pisum sativum]
  misc_feature (1)..(65): Homolog of NCBI NO: 30695388 NR Description: DNA-binding protein -related [Arabidopsis
  misc_feature (1)..(65): Homolog of NCBI NO: 11281387 NR Description: probable DNA-binding protein - Arabidopsis
  misc_feature (95)..(277): Homolog of NCBI NO: 30695388 NR Description: DNA-binding protein -related [Arabidopsis
  misc_feature (95)..(277): Homolog of NCBI NO: 11281387 NR Description: probable DNA-binding protein - Arabidopsis
  misc_feature (1)..(80): Homolog of NCBI NO: 38346715 NR Description: OSJNBa0086O06.13 [Oryza sativa (japonica
  misc_feature (97)..(312): Homolog of NCBI NO: 38346715 NR Description: OSJNBa0086O06.13 [Oryza sativa (japonica
  misc_feature (1)..(67): Homolog of NCBI NO: 15225902 NR Description: putative AT-hook DNA-binding protein
  misc_feature (112)..(323): Homolog of NCBI NO: 15225902 NR Description: putative AT-hook DNA-binding protein
MPNMNMSPTAILNSISGGSLAGMQFQMDPPPPLLHKINATGAVTPAPAEPLKRKRGRPRKYGPDGTMRQQQQQQQAASSQQQQQQLVATQPRICSLSSGPDMLGSSGMEDPAQKKRRGRPPGTGKKHQPSTSQGNAFAGSAGTNFTPHIITASPSEDVAAKIVAFASQSSKAMCVLSAMGSVSRAVLRHPADGSPMARVHASPQPYKNPAVYEGFYEILSLTGSYNLAHGGGLSVTLCSPERNVIGGVLGGPLVAAGTVQVVLGSFHQGGSRSKSKKAGKQQQAAAFSPDSLTGGQEASPQLRAQPKSNAAALRDGRVAHLRHI

SEQ ID NO: 18810 - DNA, 1683 bp, Zea mays subsp. mays
  misc_feature (1)..(1683): Ceres Seq. ID no. 12362573
  misc_feature: MA Experiment ID: 20000535 Result: Down-regulated in Transcription
  misc_feature: MA Experiment 20000535 PARAMETER Experiment Name: Zm_Hybrid_Seed_Dev_P Parameter: DAP Value: 30 vs. 12
  misc_feature: MA Experiment 20000535 PARAMETER Experiment Name: Zm_Hybrid_Seed_Dev_P Parameter: Organism Value: Zea mays
  misc_feature: MA Experiment 20000535 PARAMETER Experiment Name: Zm_Hybrid_Seed_Dev_P Parameter: Plant Line Value: 35A19
  misc_feature: MA Experiment 20000535 PARAMETER Experiment Name: Zm_Hybrid_Seed_Dev_P Parameter: Tissue Value: Embryo vs. Unfert Floret
aacagctcaccacggcgcagcaaccgcagcccacgcaggcgacgaaaagctgccgaaccaccagcagaggagagcgagggaccgcgcaaccgagccactccctagtccctccttctccctctctctctcttcgcctccggatctcgcatgcgcggtggccaccgccgcgcccgacggtggagggtgaggagttagcgaggggccctgaccctgagtgctggacggcggcgtgatggggggagcgcagctggtggggagatgggtggagtcgtacacggggatgtcgacggacaacatcaagggcctgctgctcgcgctctcctccagcctcttcatcggtgccagcttcatcgtgaagaagaaggggctcaagaaggccgccgcgtccggcgtccgagcaggcgttggtggctactcatacttgcttgagccactgtggtgggcaggaatggtaacaatgattgttggcgaaatcgctaactttgcagcttatgcatttgctcctgctatcttagtcactccacttggtgcacttagcataattatcagtgctgttcttgcccatataatgttgcgggagaaacttcatacatttggtatacttggctgtattctttgtgtggtcggttcgacaacaattgtgcttcatgcccctccagagcgtcaaattgagtctgtggcagaagtgtgggatcttgcgactgaaccagcattcctgtgctatgcagctgttgtgcttgcagcagcttttgtgctcatattccattttgtccctgagtatggtcagacacatatcatggtatatgttggcatatgttctcttgtgggatctttatcggtcatgagtgtcaaagctcttgggatagccttgaagctgacattttctgggatgaaccagctagtctatccacaaacatgggtgttctcatccgttgtaaccttatgcattgtaacacagatgaactatctgaacaaggccctcgacacattcaacactgcagttgtttcacccatatattacacaatgtttacatccttgaccatcttggctagtgtaataatgttcaaggattgggatcgtcaaaatccaacacaaattgtaaggagatgtgcggcttcgttacaatcctttctggaacttttcttcttcacaagacaaaggatatggtggatggtctcccaccaaatttaccgattcggcttcctaaacatgcggatgaggacggctacgctgctgaaggaattcctctcagatccgctgctgacggtattccgctcaggtcaccaagggctacagattcatttcgctcgtcatgatgccccgctgagatttgcatgcgcactcaaatcgtgtcacttgaaggctcatacccagcaggcgtcagtcctatatatacatgggaagggaaagataaccctccattcactcggttggatacacaacgtaggtttagctgtaggattcaaaaggtaacagctcggctgcccccttgtaaattctgaggcattggtacagaattttgaggattatatcagttatactcgtccgggtaagatcaccaggatgaccaagagcccaagtttttgggttgtatacttgtatgtatattgcggtgagccatataggtcactatcttgaattgctgtattttttcaacacaactctcagagtacaggatgttg

SEQ ID NO: 18811 - protein, 413 aa, Zea mays subsp. mays
  peptide (1)..(413): Ceres Seq. ID no. 12362574
  misc_feature (17)..(290): Pfam Name: Protein of unknown function (DUF803) Pfam Description: Protein of unknown function (DUF803)
  misc_feature (17)..(289): Homolog of NCBI NO: 26449939 NR Description: unknown protein [Arabidopsis thaliana]
  misc_feature (17)..(289): Homolog of NCBI NO: 21742149 NR Description: OSJNBa0069D17.4 [Oryza sativa (japonica
  misc_feature (17)..(289): Homolog of NCBI NO: 30681265 NR Description: expressed protein [Arabidopsis thaliana]
  misc_feature (17)..(289): Homolog of NCBI NO: 15229534 NR Description: unknown protein; protein id: At3g23870.1
  misc_feature (17)..(289): Homolog of NCBI NO: 21593618 NR Description: unknown [Arabidopsis thaliana]
  misc_feature (17)..(289): Homolog of NCBI NO: 18414079 NR Description: expressed protein
  misc_feature (4)..(290): Homolog of NCBI NO: 25406128 NR Description: unknown protein F17M19.5 [imported] - Arabidopsis
  misc_feature (4)..(290): Homolog of NCBI NO: 18409942 NR Description: expressed protein
  misc_feature (4)..(290): Homolog of NCBI NO: 18399280 NR Description: expressed protein
  misc_feature (8)..(290): Homolog of NCBI NO: 20161440 NR Description: B1065E10.15 [Oryza sativa (japonica
MGGAQLVGRWVESYTGMSTDNIKGLLLALSSSLFIGASFIVKKKGLKKAAASGVRAGVGGYSYLLEPLWWAGMVTMIVGEIANFAAYAFAPAILVTPLGALSIIISAVLAHIMLREKLHTFGILGCILCVVGSTTIVLHAPPERQIESVAEVWDLATEPAFLCYAAVVLAAAFVLIFHFVPEYGQTHIMVYVGICSLVGSLSVMSVKALGIALKLTFSGMNQLVYPQTWVFSSVVTLCIVTQMNYLNKALDTFNTAVVSPIYYTMFTSLTILASVIMFKDWDRQNPTQIVRRCAASLQSFLELFFFTRQRIWWMVSHQIYRFGFLNMRMRTATLLKEFLSDPLLTVFRSGHQGLQIHFARHDAPLRFACALKSCHLKAHTQQASVLYIHGKGKITLHSLGWIHNVGLAVGFKR

SEQ ID NO: 18812 - protein, 397 aa, Zea mays subsp. mays
  peptide (1)..(397): Ceres Seq. ID no. 12362575
  misc_feature (1)..(274): Pfam Name: Protein of unknown function (DUF803) Pfam Description: Protein of unknown function (DUF803)
  misc_feature (1)..(273): Homolog of NCBI NO: 26449939 NR Description: unknown protein [Arabidopsis thaliana]
  misc_feature (1)..(273): Homolog of NCBI NO: 21742149 NR Description: OSJNBa0069D17.4 [Oryza sativa (japonica
  misc_feature (1)..(273): Homolog of NCBI NO: 30681265 NR Description: expressed protein [Arabidopsis thaliana]
  misc_feature (1)..(273): Homolog of NCBI NO: 15229534 NR Description: unknown protein; protein id: At3g23870.1
  misc_feature (1)..(273): Homolog of NCBI NO: 21593618 NR Description: unknown [Arabidopsis thaliana]
  misc_feature (1)..(273): Homolog of NCBI NO: 18414079 NR Description: expressed protein
  misc_feature (1)..(274): Homolog of NCBI NO: 25406128 NR Description: unknown protein F17M19.5 [imported] - Arabidopsis
  misc_feature (1)..(274): Homolog of NCBI NO: 18409942 NR Description: expressed protein
  misc_feature (1)..(274): Homolog of NCBI NO: 18399280 NR Description: expressed protein
  misc_feature (1)..(274): Homolog of NCBI NO: 20161440 NR Description: B1065E10.15 [Oryza sativa (japonica
MSTDNIKGLLLALSSSLFIGASFIVKKKGLKKAAASGVRAGVGGYSYLLEPLWWAGMVTMIVGEIANFAAYAFAPAILVTPLGALSIIISAVLAHIMLREKLHTFGILGCILCVVGSTTIVLHAPPERQIESVAEVWDLATEPAFLCYAAVVLAAAFVLIFHFVPEYGQTHIMVYVGICSLVGSLSVMSVKALGIALKLTFSGMNQLVYPQTWVFSSVVTLCIVTQMNYLNKALDTFNTAVVSPIYYTMFTSLTILASVIMFKDWDRQNPTQIVRRCAASLQSFLELFFFTRQRIWWMVSHQIYRFGFLNMRMRTATLLKEFLSDPLLTVFRSGHQGLQIHFARHDAPLRFACALKSCHLKAHTQQASVLYIHGKGKITLHSLGWIHNVGLAVGFKR

SEQ ID NO: 18813 - protein, 341 aa, Zea mays subsp. mays
  peptide (1)..(341): Ceres Seq. ID no. 12362576
  misc_feature (1)..(218): Pfam Name: Protein of unknown function (DUF803) Pfam Description: Protein of unknown function (DUF803)
  misc_feature (1)..(217): Homolog of NCBI NO: 26449939 NR Description: unknown protein [Arabidopsis thaliana]
  misc_feature (1)..(217): Homolog of NCBI NO: 21742149 NR Description: OSJNBa0069D17.4 [Oryza sativa (japonica
  misc_feature (1)..(217): Homolog of NCBI NO: 30681265 NR Description: expressed protein [Arabidopsis thaliana]
  misc_feature (1)..(217): Homolog of NCBI NO: 15229534 NR Description: unknown protein; protein id: At3g23870.1
  misc_feature (1)..(217): Homolog of NCBI NO: 21593618 NR Description: unknown [Arabidopsis thaliana]
  misc_feature (1)..(217): Homolog of NCBI NO: 18414079 NR Description: expressed protein
  misc_feature (1)..(218): Homolog of NCBI NO: 25406128 NR Description: unknown protein F17M19.5 [imported] - Arabidopsis
  misc_feature (1)..(218): Homolog of NCBI NO: 18409942 NR Description: expressed protein
  misc_feature (1)..(218): Homolog of NCBI NO: 18399280 NR Description: expressed protein
  misc_feature (1)..(218): Homolog of NCBI NO: 20161440 NR Description: B1065E10.15 [Oryza sativa (japonica
MVTMIVGEIANFAAYAFAPAILVTPLGALSIIISAVLAHIMLREKLHTFGILGCILCVVGSTTIVLHAPPERQIESVAEVWDLATEPAFLCYAAVVLAAAFVLIFHFVPEYGQTHIMVYVGICSLVGSLSVMSVKALGIALKLTFSGMNQLVYPQTWVFSSVVTLCIVTQMNYLNKALDTFNTAVVSPIYYTMFTSLTILASVIMFKDWDRQNPTQIVRRCAASLQSFLELFFFTRQRIWWMVSHQIYRFGFLNMRMRTATLLKEFLSDPLLTVFRSGHQGLQIHFARHDAPLRFACALKSCHLKAHTQQASVLYIHGKGKITLHSLGWIHNVGLAVGFKR

SEQ ID NO: 18814 - DNA, 990 bp, Zea mays subsp. mays
  misc_feature (1)..(990): Ceres Seq. ID no. 12375677
  misc_feature: MA Experiment ID: 108504 Result: Up-regulated in Transcription
  misc_feature: MA Experiment 108504 PARAMETER Experiment Name: Zm_Drought_P Parameter: Age (day) Value: 8
  misc_feature: MA Experiment 108504 PARAMETER Experiment Name: Zm_Drought_P Parameter: Organism Value: Zea mays
  misc_feature: MA Experiment 108504 PARAMETER Experiment Name: Zm_Drought_P Parameter: Plant Line Value: 35A19
  misc_feature: MA Experiment 108504 PARAMETER Experiment Name: Zm_Drought_P Parameter: Timepoint (hr) Value: 12
  misc_feature: MA Experiment 108504 PARAMETER Experiment Name: Zm_Drought_P Parameter: Tissue Value: Aerial
  misc_feature: MA Experiment 108504 PARAMETER Experiment Name: Zm_Drought_P Parameter: Treatment Value: Drought vs. No Drought
  misc_feature: MA Experiment ID: 108527 Result: Up-regulated in Transcription
  misc_feature: MA Experiment 108527 PARAMETER Experiment Name: Zm_5mM_NO_P Parameter: Age (day) Value: 8
  misc_feature: MA Experiment 108527 PARAMETER Experiment Name: Zm_5mM_NO_P Parameter: Organism Value: Zea mays
  misc_feature: MA Experiment 108527 PARAMETER Experiment Name: Zm_5mM_NO_P Parameter: Plant Line Value: 35A19
  misc_feature: MA Experiment 108527 PARAMETER Experiment Name: Zm_5mM_NO_P Parameter: Timepoint (hr) Value: 6
  misc_feature: MA Experiment 108527 PARAMETER Experiment Name: Zm_5mM_NO_P Parameter: Tissue Value: Aerial
  misc_feature: MA Experiment 108527 PARAMETER Experiment Name: Zm_5mM_NO_P Parameter: Treatment Value: 5mM NO vs. No Treatment
  misc_feature: MA Experiment ID: 108536 Result: Up-regulated in Transcription
  misc_feature: MA Experiment 108536 PARAMETER Experiment Name: Zm_Meristem_P Parameter: Age (day) Value: 8
  misc_feature: MA Experiment 108536 PARAMETER Experiment Name: Zm_Meristem_P Parameter: Organism Value: Zea mays
  misc_feature: MA Experiment 108536 PARAMETER Experiment Name: Zm_Meristem_P Parameter: Plant Line Value: 35A19
  misc_feature: MA Experiment 108536 PARAMETER Experiment Name: Zm_Meristem_P Parameter: Tissue Value: Shoot Meristem vs. Above Shoot Meristem
  misc_feature: MA Experiment ID: 108540 Result: Up-regulated in Transcription
  misc_feature: MA Experiment 108540 PARAMETER Experiment Name: Zm_20percent_PEG_P Parameter: Age (day) Value: 8
  misc_feature: MA Experiment 108540 PARAMETER Experiment Name: Zm_20percent_PEG_P Parameter: Organism Value: Zea mays
  misc_feature: MA Experiment 108540 PARAMETER Experiment Name: Zm_20percent_PEG_P Parameter: Plant Line Value: 35A19
  misc_feature: MA Experiment 108540 PARAMETER Experiment Name: Zm_20percent_PEG_P Parameter: Timepoint (hr) Value: 6
  misc_feature: MA Experiment 108540 PARAMETER Experiment Name: Zm_20percent_PEG_P Parameter: Tissue Value: Aerial
  misc_feature: MA Experiment 108540 PARAMETER Experiment Name: Zm_20percent_PEG_P Parameter: Treatment Value: 20percent PEG vs. No Treatment
  misc_feature: MA Experiment ID: 108556 Result: Up-regulated in Transcription
  misc_feature: MA Experiment 108556 PARAMETER Experiment Name: Zm_Drought_P Parameter: Age (day) Value: 9
  misc_feature: MA Experiment 108556 PARAMETER Experiment Name: Zm_Drought_P Parameter: Organism Value: Zea mays
  misc_feature: MA Experiment 108556 PARAMETER Experiment Name: Zm_Drought_P Parameter: Plant Line Value: 35A19
  misc_feature: MA Experiment 108556 PARAMETER Experiment Name: Zm_Drought_P Parameter: Timepoint (hr) Value: 24
  misc_feature: MA Experiment 108556 PARAMETER Experiment Name: Zm_Drought_P Parameter: Tissue Value: Aerial
  misc_feature: MA Experiment 108556 PARAMETER Experiment Name: Zm_Drought_P Parameter: Treatment Value: Drought vs. No Drought
  misc_feature: MA Experiment ID: 108559 Result: Up-regulated in Transcription
  misc_feature: MA Experiment 108559 PARAMETER Experiment Name: Zm_5mM_NO_P Parameter: Age (day) Value: 8
  misc_feature: MA Experiment 108559 PARAMETER Experiment Name: Zm_5mM_NO_P Parameter: Organism Value: Zea mays
  misc_feature: MA Experiment 108559 PARAMETER Experiment Name: Zm_5mM_NO_P Parameter: Plant Line Value: 35A19
  misc_feature: MA Experiment 108559 PARAMETER Experiment Name: Zm_5mM_NO_P Parameter: Timepoint (hr) Value: 12
  misc_feature: MA Experiment 108559 PARAMETER Experiment Name: Zm_5mM_NO_P Parameter: Tissue Value: Aerial
  misc_feature: MA Experiment 108559 PARAMETER Experiment Name: Zm_5mM_NO_P Parameter: Treatment Value: 5mM NO vs. No Treatment
  misc_feature: MA Experiment ID: 108687 Result: Up-regulated in Transcription
  misc_feature: MA Experiment 108687 PARAMETER Experiment Name: Zm_Embryos-Flowers__P Parameter: Tissue Value: Embryo vs. Aerial+
  misc_feature: MA Experiment ID: 20000477 Result: Up-regulated in Transcription
  misc_feature: MA Experiment 20000477 PARAMETER Experiment Name: Zm_5mM_SA_P Parameter: Age (day) Value: 10
  misc_feature: MA Experiment 20000477 PARAMETER Experiment Name: Zm_5mM_SA_P Parameter: Organism Value: Zea mays
  misc_feature: MA Experiment 20000477 PARAMETER Experiment Name: Zm_5mM_SA_P Parameter: Plant Line Value: 35A19
  misc_feature: MA Experiment 20000477 PARAMETER Experiment Name: Zm_5mM_SA_P Parameter: Timepoint (hr) Value: 48
  misc_feature: MA Experiment 20000477 PARAMETER Experiment Name: Zm_5mM_SA_P Parameter: Tissue Value: Aerial
  misc_feature: MA Experiment 20000477 PARAMETER Experiment Name: Zm_5mM_SA_P Parameter: Treatment Value: 5mM SA vs. No Treatment
  misc_feature: MA Experiment ID: 20000478 Result: Up-regulated in Transcription
  misc_feature: MA Experiment 20000478 PARAMETER Experiment Name: Zm_5mM_SA_P Parameter: Age (day) Value: 11
  misc_feature: MA Experiment 20000478 PARAMETER Experiment Name: Zm_5mM_SA_P Parameter: Organism Value: Zea mays
  misc_feature: MA Experiment 20000478 PARAMETER Experiment Name: Zm_5mM_SA_P Parameter: Plant Line Value: 35A19
  misc_feature: MA Experiment 20000478 PARAMETER Experiment Name: Zm_5mM_SA_P Parameter: Timepoint (hr) Value: 72
  misc_feature: MA Experiment 20000478 PARAMETER Experiment Name: Zm_5mM_SA_P Parameter: Tissue Value: Aerial
  misc_feature: MA Experiment 20000478 PARAMETER Experiment Name: Zm_5mM_SA_P Parameter: Treatment Value: 5mM SA vs. No Treatment
  misc_feature: MA Experiment ID: 20000479 Result: Up-regulated in Transcription
  misc_feature: MA Experiment 20000479 PARAMETER Experiment Name: Zm_Drought_P Parameter: Age (day) Value: 10
  misc_feature: MA Experiment 20000479 PARAMETER Experiment Name: Zm_Drought_P Parameter: Organism Value: Zea mays
  misc_feature: MA Experiment 20000479 PARAMETER Experiment Name: Zm_Drought_P Parameter: Plant Line Value: 35A19
  misc_feature: MA Experiment 20000479 PARAMETER Experiment Name: Zm_Drought_P Parameter: Timepoint (hr) Value: 48
  misc_feature: MA Experiment 20000479 PARAMETER Experiment Name: Zm_Drought_P Parameter: Tissue Value: Aerial
  misc_feature: MA Experiment 20000479 PARAMETER Experiment Name: Zm_Drought_P Parameter: Treatment Value: Drought vs. No Drought
  misc_feature: MA Experiment ID: 20000480 Result: Up-regulated in Transcription
  misc_feature: MA Experiment 20000480 PARAMETER Experiment Name: Zm_Drought_P Parameter: Age (day) Value: 11
  misc_feature: MA Experiment 20000480 PARAMETER Experiment Name: Zm_Drought_P Parameter: Organism Value: Zea mays
  misc_feature: MA Experiment 20000480 PARAMETER Experiment Name: Zm_Drought_P Parameter: Plant Line Value: 35A19
  misc_feature: MA Experiment 20000480 PARAMETER Experiment Name: Zm_Drought_P Parameter: Timepoint (hr) Value: 72
  misc_feature: MA Experiment 20000480 PARAMETER Experiment Name: Zm_Drought_P Parameter: Tissue Value: Aerial
  misc_feature: MA Experiment 20000480 PARAMETER Experiment Name: Zm_Drought_P Parameter: Treatment Value: Drought vs. No Drought
  misc_feature: MA Experiment ID: 20000626 Result: Down-regulated in Transcription
  misc_feature: MA Experiment 20000626 PARAMETER Experiment Name: Zm_Herbicide-Treatments_P Parameter: Timepoint (hr) Value: 12
  misc_feature: MA Experiment 20000626 PARAMETER Experiment Name: Zm_Herbicide-Treatments_P Parameter: Tissue Value: Aerial
  misc_feature: MA Experiment 20000626 PARAMETER Experiment Name: Zm_Herbicide-Treatments_P Parameter: Treatment Value: Roundup vs. No Treatment
  misc_feature: MA Experiment ID: 20000629 Result: Down-regulated in Transcription
  misc_feature: MA Experiment 20000629 PARAMETER Experiment Name: Zm_Herbicide-Treatments_P Parameter: Timepoint (hr) Value: 12
  misc_feature: MA Experiment 20000629 PARAMETER Experiment Name: Zm_Herbicide-Treatments_P Parameter: Tissue Value: Aerial
  misc_feature: MA Experiment 20000629 PARAMETER Experiment Name: Zm_Herbicide-Treatments_P Parameter: Treatment Value: Trimec vs. No Treatment
  misc_feature: MA Experiment ID: 20001608 Result: Up-regulated in Transcription
  misc_feature: MA Experiment 20001608 PARAMETER Experiment Name: Zm_50ppm_KNO3_L-to-H_P Parameter: Age (day) Value: 21
  misc_feature: MA Experiment 20001608 PARAMETER Experiment Name: Zm_50ppm_KNO3_L-to-H_P Parameter: Organism Value: Zea mays
  misc_feature: MA Experiment 20001608 PARAMETER Experiment Name: Zm_50ppm_KNO3_L-to-H_P Parameter: Plant Line Value: 35A19
  misc_feature: MA Experiment 20001608 PARAMETER Experiment Name: Zm_50ppm_KNO3_L-to-H_P Parameter: Timepoint (hr) Value: 48
  misc_feature: MA Experiment 20001608 PARAMETER Experiment Name: Zm_50ppm_KNO3_L-to-H_P Parameter: Tissue Value: Shoots
  misc_feature: MA Experiment 20001608 PARAMETER Experiment Name: Zm_50ppm_KNO3_L-to-H_P Parameter: Treatment Value: 50ppm KNO3 vs. 50ppm KCl
  misc_feature: MA Experiment ID: 20001613 Result: Up-regulated in Transcription
  misc_feature: MA Experiment 20001613 PARAMETER Experiment Name: Zm_50ppm_KNO3_L-to-H_P Parameter: Age (day) Value: 20
  misc_feature: MA Experiment 20001613 PARAMETER Experiment Name: Zm_50ppm_KNO3_L-to-H_P Parameter: Organism Value: Zea mays
  misc_feature: MA Experiment 20001613 PARAMETER Experiment Name: Zm_50ppm_KNO3_L-to-H_P Parameter: Plant Line Value: 35A19
  misc_feature: MA Experiment 20001613 PARAMETER Experiment Name: Zm_50ppm_KNO3_L-to-H_P Parameter: Timepoint (hr) Value: 24
  misc_feature: MA Experiment 20001613 PARAMETER Experiment Name: Zm_50ppm_KNO3_L-to-H_P Parameter: Tissue Value: Roots
  misc_feature: MA Experiment 20001613 PARAMETER Experiment Name: Zm_50ppm_KNO3_L-to-H_P Parameter: Treatment Value: 50ppm KNO3 vs. 50ppm KCl
  misc_feature: MA Experiment ID: 20001614 Result: Up-regulated in Transcription
  misc_feature: MA Experiment 20001614 PARAMETER Experiment Name: Zm_50ppm_KNO3_L-to-H_P Parameter: Age (day) Value: 21
  misc_feature: MA Experiment 20001614 PARAMETER Experiment Name: Zm_50ppm_KNO3_L-to-H_P Parameter: Organism Value: Zea mays
  misc_feature: MA Experiment 20001614 PARAMETER Experiment Name: Zm_50ppm_KNO3_L-to-H_P Parameter: Plant Line Value: 35A19
  misc_feature: MA Experiment 20001614 PARAMETER Experiment Name: Zm_50ppm_KNO3_L-to-H_P Parameter: Timepoint (hr) Value: 48
  misc_feature: MA Experiment 20001614 PARAMETER Experiment Name: Zm_50ppm_KNO3_L-to-H_P Parameter: Tissue Value: Roots
  misc_feature: MA Experiment 20001614 PARAMETER Experiment Name: Zm_50ppm_KNO3_L-to-H_P Parameter: Treatment Value: 50ppm KNO3 vs. 50ppm KCl
cttcgatcggtccatggctgtcgtcacgagggacgcggcgtgcctgcccctcgtcctcttgctcctagtcttctccgcggccccgtctccggctgacggctgcgaccgctgcgtgcgccggtccaaggccacctactaccaggcctcctcgctcgccctcaacgccgggtcgtgcgggtacggctccttggccgcgtccctcaacggcggcctgctcgccgcagccagccccgagctgtacaggggcggcgtcggctgcggcgcctgcttccaggtgcggtgcagggacagcgagctgtgcagcgccgccggcgccaaggtggtggtgacggaccaggcgcggacgtcgaaccgcacggcgctggtgctgagcgccgcggcgtacgcggccatggccagtgccggcaaggccgcgcgcctcagggaccggcgcgtcgtcgacgtcgagtacaagagggtaccctgcgagtacgcgaaggaccgcaacctgttgatacgcgtggaggagaagagccggccgccaagcaacctgtccatcaggttcctgtaccagggcggccagaccgacatcgtcgccgtcgacgtcgccaccgtggggtcgtccaactggcggttcatggcgcgggaccacgggccggcgtggagcacggcgcaggcgccgccggggccgctgcagttccggctggtggtgaccggtggctacgacggcaagtgggtgtgggcggagtcggaggtgctgccgcgccggtgggaggccggccgcgtctacgacgccggggtgcaggtctccgacgtcgcgcaggaagggtgctacccctgcgacacgcgcgagtggcagtgacgtgacgcgcgcacgggctggattgtagtagattgtacagttttttttttttggtcgggaatgggacgaaagatatgaaatgatgatgagcggagccggagagccgaatcaaaccaaatcaaacaaacgtgccgttgcaagttggttct

SEQ ID NO: 18815 - protein, 279 aa, Zea mays subsp. mays
  peptide (1)..(279): Ceres Seq. ID no. 12375678
  misc_feature (163)..(247): Pfam Name: Pollen allergen Pfam Description: Pollen allergen
  misc_feature (17)..(278): Homolog of NCBI NO: 15233841 NR Description: putative pollen allergen
  misc_feature (18)..(279): Homolog of NCBI NO: 33111959 NR Description: expansin-like protein [Quercus robur]
  misc_feature (15)..(273): Homolog of NCBI NO: 20138389 NR Description: Expansin-like 3 precursor (At-EXPL3)
  misc_feature (17)..(278): Homolog of NCBI NO: 15231303 NR Description: putative protein
  misc_feature (15)..(278): Homolog of NCBI NO: 21555265 NR Description: Expansin-like 1 precursor (At-EXPL1)
  misc_feature (19)..(279): Homolog of NCBI NO: 34901594 NR Description: P0571D04.11 [Oryza sativa (japonica
  misc_feature (69)..(279): Homolog of NCBI NO: 25136297 NR Description: expansin-like protein [Oryza sativa (japonica
  misc_feature (18)..(279): Homolog of NCBI NO: 20502989 NR Description: Putative pollen allergen [Oryza sativa (japonica
  misc_feature (18)..(279): Homolog of NCBI NO: 21654743 NR Description: expansin-like protein 1 [Oryza sativa]
  misc_feature (13)..(279): Homolog of NCBI NO: 37536544 NR Description: putative pollen allergen [Oryza sativa (japonica
FDRSMAVVTRDAACLPLVLLLLVFSAAPSPADGCDRCVRRSKATYYQASSLALNAGSCGYGSLAASLNGGLLAAASPELYRGGVGCGACFQVRCRDSELCSAAGAKVVVTDQARTSNRTALVLSAAAYAAMASAGKAARLRDRRVVDVEYKRVPCEYAKDRNLLIRVEEKSRPPSNLSIRFLYQGGQTDIVAVDVATVGSSNWRFMARDHGPAWSTAQAPPGPLQFRLVVTGGYDGKWVWAESEVLPRRWEAGRVYDAGVQVSDVAQEGCYPCDTREWQ

SEQ ID NO: 18816 - protein, 275 aa, Zea mays subsp. mays
  peptide (1)..(275): Ceres Seq. ID no. 12375679
  misc_feature (159)..(243): Pfam Name: Pollen allergen Pfam Description: Pollen allergen
  misc_feature (13)..(274): Homolog of NCBI NO: 15233841 NR Description: putative pollen allergen
  misc_feature (14)..(275): Homolog of NCBI NO: 33111959 NR Description: expansin-like protein [Quercus robur]
  misc_feature (11)..(269): Homolog of NCBI NO: 20138389 NR Description: Expansin-like 3 precursor (At-EXPL3)
  misc_feature (13)..(274): Homolog of NCBI NO: 15231303 NR Description: putative protein
  misc_feature (11)..(274): Homolog of NCBI NO: 21555265 NR Description: Expansin-like 1 precursor (At-EXPL1)
  misc_feature (15)..(275): Homolog of NCBI NO: 34901594 NR Description: P0571D04.11 [Oryza sativa (japonica
  misc_feature (65)..(275): Homolog of NCBI NO: 25136297 NR Description: expansin-like protein [Oryza sativa (japonica
  misc_feature (14)..(275): Homolog of NCBI NO: 20502989 NR Description: Putative pollen allergen [Oryza sativa (japonica
  misc_feature (14)..(275): Homolog of NCBI NO: 21654743 NR Description: expansin-like protein 1 [Oryza sativa]
  misc_feature (9)..(275): Homolog of NCBI NO: 37536544 NR Description: putative pollen allergen [Oryza sativa (japonica
MAVVTRDAACLPLVLLLLVFSAAPSPADGCDRCVRRSKATYYQASSLALNAGSCGYGSLAASLNGGLLAAASPELYRGGVGCGACFQVRCRDSELCSAAGAKVVVTDQARTSNRTALVLSAAAYAAMASAGKAARLRDRRVVDVEYKRVPCEYAKDRNLLIRVEEKSRPPSNLSIRFLYQGGQTDIVAVDVATVGSSNWRFMARDHGPAWSTAQAPPGPLQFRLVVTGGYDGKWVWAESEVLPRRWEAGRVYDAGVQVSDVAQEGCYPCDTREWQ

SEQ ID NO: 18817 - protein, 149 aa, Zea mays subsp. mays
  peptide (1)..(149): Ceres Seq. ID no. 12375680
  misc_feature (33)..(117): Pfam Name: Pollen allergen Pfam Description: Pollen allergen
  misc_feature (1)..(148): Homolog of NCBI NO: 15233841 NR Description: putative pollen allergen
  misc_feature (1)..(149): Homolog of NCBI NO: 33111959 NR Description: expansin-like protein [Quercus robur]
  misc_feature (1)..(143): Homolog of NCBI NO: 20138389 NR Description: Expansin-like 3 precursor (At-EXPL3)
  misc_feature (1)..(148): Homolog of NCBI NO: 15231303 NR Description: putative protein
  misc_feature (1)..(148): Homolog of NCBI NO: 21555265 NR Description: Expansin-like 1 precursor (At-EXPL1)
  misc_feature (1)..(149): Homolog of NCBI NO: 34901594 NR Description: P0571D04.11 [Oryza sativa (japonica
  misc_feature (1)..(149): Homolog of NCBI NO: 25136297 NR Description: expansin-like protein [Oryza sativa (japonica
  misc_feature (1)..(149): Homolog of NCBI NO: 20502989 NR Description: Putative pollen allergen [Oryza sativa (japonica
  misc_feature (1)..(149): Homolog of NCBI NO: 21654743 NR Description: expansin-like protein 1 [Oryza sativa]
  misc_feature (1)..(149): Homolog of NCBI NO: 37536544 NR Description: putative pollen allergen [Oryza sativa (japonica
MASAGKAARLRDRRVVDVEYKRVPCEYAKDRNLLIRVEEKSRPPSNLSIRFLYQGGQTDIVAVDVATVGSSNWRFMARDHGPAWSTAQAPPGPLQFRLVVTGGYDGKWVWAESEVLPRRWEAGRVYDAGVQVSDVAQEGCYPCDTREWQ

SEQ ID NO: 18818 - DNA, 528 bp, Zea mays subsp. mays; identical to SEQ ID NO: 11689
  misc_feature (1)..(528): Ceres Seq. ID no. 13492510
  misc_feature: MA Experiment ID: 108530 Result: Down-regulated in Transcription
  misc_feature: MA Experiment 108530 PARAMETER Experiment Name: Zm_Imbibed_Seeds_P Parameter: Age (day) Value: 6 vs. 2
  misc_feature: MA Experiment 108530 PARAMETER Experiment Name: Zm_Imbibed_Seeds_P Parameter: Organism Value: Zea mays
  misc_feature: MA Experiment 108530 PARAMETER Experiment Name: Zm_Imbibed_Seeds_P Parameter: Plant Line Value: 35A19
  misc_feature: MA Experiment 108530 PARAMETER Experiment Name: Zm_Imbibed_Seeds_P Parameter: Tissue Value: Aerial vs. Embryo
  misc_feature: MA Experiment ID: 108535 Result: Up-regulated in Transcription
  misc_feature: MA Experiment 108535 PARAMETER Experiment Name: Zm_Meristem_P Parameter: Age (day) Value: 8
  misc_feature: MA Experiment 108535 PARAMETER Experiment Name: Zm_Meristem_P Parameter: Organism Value: Zea mays
  misc_feature: MA Experiment 108535 PARAMETER Experiment Name: Zm_Meristem_P Parameter: Plant Line Value: 35A19
  misc_feature: MA Experiment 108535 PARAMETER Experiment Name: Zm_Meristem_P Parameter: Tissue Value: Root Meristem vs. Above Root Meristem
  misc_feature: MA Experiment ID: 20000108 Result: Up-regulated in Transcription
  misc_feature: MA Experiment 20000108 PARAMETER Experiment Name: Zm_Root-Tips_P Parameter: Age (day) Value: 12
  misc_feature: MA Experiment 20000108 PARAMETER Experiment Name: Zm_Root-Tips_P Parameter: Organism Value: Zea mays
  misc_feature: MA Experiment 20000108 PARAMETER Experiment Name: Zm_Root-Tips_P Parameter: Tissue Value: Root tips vs. Root mid region    35
  misc_feature: MA Experiment 20000108 PARAMETER Experiment Name: Zm_Root-Tips_P Parameter: Tissue Value: Root tips vs. Root mid region   Sequence Listing-Misc Features (4)
  misc_feature: MA Experiment ID: 20000487 Result: Up-regulated in Transcription
  misc_feature: MA Experiment 20000487 PARAMETER Experiment Name: Zm_50mM_NH4NO3_L_to_H_P Parameter: Organism Value: Zea mays
  misc_feature: MA Experiment 20000487 PARAMETER Experiment Name: Zm_50mM_NH4NO3_L_to_H_P Parameter: Timepoint (hr) Value: 4
  misc_feature: MA Experiment 20000487 PARAMETER Experiment Name: Zm_50mM_NH4NO3_L_to_H_P Parameter: Tissue Value: Leaves
  misc_feature: MA Experiment 20000487 PARAMETER Experiment Name: Zm_50mM_NH4NO3_L_to_H_P Parameter: Treatment Value: 50mM NH4NO3 vs. 100mM Mannitol
  misc_feature: MA Experiment ID: 20000488 Result: Up-regulated in Transcription
  misc_feature: MA Experiment 20000488 PARAMETER Experiment Name: Zm_50mM_NH4NO3_L_to_H_P Parameter: Organism Value: Zea mays
  misc_feature: MA Experiment 20000488 PARAMETER Experiment Name: Zm_50mM_NH4NO3_L_to_H_P Parameter: Timepoint (hr) Value: 8
  misc_feature: MA Experiment 20000488 PARAMETER Experiment Name: Zm_50mM_NH4NO3_L_to_H_P Parameter: Tissue Value: Leaves
  misc_feature: MA Experiment 20000488 PARAMETER Experiment Name: Zm_50mM_NH4NO3_L_to_H_P Parameter: Treatment Value: 50mM NH4NO3 vs. 100mM Mannitol
  misc_feature: MA Experiment ID: 20000492 Result: Up-regulated in Transcription
  misc_feature: MA Experiment 20000492 PARAMETER Experiment Name: Zm_Hybrid_Seed_Dev_P Parameter: DAP Value: 12
  misc_feature: MA Experiment 20000492 PARAMETER Experiment Name: Zm_Hybrid_Seed_Dev_P Parameter: Organism Value: Zea mays
  misc_feature: MA Experiment 20000492 PARAMETER Experiment Name: Zm_Hybrid_Seed_Dev_P Parameter: Plant Line Value: 35A19
  misc_feature: MA Experiment 20000492 PARAMETER Experiment Name: Zm_Hybrid_Seed_Dev_P Parameter: Tissue Value: Fert Kernel vs. Unfert Floret
  misc_feature: MA Experiment ID: 20000535 Result: Up-regulated in Transcription
  misc_feature: MA Experiment 20000535 PARAMETER Experiment Name: Zm_Hybrid_Seed_Dev_P Parameter: DAP Value: 30 vs. 12
  misc_feature: MA Experiment 20000535 PARAMETER Experiment Name: Zm_Hybrid_Seed_Dev_P Parameter: Organism Value: Zea mays
  misc_feature: MA Experiment 20000535 PARAMETER Experiment Name: Zm_Hybrid_Seed_Dev_P Parameter: Plant Line Value: 35A19
  misc_feature: MA Experiment 20000535 PARAMETER Experiment Name: Zm_Hybrid_Seed_Dev_P Parameter: Tissue Value: Embryo vs. Unfert Floret
  misc_feature: MA Experiment ID: 20000632 Result: Down-regulated in Transcription
  misc_feature: MA Experiment 20000632 PARAMETER Experiment Name: Zm_Herbicide-Treatments_P Parameter: Timepoint (hr) Value: 4
  misc_feature: MA Experiment 20000632 PARAMETER Experiment Name: Zm_Herbicide-Treatments_P Parameter: Tissue Value: Aerial
  misc_feature: MA Experiment 20000632 PARAMETER Experiment Name: Zm_Herbicide-Treatments_P Parameter: Treatment Value: Glean vs. No Treatment
  misc_feature: MA Experiment ID: 20000633 Result: Down-regulated in Transcription
  misc_feature: MA Experiment 20000633 PARAMETER Experiment Name: Zm_Herbicide-Treatments_P Parameter: Timepoint (hr) Value: 4
  misc_feature: MA Experiment 20000633 PARAMETER Experiment Name: Zm_Herbicide-Treatments_P Parameter: Tissue Value: Aerial
  misc_feature: MA Experiment 20000633 PARAMETER Experiment Name: Zm_Herbicide-Treatments_P Parameter: Treatment Value: Trimec vs. No Treatment
  misc_feature: MA Experiment ID: 20001606 Result: Up-regulated in Transcription
  misc_feature: MA Experiment 20001606 PARAMETER Experiment Name: Zm_50ppm_KNO3_L-to-H_P Parameter: Age (day) Value: 19
  misc_feature: MA Experiment 20001606 PARAMETER Experiment Name: Zm_50ppm_KNO3_L-to-H_P Parameter: Organism Value: Zea mays
  misc_feature: MA Experiment 20001606 PARAMETER Experiment Name: Zm_50ppm_KNO3_L-to-H_P Parameter: Plant Line Value: 35A19
  misc_feature: MA Experiment 20001606 PARAMETER Experiment Name: Zm_50ppm_KNO3_L-to-H_P Parameter: Timepoint (hr) Value: 8
  misc_feature: MA Experiment 20001606 PARAMETER Experiment Name: Zm_50ppm_KNO3_L-to-H_P Parameter: Tissue Value: Shoots
  misc_feature: MA Experiment 20001606 PARAMETER Experiment Name: Zm_50ppm_KNO3_L-to-H_P Parameter: Treatment Value: 50ppm KNO3 vs. 50ppm KCl

SEQ ID NO: 18819 - protein, 175 aa, Zea mays subsp. mays; identical to SEQ ID NO: 11690
  peptide (1)..(175): Ceres Seq. ID no. 13492511
  misc_feature (83)..(171): Pfam Name: Elongation factor Tu GTP binding domain Pfam Description: Elongation factor Tu GTP binding domain
  misc_feature (20)..(171): Homolog of NCBI NO: 11181616 NR Description: translational elongation factor EF-TuM [Zea mays]
  misc_feature (20)..(171): Homolog of NCBI NO: 18001149 NR Description: translational elongation factor Tu [Oryza sativa] elongation factor Tu [Oryza sativa] >gi|27573344|gb|AAO20062.1|
  misc_feature (20)..(171): Homolog of NCBI NO: 15236220 NR Description: elongation factor Tu (EF-Tu), putative thaliana] >gi|25090254|sp|Q9ZT91|EFTM_ARATH Elongation factor Tu,
  misc_feature (67)..(171): Homolog of NCBI NO: 1149571 NR Description: mitochondrial elongation factor Tu [Arabidopsis
  misc_feature (75)..(171): Homolog of NCBI NO: 18311389 NR Description: elongation factor Tu [Clostridium perfringens]
  misc_feature (35)..(171): Homolog of NCBI NO: 22966137 NR Description: hypothetical protein [Rhodospirillum rubrum]
  misc_feature (79)..(171): Homolog of NCBI NO: 20808662 NR Description: GTPases - translation elongation factors
  misc_feature (79)..(171): Homolog of NCBI NO: 20808676 NR Description: GTPases - translation elongation factors
  misc_feature (72)..(171): Homolog of NCBI NO: 22965193 NR Description: hypothetical protein [Rhodopseudomonas palustris]
  misc_feature (77)..(171): Homolog of NCBI NO: 39997951 NR Description: translation elongation factor Tu [Geobacter PCA] >gi|39997962|ref|NP_953913.1| translation elongation factor [Geobacter sulfurreducens PCA] >gi|39984896|gb|AAR36252.1|

SEQ ID NO: 18820 - protein, 156 aa, Zea mays subsp. mays; identical to SEQ ID NO: 11691
  peptide (1)..(156): Ceres Seq. ID no. 13492512
  misc_feature (64)..(152): Pfam Name: Elongation factor Tu GTP binding domain Pfam Description: Elongation factor Tu GTP binding domain
  misc_feature (1)..(152): Homolog of NCBI NO: 18001149 NR Description: translational elongation factor Tu [Oryza sativa] elongation factor Tu [Oryza sativa] >gi|27573344|gb|AAO20062.1|
  misc_feature (1)..(152): Homolog of NCBI NO: 15236220 NR Description: elongation factor Tu (EF-Tu), putative thaliana] >gi|25090254|sp|Q9ZT91|EFTM_ARATH Elongation factor Tu,
  misc_feature (48)..(152): Homolog of NCBI NO: 1149571 NR Description: mitochondrial elongation factor Tu [Arabidopsis
  misc_feature (56)..(152): Homolog of NCBI NO: 18311389 NR Description: elongation factor Tu [Clostridium perfringens]
  misc_feature (16)..(152): Homolog of NCBI NO: 22966137 NR Description: hypothetical protein [Rhodospirillum rubrum]
  misc_feature (1)..(152): Homolog of NCBI NO: 11181616 NR Description: translational elongation factor EF-TuM [Zea mays]
  misc_feature (60)..(152): Homolog of NCBI NO: 20808662 NR Description: GTPases - translation elongation factors
  misc_feature (60)..(152): Homolog of NCBI NO: 20808676 NR Description: GTPases - translation elongation factors
  misc_feature (53)..(152): Homolog of NCBI NO: 22965193 NR Description: hypothetical protein [Rhodopseudomonas palustris]
  misc_feature (58)..(152): Homolog of NCBI NO: 39997951 NR Description: translation elongation factor Tu [Geobacter PCA] >gi|39997962|ref|NP_953913.1| translation elongation factor [Geobacter sulfurreducens PCA] >gi|39984896|gb|AAR36252.1|

SEQ ID NO: 18821 - protein, 143 aa, Zea mays subsp. mays; identical to SEQ ID NO: 11692
  peptide (1)..(143): Ceres Seq. ID no. 13492513

SEQ ID NO: 18822 - DNA, 1643 bp, Zea mays subsp. mays
  misc_feature (1)..(1643): Ceres Seq. ID no. 12368456
  misc_feature: MA Experiment ID: 108504 Result: Down-regulated in Transcription
  misc_feature: MA Experiment 108504 PARAMETER Experiment Name: Zm_Drought_P Parameter: Age (day) Value: 8
  misc_feature: MA Experiment 108504 PARAMETER Experiment Name: Zm_Drought_P Parameter: Organism Value: Zea mays
  misc_feature: MA Experiment 108504 PARAMETER Experiment Name: Zm_Drought_P Parameter: Plant Line Value: 35A19
  misc_feature: MA Experiment 108504 PARAMETER Experiment Name: Zm_Drought_P Parameter: Timepoint (hr) Value: 12
  misc_feature: MA Experiment 108504 PARAMETER Experiment Name: Zm_Drought_P Parameter: Tissue Value: Aerial
  misc_feature: MA Experiment 108504 PARAMETER Experiment Name: Zm_Drought_P Parameter: Treatment Value: Drought vs. No Drought
  misc_feature: MA Experiment ID: 108522 Result: Down-regulated in Transcription
  misc_feature: MA Experiment 108522 PARAMETER Experiment Name: Zm_42deg_Heat_P Parameter: Age (day) Value: 8
  misc_feature: MA Experiment 108522 PARAMETER Experiment Name: Zm_42deg_Heat_P Parameter: Organism Value: Zea mays
  misc_feature: MA Experiment 108522 PARAMETER Experiment Name: Zm_42deg_Heat_P Parameter: Plant Line Value: 35A19
  misc_feature: MA Experiment 108522 PARAMETER Experiment Name: Zm_42deg_Heat_P Parameter: Temperature (deg C) Value: 42 vs. 22
  misc_feature: MA Experiment 108522 PARAMETER Experiment Name: Zm_42deg_Heat_P Parameter: Timepoint (hr) Value: 1
  misc_feature: MA Experiment 108522 PARAMETER Experiment Name: Zm_42deg_Heat_P Parameter: Tissue Value: Aerial
  misc_feature: MA Experiment ID: 108526 Result: Down-regulated in Transcription
  misc_feature: MA Experiment 108526 PARAMETER Experiment Name: Zm_5mM_NO_P Parameter: Age (day) Value: 8
  misc_feature: MA Experiment 108526 PARAMETER Experiment Name: Zm_5mM_NO_P Parameter: Organism Value: Zea mays
  misc_feature: MA Experiment 108526 PARAMETER Experiment Name: Zm_5mM_NO_P Parameter: Plant Line Value: 35A19
  misc_feature: MA Experiment 108526 PARAMETER Experiment Name: Zm_5mM_NO_P Parameter: Timepoint (hr) Value: 1
  misc_feature: MA Experiment 108526 PARAMETER Experiment Name: Zm_5mM_NO_P Parameter: Tissue Value: Aerial
  misc_feature: MA Experiment 108526 PARAMETER Experiment Name: Zm_5mM_NO_P Parameter: Treatment Value: 5mM NO vs. No Treatment
  misc_feature: MA Experiment ID: 108527 Result: Down-regulated in Transcription
  misc_feature: MA Experiment 108527 PARAMETER Experiment Name: Zm_5mM_NO_P Parameter: Age (day) Value: 8
  misc_feature: MA Experiment 108527 PARAMETER Experiment Name: Zm_5mM_NO_P Parameter: Organism Value: Zea mays
  misc_feature: MA Experiment 108527 PARAMETER Experiment Name: Zm_5mM_NO_P Parameter: Plant Line Value: 35A19
  misc_feature: MA Experiment 108527 PARAMETER Experiment Name: Zm_5mM_NO_P Parameter: Timepoint (hr) Value: 6
  misc_feature: MA Experiment 108527 PARAMETER Experiment Name: Zm_5mM_NO_P Parameter: Tissue Value: Aerial
  misc_feature: MA Experiment 108527 PARAMETER Experiment Name: Zm_5mM_NO_P Parameter: Treatment Value: 5mM NO vs. No Treatment
  misc_feature: MA Experiment ID: 108528 Result: Up-regulated in Transcription
  misc_feature: MA Experiment 108528 PARAMETER Experiment Name: Zm_Imbibed_Seeds_P Parameter: Age (day) Value: 5 vs. 2
  misc_feature: MA Experiment 108528 PARAMETER Experiment Name: Zm_Imbibed_Seeds_P Parameter: Organism Value: Zea mays
  misc_feature: MA Experiment 108528 PARAMETER Experiment Name: Zm_Imbibed_Seeds_P Parameter: Plant Line Value: 35A19
  misc_feature: MA Experiment 108528 PARAMETER Experiment Name: Zm_Imbibed_Seeds_P Parameter: Tissue Value: Aerial vs. Embryo
  misc_feature: MA Experiment ID: 108530 Result: Up-regulated in Transcription
  misc_feature: MA Experiment 108530 PARAMETER Experiment Name: Zm_Imbibed_Seeds_P Parameter: Age (day) Value: 6 vs. 2
  misc_feature: MA Experiment 108530 PARAMETER Experiment Name: Zm_Imbibed_Seeds_P Parameter: Organism Value: Zea mays
  misc_feature: MA Experiment 108530 PARAMETER Experiment Name: Zm_Imbibed_Seeds_P Parameter: Plant Line Value: 35A19
  misc_feature: MA Experiment 108530 PARAMETER Experiment Name: Zm_Imbibed_Seeds_P Parameter: Tissue Value: Aerial vs. Embryo
  misc_feature: MA Experiment ID: 108536 Result: Down-regulated in Transcription
  misc_feature: MA Experiment 108536 PARAMETER Experiment Name: Zm_Meristem_P Parameter: Age (day) Value: 8
  misc_feature: MA Experiment 108536 PARAMETER Experiment Name: Zm_Meristem_P Parameter: Organism Value: Zea mays
  misc_feature: MA Experiment 108536 PARAMETER Experiment Name: Zm_Meristem_P Parameter: Plant Line Value: 35A19
  misc_feature: MA Experiment 108536 PARAMETER Experiment Name: Zm_Meristem_P Parameter: Tissue Value: Shoot Meristem vs. Above Shoot Meristem
  misc_feature: MA Experiment ID: 108540 Result: Down-regulated in Transcription
  misc_feature: MA Experiment 108540 PARAMETER Experiment Name: Zm_20percent_PEG_P Parameter: Age (day) Value: 8
  misc_feature: MA Experiment 108540 PARAMETER Experiment Name: Zm_20percent_PEG_P Parameter: Organism Value: Zea mays
  misc_feature: MA Experiment 108540 PARAMETER Experiment Name: Zm_20percent_PEG_P Parameter: Plant Line Value: 35A19
  misc_feature: MA Experiment 108540 PARAMETER Experiment Name: Zm_20percent_PEG_P Parameter: Timepoint (hr) Value: 6
  misc_feature: MA Experiment 108540 PARAMETER Experiment Name: Zm_20percent_PEG_P Parameter: Tissue Value: Aerial
  misc_feature: MA Experiment 108540 PARAMETER Experiment Name: Zm_20percent_PEG_P Parameter: Treatment Value: 20percent PEG vs. No Treatment
  misc_feature: MA Experiment ID: 108543 Result: Down-regulated in Transcription
  misc_feature: MA Experiment ID: 108545 Result: Up-regulated in Transcription
  misc_feature: MA Experiment 108545 PARAMETER Experiment Name: Zm_Imbibed_Seeds_P Parameter: Age (day) Value: 3 vs. 2
  misc_feature: MA Experiment 108545 PARAMETER Experiment Name: Zm_Imbibed_Seeds_P Parameter: Organism Value: Zea mays
  misc_feature: MA Experiment 108545 PARAMETER Experiment Name: Zm_Imbibed_Seeds_P Parameter: Plant Line Value: 35A19
  misc_feature: MA Experiment 108545 PARAMETER Experiment Name: Zm_Imbibed_Seeds_P Parameter: Tissue Value: Aerial vs. Embryo
  misc_feature: MA Experiment ID: 108546 Result: Down-regulated in Transcription
  misc_feature: MA Experiment 108546 PARAMETER Experiment Name: Zm_Imbibed_Seeds_P Parameter: Age (day) Value: 3 vs. 2
  misc_feature: MA Experiment 108546 PARAMETER Experiment Name: Zm_Imbibed_Seeds_P Parameter: Organism Value: Zea mays
  misc_feature: MA Experiment 108546 PARAMETER Experiment Name: Zm_Imbibed_Seeds_P Parameter: Plant Line Value: 35A19
  misc_feature: MA Experiment 108546 PARAMETER Experiment Name: Zm_Imbibed_Seeds_P Parameter: Tissue Value: Roots vs. Embryo
  misc_feature: MA Experiment ID: 108547 Result: Up-regulated in Transcription
  misc_feature: MA Experiment 108547 PARAMETER Experiment Name: Zm_Imbibed_Seeds_P Parameter: Age (day) Value: 4 vs. 2
  misc_feature: MA Experiment 108547 PARAMETER Experiment Name: Zm_Imbibed_Seeds_P Parameter: Organism Value: Zea mays
  misc_feature: MA Experiment 108547 PARAMETER Experiment Name: Zm_Imbibed_Seeds_P Parameter: Plant Line Value: 35A19
  misc_feature: MA Experiment 108547 PARAMETER Experiment Name: Zm_Imbibed_Seeds_P Parameter: Tissue Value: Aerial vs. Embryo
  misc_feature: MA Experiment ID: 108556 Result: Down-regulated in Transcription
  misc_feature: MA Experiment 108556 PARAMETER Experiment Name: Zm_Drought_P Parameter: Age (day) Value: 9
  misc_feature: MA Experiment 108556 PARAMETER Experiment Name: Zm_Drought_P Parameter: Organism Value: Zea mays
  misc_feature: MA Experiment 108556 PARAMETER Experiment Name: Zm_Drought_P Parameter: Plant Line Value: 35A19
  misc_feature: MA Experiment 108556 PARAMETER Experiment Name: Zm_Drought_P Parameter: Timepoint (hr) Value: 24
  misc_feature: MA Experiment 108556 PARAMETER Experiment Name: Zm_Drought_P Parameter: Tissue Value: Aerial
  misc_feature: MA Experiment 108556 PARAMETER Experiment Name: Zm_Drought_P Parameter: Treatment Value: Drought vs. No Drought
  misc_feature: MA Experiment ID: 108559 Result: Down-regulated in Transcription
  misc_feature: MA Experiment 108559 PARAMETER Experiment Name: Zm_5mM_NO_P Parameter: Age (day) Value: 8
  misc_feature: MA Experiment 108559 PARAMETER Experiment Name: Zm_5mM_NO_P Parameter: Organism Value: Zea mays
  misc_feature: MA Experiment 108559 PARAMETER Experiment Name: Zm_5mM_NO_P Parameter: Plant Line Value: 35A19
  misc_feature: MA Experiment 108559 PARAMETER Experiment Name: Zm_5mM_NO_P Parameter: Timepoint (hr) Value: 12
  misc_feature: MA Experiment 108559 PARAMETER Experiment Name: Zm_5mM_NO_P Parameter: Tissue Value: Aerial
  misc_feature: MA Experiment 108559 PARAMETER Experiment Name: Zm_5mM_NO_P Parameter: Treatment Value: 5mM NO vs. No Treatment
  misc_feature: MA Experiment ID: 20000478 Result: Down-regulated in Transcription
  misc_feature: MA Experiment 20000478 PARAMETER Experiment Name: Zm_5mM_SA_P Parameter: Age (day) Value: 11
  misc_feature: MA Experiment 20000478 PARAMETER Experiment Name: Zm_5mM_SA_P Parameter: Organism Value: Zea mays
  misc_feature: MA Experiment 20000478 PARAMETER Experiment Name: Zm_5mM_SA_P Parameter: Plant Line Value: 35A19
  misc_feature: MA Experiment 20000478 PARAMETER Experiment Name: Zm_5mM_SA_P Parameter: Timepoint (hr) Value: 72
  misc_feature: MA Experiment 20000478 PARAMETER Experiment Name: Zm_5mM_SA_P Parameter: Tissue Value: Aerial
  misc_feature: MA Experiment 20000478 PARAMETER Experiment Name: Zm_5mM_SA_P Parameter: Treatment Value: 5mM SA vs. No Treatment
  misc_feature: MA Experiment ID: 20000479 Result: Down-regulated in Transcription
  misc_feature: MA Experiment 20000479 PARAMETER Experiment Name: Zm_Drought_P Parameter: Age (day) Value: 10
  misc_feature: MA Experiment 20000479 PARAMETER Experiment Name: Zm_Drought_P Parameter: Organism Value: Zea mays
  misc_feature: MA Experiment 20000479 PARAMETER Experiment Name: Zm_Drought_P Parameter: Plant Line Value: 35A19
  misc_feature: MA Experiment 20000479 PARAMETER Experiment Name: Zm_Drought_P Parameter: Timepoint (hr) Value: 48
  misc_feature: MA Experiment 20000479 PARAMETER Experiment Name: Zm_Drought_P Parameter: Tissue Value: Aerial
  misc_feature: MA Experiment 20000479 PARAMETER Experiment Name: Zm_Drought_P Parameter: Treatment Value: Drought vs. No Drought
  misc_feature: MA Experiment ID: 20000480 Result: Down-regulated in Transcription
  misc_feature: MA Experiment 20000480 PARAMETER Experiment Name: Zm_Drought_P Parameter: Age (day) Value: 11
  misc_feature: MA Experiment 20000480 PARAMETER Experiment Name: Zm_Drought_P Parameter: Organism Value: Zea mays
  misc_feature: MA Experiment 20000480 PARAMETER Experiment Name: Zm_Drought_P Parameter: Plant Line Value: 35A19
  misc_feature: MA Experiment 20000480 PARAMETER Experiment Name: Zm_Drought_P Parameter: Timepoint (hr) Value: 72
  misc_feature: MA Experiment 20000480 PARAMETER Experiment Name: Zm_Drought_P Parameter: Tissue Value: Aerial
  misc_feature: MA Experiment 20000480 PARAMETER Experiment Name: Zm_Drought_P Parameter: Treatment Value: Drought vs. No Drought
  misc_feature: MA Experiment ID: 20000534 Result: Down-regulated in Transcription
  misc_feature: MA Experiment 20000534 PARAMETER Experiment Name: Zm_Hybrid_Pollen_P Parameter: Age (day) Value: 8
  misc_feature: MA Experiment 20000534 PARAMETER Experiment Name: Zm_Hybrid_Pollen_P Parameter: Organism Value: Zea mays
  misc_feature: MA Experiment 20000534 PARAMETER Experiment Name: Zm_Hybrid_Pollen_P Parameter: Plant Line Value: 35A19
  misc_feature: MA Experiment 20000534 PARAMETER Experiment Name: Zm_Hybrid_Pollen_P Parameter: Tissue Value: Pollen vs. Aerial
gcacgagaccattacctagaacatcctaatcgaaaagcttgcttcaggcacttgagagttgagactcactcagtcactagcaagtgcctcgtcacatggcagcggcagcgctagcggcgtggtggtggtctctgtcgctcctggctaccatcgtcggcggaggcagcgcctcaccgtcaccggtgcccggctgctacacgcgcatcttcagcttcggcgactcgctgaccgacacgggcaactacgtccacctgacggcgagcagccacagcccctacggcgcgccgccgtacgggaggacgttcttcggcaaacctaccggccgcgccagcgacggacgcctcgtcatcgacttcatcgcggaagagttcgggctggcgaaggtgacggcgatccaggcgggcacggcgccaggggacttccagaacggcgccaacttcgccatcatctcggccaccgccaacaacggctccttcttcgcgggcaacggcatggacatcaggcccttctcgctggacacgcagatgctgtggttcaggacccacctccgcgagctcgtgcaggcggcggcggcggcacagcagaacggcagcgtgggcgcgctgctgagcggcgcgctggtggcgctgggcgagatcggagggaacgactacaacttcgccttctcgcggggcgtgccgcgggacgcggtgcgcaggttcgtgccggccgtggtggacaagctggcgggcgccatggaggagctcatcgccatgggggcgcgcgccttcgtggtgcccgggaacctacccttcggctgcacgccgctgtacctgcagcggttccgcgccaacggcgggtggtgggactacgacccggccacgggctgcctcgcctggttcaaccgcttcgcccagtaccacaaccgggtgctcgcggcgcgcctcgacaggctccggcgcctgcacccggacgtgaccatcgtctacgccgactggtacgaggccacgatgagcatcttccaggaccccgggaagctagggttcacaaacgctctgcggacttgctgcgggaaccagaccgtgccgtgtggcaggcccgggtgctccgtctgcaaggacccgtccacgtacgggtcctgggacgggacgcacccgacggaggcggtgtacaaggtgatcgccgacggggtgctgcacgggccgcacgcgtcccctgttcctctcgccgacacctgtcctccgacatgacccttagaagatttataattggcagctttaagagcggtggtaacatctgaatcgtacttgcgtgattttaaggatggcacgataatagctttgtttaagaatacaggtgaggttggcatatttcgatagcataagcatacacacgaagctctgaagtgataattgagtttgtataaacatcatcattgatttagggggtgtttggttagagggactaaagattagtctctagtttttagtctcttttagtctcttttttaccaaacattaggactaaaatatgaactaaaatgatttagtctgtagtccttcacatatgtgctaaaagggactaaaccatattaattccacatttaccctttatttagttcaattgtactaatagtaggagaatgttaaaggctattttagtct

SEQ ID NO: 18823 - protein, 377 aa, Zea mays subsp. mays
  peptide (1)..(377): Ceres Seq. ID no. 12368457
  misc_feature (37)..(317): Pfam Name: GDSL-like Lipase/Acylhydrolase Pfam Description: GDSL-like Lipase/Acylhydrolase
  misc_feature (34)..(374): Homolog of NCBI NO: 12322540 NR Description: unknown protein [Arabidopsis thaliana]
  misc_feature (14)..(374): Homolog of NCBI NO: 21593234 NR Description: lipase, putative [Arabidopsis thaliana]
  misc_feature (1)..(374): Homolog of NCBI NO: 34904730 NR Description: lipase-like protein~predicted by FGENESH etc.
  misc_feature (14)..(374): Homolog of NCBI NO: 15218731 NR Description: lipase, putative
  misc_feature (14)..(374): Homolog of NCBI NO: 10764858 NR Description: F1K23.17 [Arabidopsis thaliana]
  misc_feature (32)..(374): Homolog of NCBI NO: 34911826 NR Description: lipase-like protein [Oryza sativa (japonica
  misc_feature (15)..(375): Homolog of NCBI NO: 34911800 NR Description: lipase-like protein [Oryza sativa (japonica
  misc_feature (13)..(148): Homolog of NCBI NO: 34911804 NR Description: lipase-like protein [Oryza sativa (japonica
  misc_feature (170)..(375): Homolog of NCBI NO: 34911804 NR Description: lipase-like protein [Oryza sativa (japonica
  misc_feature (12)..(317): Homolog of NCBI NO: 34911834 NR Description: lipase-like protein [Oryza sativa (japonica
MAAAALAAWWWSLSLLATIVGGGSASPSPVPGCYTRIFSFGDSLTDTGNYVHLTASSHSPYGAPPYGRTFFGKPTGRASDGRLVIDFIAEEFGLAKVTAIQAGTAPGDFQNGANFAIISATANNGSFFAGNGMDIRPFSLDTQMLWFRTHLRELVQAAAAAQQNGSVGALLSGALVALGEIGGNDYNFAFSRGVPRDAVRRFVPAVVDKLAGAMEELIAMGARAFVVPGNLPFGCTPLYLQRFRANGGWWDYDPATGCLAWFNRFAQYHNRVLAARLDRLRRLHPDVTIVYADWYEATMSIFQDPGKLGFTNALRTCCGNQTVPCGRPGCSVCKDPSTYGSWDGTHPTEAVYKVIADGVLHGPHASPVPLADTCPPT

SEQ ID NO: 18824 - protein, 245 aa, Zea mays subsp. mays
  peptide (1)..(245): Ceres Seq. ID no. 12368458
  misc_feature (1)..(185): Pfam Name: GDSL-like Lipase/Acylhydrolase Pfam Description: GDSL-like Lipase/Acylhydrolase
  misc_feature (1)..(242): Homolog of NCBI NO: 12322540 NR Description: unknown protein [Arabidopsis thaliana]
  misc_feature (1)..(242): Homolog of NCBI NO: 21593234 NR Description: lipase, putative [Arabidopsis thaliana]
  misc_feature (1)..(242): Homolog of NCBI NO: 34904730 NR Description: lipase-like protein~predicted by FGENESH etc.
  misc_feature (1)..(242): Homolog of NCBI NO: 15218731 NR Description: lipase, putative
  misc_feature (1)..(242): Homolog of NCBI NO: 10764858 NR Description: F1K23.17 [Arabidopsis thaliana]
  misc_feature (1)..(242): Homolog of NCBI NO: 34911826 NR Description: lipase-like protein [Oryza sativa (japonica
  misc_feature (1)..(243): Homolog of NCBI NO: 34911800 NR Description: lipase-like protein [Oryza sativa (japonica
  misc_feature (1)..(16): Homolog of NCBI NO: 34911804 NR Description: lipase-like protein [Oryza sativa (japonica
  misc_feature (38)..(243): Homolog of NCBI NO: 34911804 NR Description: lipase-like protein [Oryza sativa (japonica
  misc_feature (1)..(185): Homolog of NCBI NO: 34911834 NR Description: lipase-like protein [Oryza sativa (japonica
MDIRPFSLDTQMLWFRTHLRELVQAAAAAQQNGSVGALLSGALVALGEIGGNDYNFAFSRGVPRDAVRRFVPAVVDKLAGAMEELIAMGARAFVVPGNLPFGCTPLYLQRFRANGGWWDYDPATGCLAWFNRFAQYHNRVLAARLDRLRRLHPDVTIVYADWYEATMSIFQDPGKLGFTNALRTCCGNQTVPCGRPGCSVCKDPSTYGSWDGTHPTEAVYKVIADGVLHGPHASPVPLADTCPPT

SEQ ID NO: 18825 - protein, 234 aa, Zea mays subsp. mays
  peptide (1)..(234): Ceres Seq. ID no. 12368459
  misc_feature (1)..(174): Pfam Name: GDSL-like Lipase/Acylhydrolase Pfam Description: GDSL-like Lipase/Acylhydrolase
  misc_feature (1)..(231): Homolog of NCBI NO: 12597843 NR Description: lipase, putative [Arabidopsis thaliana]
  misc_feature (1)..(231): Homolog of NCBI NO: 12322540 NR Description: unknown protein [Arabidopsis thaliana]
  misc_feature (1)..(231): Homolog of NCBI NO: 21593234 NR Description: lipase, putative [Arabidopsis thaliana]
  misc_feature (1)..(231): Homolog of NCBI NO: 34904730 NR Description: lipase-like protein~predicted by FGENESH etc.
  misc_feature (1)..(231): Homolog of NCBI NO: 15218731 NR Description: lipase, putative
  misc_feature (1)..(231): Homolog of NCBI NO: 10764858 NR Description: F1K23.17 [Arabidopsis thaliana]
  misc_feature (1)..(231): Homolog of NCBI NO: 34911826 NR Description: lipase-like protein [Oryza sativa (japonica
  misc_feature (1)..(232): Homolog of NCBI NO: 34911800 NR Description: lipase-like protein [Oryza sativa (japonica
  misc_feature (27)..(232): Homolog of NCBI NO: 34911804 NR Description: lipase-like protein [Oryza sativa (japonica
  misc_feature (1)..(174): Homolog of NCBI NO: 34911834 NR Description: lipase-like protein [Oryza sativa (japonica
MLWFRTHLRELVQAAAAAQQNGSVGALLSGALVALGEIGGNDYNFAFSRGVPRDAVRRFVPAVVDKLAGAMEELIAMGARAFVVPGNLPFGCTPLYLQRFRANGGWWDYDPATGCLAWFNRFAQYHNRVLAARLDRLRRLHPDVTIVYADWYEATMSIFQDPGKLGFTNALRTCCGNQTVPCGRPGCSVCKDPSTYGSWDGTHPTEAVYKVIADGVLHGPHASPVPLADTCPPT

SEQ ID NO: 18826 - DNA, 1199 bp, Zea mays subsp. mays
  misc_feature (1)..(1199): Ceres Seq. ID no. 12368694
  misc_feature: MA Experiment ID: 108556 Result: Down-regulated in Transcription
  misc_feature: MA Experiment 108556 PARAMETER Experiment Name: Zm_Drought_P Parameter: Age (day) Value: 9
  misc_feature: MA Experiment 108556 PARAMETER Experiment Name: Zm_Drought_P Parameter: Organism Value: Zea mays
  misc_feature: MA Experiment 108556 PARAMETER Experiment Name: Zm_Drought_P Parameter: Plant Line Value: 35A19
  misc_feature: MA Experiment 108556 PARAMETER Experiment Name: Zm_Drought_P Parameter: Timepoint (hr) Value: 24
  misc_feature: MA Experiment 108556 PARAMETER Experiment Name: Zm_Drought_P Parameter: Tissue Value: Aerial
  misc_feature: MA Experiment 108556 PARAMETER Experiment Name: Zm_Drought_P Parameter: Treatment Value: Drought vs. No Drought
  misc_feature: MA Experiment ID: 20000479 Result: Down-regulated in Transcription
  misc_feature: MA Experiment 20000479 PARAMETER Experiment Name: Zm_Drought_P Parameter: Age (day) Value: 10
  misc_feature: MA Experiment 20000479 PARAMETER Experiment Name: Zm_Drought_P Parameter: Organism Value: Zea mays
  misc_feature: MA Experiment 20000479 PARAMETER Experiment Name: Zm_Drought_P Parameter: Plant Line Value: 35A19
  misc_feature: MA Experiment 20000479 PARAMETER Experiment Name: Zm_Drought_P Parameter: Timepoint (hr) Value: 48
  misc_feature: MA Experiment 20000479 PARAMETER Experiment Name: Zm_Drought_P Parameter: Tissue Value: Aerial
  misc_feature: MA Experiment 20000479 PARAMETER Experiment Name: Zm_Drought_P Parameter: Treatment Value: Drought vs. No Drought
  misc_feature: MA Experiment ID: 20000480 Result: Down-regulated in Transcription
  misc_feature: MA Experiment 20000480 PARAMETER Experiment Name: Zm_Drought_P Parameter: Age (day) Value: 11
  misc_feature: MA Experiment 20000480 PARAMETER Experiment Name: Zm_Drought_P Parameter: Organism Value: Zea mays
  misc_feature: MA Experiment 20000480 PARAMETER Experiment Name: Zm_Drought_P Parameter: Plant Line Value: 35A19
  misc_feature: MA Experiment 20000480 PARAMETER Experiment Name: Zm_Drought_P Parameter: Timepoint (hr) Value: 72
  misc_feature: MA Experiment 20000480 PARAMETER Experiment Name: Zm_Drought_P Parameter: Tissue Value: Aerial
  misc_feature: MA Experiment 20000480 PARAMETER Experiment Name: Zm_Drought_P Parameter: Treatment Value: Drought vs. No Drought
gcacgagaccattacctagaacatcctaaaaaaaaaaaaaaagatggcccctaaattagtctttttcttcctgttgtgctcctcgccttggcgctgcaggcgatcctccggccaccgccgccaaagctctgtggctccccaggtggccctcctctgacatctcccaggatcaagctcagggacggaaggtaccttgcgtacaaagaggatggagtacagagagacaaggccaggtacaagatcatcacagtgcacgcatttgatagcaccaaggacttcccctcgcctgtttctaaggagctcgtggaaggactgggaatttacctccttgcttatgacagagctggatatggggaaagtgaccccaatcccaaccggcatgtcaagagcgaggcgctagatatcgaggagcttgccgaccagctgggccttggccacaagttctatgtgctaggggcctcaatgggaggatactcggtttggggatgcctccagtatatacctcacaggcttgcaggagctgcgctggttgtgccaattatcaactactggtggccttcgttcccagctgaattatccaagcaggccttcaacagactgattgtgccagagcagagaactctttggattgcacacaacataccttccttgctttacctgtggatgacccagaggtggttcccttcttctgcagcagccatgcaccaccctgaaatatttagcaagcatgacatggaggttcttcagaagatgatggcaatgccaagaaccattgagaacaaatcaaggcagcaaggcatttatgaatcgatccaccgtgatttacttgtcgcttttggaacttgggagttcgatccaatgaatgtcaccaatccatttcctcaaaatgagggctctgtgcacatctggcaaggacgcgaagataggttggtgcttgttgagctgcagaggtacattgccaagaagcttccgtggatcaagtatcatgaagtcccagaaggtggacacatgttcgtgatggtagatggatggacagaccgaattctcaaggcactcttgttaggagaagagcccctagatgtgtgacagtagttccattttcaaaatgtcaaaaactgcagctgccagctgttattttacttaattttattcccaatttgtacacttgtattcctacaacaccaagactagtctaattc

SEQ ID NO: 18827 - protein, 207 aa, Zea mays subsp. mays
  peptide (1)..(207): Ceres Seq. ID no. 12368695
  misc_feature (1)..(203): Pfam Name: alpha/beta hydrolase fold Pfam Description: alpha/beta hydrolase fold
  misc_feature (1)..(199): Homolog of NCBI NO: 11357595 NR Description: hypothetical protein F24B22.200 - Arabidopsis
  misc_feature (1)..(202): Homolog of NCBI NO: 18410575 NR Description: expressed protein
  misc_feature (1)..(199): Homolog of NCBI NO: 21537089 NR Description: unknown [Arabidopsis thaliana]
  misc_feature (1)..(199): Homolog of NCBI NO: 18410582 NR Description: expressed protein
  misc_feature (1)..(199): Homolog of NCBI NO: 21592662 NR Description: unknown [Arabidopsis thaliana]
  misc_feature (1)..(200): Homolog of NCBI NO: 15242253 NR Description: putative protein
  misc_feature (1)..(203): Homolog of NCBI NO: 15228377 NR Description: putative protein
  misc_feature (1)..(202): Homolog of NCBI NO: 28416665 NR Description: At2g36290 [Arabidopsis thaliana]
  misc_feature (1)..(202): Homolog of NCBI NO: 18404095 NR Description: expressed protein
  misc_feature (1)..(207): Homolog of NCBI NO: 34908462 NR Description: P0683F02.22 [Oryza sativa (japonica
MGGYSVWGCLQYIPHRLAGAALVVPIINYWWPSFPAELSKQAFNRLIVPEQRTLWIAHNIPSLLYLWMTQRWFPSSAAAMHHPEIFSKHDMEVLQKMMAMPRTIENKSRQQGIYESIHRDLLVAFGTWEFDPMNVTNPFPQNEGSVHIWQGREDRLVLVELQRYIAKKLPWIKYHEVPEGGHMFVMVDGWTDRILKALLLGEEPLDV

SEQ ID NO: 18828 - protein, 140 aa, Zea mays subsp. mays
  peptide (1)..(140): Ceres Seq. ID no. 12368696
  misc_feature (1)..(136): Pfam Name: alpha/beta hydrolase fold Pfam Description: alpha/beta hydrolase fold
  misc_feature (1)..(132): Homolog of NCBI NO: 11357595 NR Description: hypothetical protein F24B22.200 - Arabidopsis
  misc_feature (1)..(135): Homolog of NCBI NO: 18410575 NR Description: expressed protein
  misc_feature (1)..(132): Homolog of NCBI NO: 21537089 NR Description: unknown [Arabidopsis thaliana]
  misc_feature (1)..(132): Homolog of NCBI NO: 18410582 NR Description: expressed protein
  misc_feature (1)..(132): Homolog of NCBI NO: 21592662 NR Description: unknown [Arabidopsis thaliana]
  misc_feature (1)..(133): Homolog of NCBI NO: 15242253 NR Description: putative protein
  misc_feature (1)..(136): Homolog of NCBI NO: 15228377 NR Description: putative protein
  misc_feature (1)..(135): Homolog of NCBI NO: 28416665 NR Description: At2g36290 [Arabidopsis thaliana]
  misc_feature (1)..(135): Homolog of NCBI NO: 18404095 NR Description: expressed protein
  misc_feature (1)..(140): Homolog of NCBI NO: 34908462 NR Description: P0683F02.22 [Oryza sativa (japonica
MTQRWFPSSAAAMHHPEIFSKHDMEVLQKMMAMPRTIENKSRQQGIYESIHRDLLVAFGTWEFDPMNVTNPFPQNEGSVHIWQGREDRLVLVELQRYIAKKLPWIKYHEVPEGGHMFVMVDGWTDRILKALLLGEEPLDV

SEQ ID NO: 18829 - protein, 128 aa, Zea mays subsp. mays
  peptide (1)..(128): Ceres Seq. ID no. 12368697
  misc_feature (1)..(124): Pfam Name: alpha/beta hydrolase fold Pfam Description: alpha/beta hydrolase fold
  misc_feature (1)..(123): Homolog of NCBI NO: 18410575 NR Description: expressed protein
  misc_feature (1)..(120): Homolog of NCBI NO: 21537089 NR Description: unknown [Arabidopsis thaliana]
  misc_feature (1)..(120): Homolog of NCBI NO: 18410582 NR Description: expressed protein
  misc_feature (1)..(120): Homolog of NCBI NO: 21592662 NR Description: unknown [Arabidopsis thaliana]
  misc_feature (1)..(121): Homolog of NCBI NO: 15242253 NR Description: putative protein
  misc_feature (1)..(120): Homolog of NCBI NO: 11357595 NR Description: hypothetical protein F24B22.200 - Arabidopsis
  misc_feature (1)..(124): Homolog of NCBI NO: 15228377 NR Description: putative protein
  misc_feature (1)..(123): Homolog of NCBI NO: 28416665 NR Description: At2g36290 [Arabidopsis thaliana]
  misc_feature (1)..(123): Homolog of NCBI NO: 18404095 NR Description: expressed protein
  misc_feature (1)..(128): Homolog of NCBI NO: 34908462 NR Description: P0683F02.22 [Oryza sativa (japonica
MHHPEIFSKHDMEVLQKMMAMPRTIENKSRQQGIYESIHRDLLVAFGTWEFDPMNVTNPFPQNEGSVHIWQGREDRLVLVELQRYIAKKLPWIKYHEVPEGGHMFVMVDGWTDRILKALLLGEEPLDV

SEQ ID NO: 18830 - DNA, 1346 bp, Zea mays subsp. mays
  misc_feature (1)..(1346): Ceres Seq. ID no. 13493167
  misc_feature: MA Experiment ID: 108543 Result: Down-regulated in Transcription
  misc_feature: MA Experiment ID: 108597 Result: Up-regulated in Transcription
  misc_feature: MA Experiment 108597 PARAMETER Experiment Name: Zm_100uM_ABA_P Parameter: Age (day) Value: 9
  misc_feature: MA Experiment 108597 PARAMETER Experiment Name: Zm_100uM_ABA_P Parameter: Organism Value: Zea mays
  misc_feature: MA Experiment 108597 PARAMETER Experiment Name: Zm_100uM_ABA_P Parameter: Plant Line Value: 35A19
  misc_feature: MA Experiment 108597 PARAMETER Experiment Name: Zm_100uM_ABA_P Parameter: Timepoint (hr) Value: 24
  misc_feature: MA Experiment 108597 PARAMETER Experiment Name: Zm_100uM_ABA_P Parameter: Tissue Value: Aerial
  misc_feature: MA Experiment 108597 PARAMETER Experiment Name: Zm_100uM_ABA_P Parameter: Treatment Value: 100uM ABA vs. No Treatment
  misc_feature: MA Experiment ID: 108687 Result: Up-regulated in Transcription
  misc_feature: MA Experiment 108687 PARAMETER Experiment Name: Zm_Embryos-Flowers__P Parameter: Tissue Value: Embryo vs. Aerial+
  misc_feature: MA Experiment ID: 20000477 Result: Up-regulated in Transcription
  misc_feature: MA Experiment 20000477 PARAMETER Experiment Name: Zm_5mM_SA_P Parameter: Age (day) Value: 10
  misc_feature: MA Experiment 20000477 PARAMETER Experiment Name: Zm_5mM_SA_P Parameter: Organism Value: Zea mays
  misc_feature: MA Experiment 20000477 PARAMETER Experiment Name: Zm_5mM_SA_P Parameter: Plant Line Value: 35A19
  misc_feature: MA Experiment 20000477 PARAMETER Experiment Name: Zm_5mM_SA_P Parameter: Timepoint (hr) Value: 48
  misc_feature: MA Experiment 20000477 PARAMETER Experiment Name: Zm_5mM_SA_P Parameter: Tissue Value: Aerial
  misc_feature: MA Experiment 20000477 PARAMETER Experiment Name: Zm_5mM_SA_P Parameter: Treatment Value: 5mM SA vs. No Treatment
  misc_feature: MA Experiment ID: 20000478 Result: Up-regulated in Transcription
  misc_feature: MA Experiment 20000478 PARAMETER Experiment Name: Zm_5mM_SA_P Parameter: Age (day) Value: 11
  misc_feature: MA Experiment 20000478 PARAMETER Experiment Name: Zm_5mM_SA_P Parameter: Organism Value: Zea mays
  misc_feature: MA Experiment 20000478 PARAMETER Experiment Name: Zm_5mM_SA_P Parameter: Plant Line Value: 35A19
  misc_feature: MA Experiment 20000478 PARAMETER Experiment Name: Zm_5mM_SA_P Parameter: Timepoint (hr) Value: 72
  misc_feature: MA Experiment 20000478 PARAMETER Experiment Name: Zm_5mM_SA_P Parameter: Tissue Value: Aerial
  misc_feature: MA Experiment 20000478 PARAMETER Experiment Name: Zm_5mM_SA_P Parameter: Treatment Value: 5mM SA vs. No Treatment
  misc_feature: MA Experiment ID: 20000479 Result: Up-regulated in Transcription
  misc_feature: MA Experiment 20000479 PARAMETER Experiment Name: Zm_Drought_P Parameter: Age (day) Value: 10
  misc_feature: MA Experiment 20000479 PARAMETER Experiment Name: Zm_Drought_P Parameter: Organism Value: Zea mays
  misc_feature: MA Experiment 20000479 PARAMETER Experiment Name: Zm_Drought_P Parameter: Plant Line Value: 35A19
  misc_feature: MA Experiment 20000479 PARAMETER Experiment Name: Zm_Drought_P Parameter: Timepoint (hr) Value: 48
  misc_feature: MA Experiment 20000479 PARAMETER Experiment Name: Zm_Drought_P Parameter: Tissue Value: Aerial
  misc_feature: MA Experiment 20000479 PARAMETER Experiment Name: Zm_Drought_P Parameter: Treatment Value: Drought vs. No Drought
  misc_feature: MA Experiment ID: 20000492 Result: Up-regulated in Transcription
  misc_feature: MA Experiment 20000492 PARAMETER Experiment Name: Zm_Hybrid_Seed_Dev_P Parameter: DAP Value: 12
  misc_feature: MA Experiment 20000492 PARAMETER Experiment Name: Zm_Hybrid_Seed_Dev_P Parameter: Organism Value: Zea mays
  misc_feature: MA Experiment 20000492 PARAMETER Experiment Name: Zm_Hybrid_Seed_Dev_P Parameter: Plant Line Value: 35A19
  misc_feature: MA Experiment 20000492 PARAMETER Experiment Name: Zm_Hybrid_Seed_Dev_P Parameter: Tissue Value: Fert Kernel vs. Unfert Floret
gcacgagaccattacctagaacatcctaatcgaaaaatcccagcagcaggtagcagcagcgcatgactttgtatctgcaactcgtttcgactagcctgcacgccgggagccctcgtctcgcccttctccacctccgaaggtagggtacctgatacttccctgccccgcgcatcgcatccgcggttttagtttgctggcctcggttccgatcgattcctatcctccctccgggcgggcgtccaccgacttcatcatccactcgccggccgaaccgatttgtttcgtttgccgttcgatccgcagatcctgcgagttcaacccgcgagtgagcatgtcgtcctactccccgccgccgccgccgccgcgggaccagtccatggacaccgaggcacccaacgcgcccatcaccagggagcggaggctcaaccccgatctgcaggagcagctccccaagccatatctcgcgagagctctcgaggcggtggacccgagccacccgcaggggaccaaggggcgcgacccccgcggcatgagcgtgcttcagcagcacgccgccttcttcgaccgcaatggcgacggcgtcatctacccctgggagacgtttcaaggactgcgagcgataggatgtggactcactgtatcattcgcgttctccatactgatcaacctcttcctcagttatcccactcagccgggatggttaccttctcctttgctgtccatccgtatagacaacatccacaagggtaagcacgggagtgattctgaaacctacgacactgaagggaggtttgatccatcaaagttcgatgctatattcagtaagtacggtcgaacccatcctaatgctataacaagagacgagttaagctcaatgcttcaaggaaaccgcaatacgtacgatttccttggctggttggccgctgccggtgaatggctcttactctacagcttggcgaaagacaaggatggcctcttgcagcgcgaaactgtccgtggtctatttgatgggagcctatttgagcgactggaagacgacaacaacaagaagaaatcgtcatgaatgctgagcagccttgtacagctcagggaagtgctgtcagtacaaaactaccagatataccattggtcgtgttcaaataacaaatgcttcggctttgttcatccgtcattaactatgagtgctgggatttgtttgtatgtgtgtcgtgctaccagtttcttctcctgtcgtctcacacaggtactgaattacgcatgtgttttctagtgttcgtgcggaagctgtattataagctgaaaaatgtgcgtttgaaatttatgggcaaaactgtcttcttggtctt

SEQ ID NO: 18831 - protein, 243 aa, Zea mays subsp. mays
  peptide (1)..(243): Ceres Seq. ID no. 13493168
  misc_feature (62)..(235): Pfam Name: Caleosin related protein Pfam Description: Caleosin related protein
  misc_feature (11)..(233): Homolog of NCBI NO: 7459612 NR Description: abscisic acid-induced protein - rice
  misc_feature (14)..(241): Homolog of NCBI NO: 15226103 NR Description: RD20 protein [Arabidopsis thaliana]
  misc_feature (1)..(243): Homolog of NCBI NO: 34902470 NR Description: Putative abscisic acid-induced protein - rice
MSSYSPPPPPPRDQSMDTEAPNAPITRERRLNPDLQEQLPKPYLARALEAVDPSHPQGTKGRDPRGMSVLQQHAAFFDRNGDGVIYPWETFQGLRAIGCGLTVSFAFSILINLFLSYPTQPGWLPSPLLSIRIDNIHKGKHGSDSETYDTEGRFDPSKFDAIFSKYGRTHPNAITRDELSSMLQGNRNTYDFLGWLAAAGEWLLLYSLAKDKDGLLQRETVRGLFDGSLFERLEDDNNKKKSS

SEQ ID NO: 18832 - protein, 228 aa, Zea mays subsp. mays
  peptide (1)..(228): Ceres Seq. ID no. 13493169
  misc_feature (47)..(220): Pfam Name: Caleosin related protein Pfam Description: Caleosin related protein
  misc_feature (1)..(218): Homolog of NCBI NO: 7459612 NR Description: abscisic acid-induced protein - rice
  misc_feature (1)..(226): Homolog of NCBI NO: 15226103 NR Description: RD20 protein [Arabidopsis thaliana]
  misc_feature (1)..(228): Homolog of NCBI NO: 34902470 NR Description: Putative abscisic acid-induced protein - rice
MDTEAPNAPITRERRLNPDLQEQLPKPYLARALEAVDPSHPQGTKGRDPRGMSVLQQHAAFFDRNGDGVIYPWETFQGLRAIGCGLTVSFAFSILINLFLSYPTQPGWLPSPLLSIRIDNIHKGKHGSDSETYDTEGRFDPSKFDAIFSKYGRTHPNAITRDELSSMLQGNRNTYDFLGWLAAAGEWLLLYSLAKDKDGLLQRETVRGLFDGSLFERLEDDNNKKKSS

SEQ ID NO: 18833 - protein, 177 aa, Zea mays subsp. mays
  peptide (1)..(177): Ceres Seq. ID no. 13493170
  misc_feature (1)..(169): Pfam Name: Caleosin related protein Pfam Description: Caleosin related protein
  misc_feature (1)..(167): Homolog of NCBI NO: 7459612 NR Description: abscisic acid-induced protein - rice
  misc_feature (1)..(175): Homolog of NCBI NO: 15226103 NR Description: RD20 protein [Arabidopsis thaliana]
  misc_feature (1)..(177): Homolog of NCBI NO: 34902470 NR Description: Putative abscisic acid-induced protein - rice
MSVLQQHAAFFDRNGDGVIYPWETFQGLRAIGCGLTVSFAFSILINLFLSYPTQPGWLPSPLLSIRIDNIHKGKHGSDSETYDTEGRFDPSKFDAIFSKYGRTHPNAITRDELSSMLQGNRNTYDFLGWLAAAGEWLLLYSLAKDKDGLLQRETVRGLFDGSLFERLEDDNNKKKSS

SEQ ID NO: 18834 - DNA, 465 bp, Zea mays subsp. mays
  misc_feature (1)..(465): Ceres Seq. ID no. 1846808
  misc_feature: MA Experiment ID: 108522 Result: Down-regulated in Transcription
  misc_feature: MA Experiment 108522 PARAMETER Experiment Name: Zm_42deg_Heat_P Parameter: Age (day) Value: 8
  misc_feature: MA Experiment 108522 PARAMETER Experiment Name: Zm_42deg_Heat_P Parameter: Organism Value: Zea mays
  misc_feature: MA Experiment 108522 PARAMETER Experiment Name: Zm_42deg_Heat_P Parameter: Plant Line Value: 35A19
  misc_feature: MA Experiment 108522 PARAMETER Experiment Name: Zm_42deg_Heat_P Parameter: Temperature (deg C) Value: 42 vs. 22
  misc_feature: MA Experiment 108522 PARAMETER Experiment Name: Zm_42deg_Heat_P Parameter: Timepoint (hr) Value: 1
  misc_feature: MA Experiment 108522 PARAMETER Experiment Name: Zm_42deg_Heat_P Parameter: Tissue Value: Aerial
  misc_feature: MA Experiment ID: 108523 Result: Down-regulated in Transcription
  misc_feature: MA Experiment 108523 PARAMETER Experiment Name: Zm_42deg_Heat_P Parameter: Age (day) Value: 8
  misc_feature: MA Experiment 108523 PARAMETER Experiment Name: Zm_42deg_Heat_P Parameter: Organism Value: Zea mays
  misc_feature: MA Experiment 108523 PARAMETER Experiment Name: Zm_42deg_Heat_P Parameter: Plant Line Value: 35A19
  misc_feature: MA Experiment 108523 PARAMETER Experiment Name: Zm_42deg_Heat_P Parameter: Temperature (deg C) Value: 42 vs. 22
  misc_feature: MA Experiment 108523 PARAMETER Experiment Name: Zm_42deg_Heat_P Parameter: Timepoint (hr) Value: 6
  misc_feature: MA Experiment 108523 PARAMETER Experiment Name: Zm_42deg_Heat_P Parameter: Tissue Value: Aerial
  misc_feature: MA Experiment ID: 108527 Result: Down-regulated in Transcription
  misc_feature: MA Experiment 108527 PARAMETER Experiment Name: Zm_5mM_NO_P Parameter: Age (day) Value: 8
  misc_feature: MA Experiment 108527 PARAMETER Experiment Name: Zm_5mM_NO_P Parameter: Organism Value: Zea mays
  misc_feature: MA Experiment 108527 PARAMETER Experiment Name: Zm_5mM_NO_P Parameter: Plant Line Value: 35A19
  misc_feature: MA Experiment 108527 PARAMETER Experiment Name: Zm_5mM_NO_P Parameter: Timepoint (hr) Value: 6
  misc_feature: MA Experiment 108527 PARAMETER Experiment Name: Zm_5mM_NO_P Parameter: Tissue Value: Aerial
  misc_feature: MA Experiment 108527 PARAMETER Experiment Name: Zm_5mM_NO_P Parameter: Treatment Value: 5mM NO vs. No Treatment
  misc_feature: MA Experiment ID: 108559 Result: Down-regulated in Transcription
  misc_feature: MA Experiment 108559 PARAMETER Experiment Name: Zm_5mM_NO_P Parameter: Age (day) Value: 8
  misc_feature: MA Experiment 108559 PARAMETER Experiment Name: Zm_5mM_NO_P Parameter: Organism Value: Zea mays
  misc_feature: MA Experiment 108559 PARAMETER Experiment Name: Zm_5mM_NO_P Parameter: Plant Line Value: 35A19
  misc_feature: MA Experiment 108559 PARAMETER Experiment Name: Zm_5mM_NO_P Parameter: Timepoint (hr) Value: 12
  misc_feature: MA Experiment 108559 PARAMETER Experiment Name: Zm_5mM_NO_P Parameter: Tissue Value: Aerial
  misc_feature: MA Experiment 108559 PARAMETER Experiment Name: Zm_5mM_NO_P Parameter: Treatment Value: 5mM NO vs. No Treatment
aattaattaattcttcaattgatcccatttgctctctggatgtgatttctcccttcaaagattcagattcagatatcggcccgcttgtcgaaaagattgatgatccaagcatggccaacgataaggatttactgcaggttgtccggttactggatgatgcttgcaaggaggccggattcttctatgtgaaaggccatggtattgatgagtcactgatgagggaagtcaggaatgtaacccgtgaattctttcagcttccttatgaggaaaaattaaaaattaagatgacacctcaaagtggatatagagggtatcaaaggataggggaaaatattaccaagggtaagcctgatatgcatgaagcaatcgattgttatactcctattagacctggcaaatatggagatctcgctaaaccaatggaaggatctaacttatggccaaaatacccatcaaattttgaag

SEQ ID NO: 18835 - protein, 154 aa, Zea mays subsp. mays
  peptide (1)..(154): Ceres Seq. ID no. 1846809
  misc_feature (32)..(147): Homolog of NCBI NO: 23130050 NR Description: hypothetical protein [Nostoc punctiforme]
  misc_feature (11)..(134): Homolog of NCBI NO: 10834554 NR Description: 2-oxoacid-dependent oxidase [Arabidopsis thaliana]
  misc_feature (24)..(153): Homolog of NCBI NO: 11255891 NR Description: hypothetical protein T9C5.210 - Arabidopsis
  misc_feature (11)..(153): Homolog of NCBI NO: 22331716 NR Description: oxidoreductase (din11), putative; protein id:
  misc_feature (11)..(153): Homolog of NCBI NO: 19423910 NR Description: unknown protein [Arabidopsis thaliana]
  misc_feature (24)..(153): Homolog of NCBI NO: 11255902 NR Description: flavonol synthase-like protein - Arabidopsis
  misc_feature (24)..(153): Homolog of NCBI NO: 15229181 NR Description: putative protein; protein id: At3g49630.1
  misc_feature (24)..(153): Homolog of NCBI NO: 21554579 NR Description: flavonol synthase-like protein [Arabidopsis
  misc_feature (24)..(153): Homolog of NCBI NO: 18409039 NR Description: flavonol synthase - like protein
  misc_feature (24)..(153): Homolog of NCBI NO: 6984228 NR Description: putative flavonol synthase-like protein
LINSSIDPICSLDVISPFKDSDSDIGPLVEKIDDPSMANDKDLLQVVRLLDDACKEAGFFYVKGHGIDESLMREVRNVTREFFQLPYEEKLKIKMTPQSGYRGYQRIGENITKGKPDMHEAIDCYTPIRPGKYGDLAKPMEGSNLWPKYPSNFE

SEQ ID NO: 18836 - protein, 118 aa, Zea mays subsp. mays
  peptide (1)..(118): Ceres Seq. ID no. 1846810
  misc_feature (1)..(111): Homolog of NCBI NO: 23130050 NR Description: hypothetical protein [Nostoc punctiforme]
  misc_feature (1)..(98): Homolog of NCBI NO: 10834554 NR Description: 2-oxoacid-dependent oxidase [Arabidopsis thaliana]
  misc_feature (1)..(117): Homolog of NCBI NO: 11255891 NR Description: hypothetical protein T9C5.210 - Arabidopsis
  misc_feature (1)..(117): Homolog of NCBI NO: 22331716 NR Description: oxidoreductase (din11), putative; protein id:
  misc_feature (1)..(117): Homolog of NCBI NO: 19423910 NR Description: unknown protein [Arabidopsis thaliana]
  misc_feature (1)..(117): Homolog of NCBI NO: 11255902 NR Description: flavonol synthase-like protein - Arabidopsis
  misc_feature (1)..(117): Homolog of NCBI NO: 15229181 NR Description: putative protein; protein id: At3g49630.1
  misc_feature (1)..(117): Homolog of NCBI NO: 21554579 NR Description: flavonol synthase-like protein [Arabidopsis
  misc_feature (1)..(117): Homolog of NCBI NO: 18409039 NR Description: flavonol synthase - like protein
  misc_feature (1)..(117): Homolog of NCBI NO: 6984228 NR Description: putative flavonol synthase-like protein
MANDKDLLQVVRLLDDACKEAGFFYVKGHGIDESLMREVRNVTREFFQLPYEEKLKIKMTPQSGYRGYQRIGENITKGKPDMHEAIDCYTPIRPGKYGDLAKPMEGSNLWPKYPSNFE

SEQ ID NO: 18837 - protein, 83 aa, Zea mays subsp. mays
  peptide (1)..(83): Ceres Seq. ID no. 1846811
  misc_feature (1)..(76): Homolog of NCBI NO: 23130050 NR Description: hypothetical protein [Nostoc punctiforme]
  misc_feature (1)..(63): Homolog of NCBI NO: 10834554 NR Description: 2-oxoacid-dependent oxidase [Arabidopsis thaliana]
  misc_feature (1)..(82): Homolog of NCBI NO: 11255891 NR Description: hypothetical protein T9C5.210 - Arabidopsis
  misc_feature (1)..(82): Homolog of NCBI NO: 22331716 NR Description: oxidoreductase (din11), putative; protein id:
  misc_feature (1)..(82): Homolog of NCBI NO: 19423910 NR Description: unknown protein [Arabidopsis thaliana]
  misc_feature (1)..(82): Homolog of NCBI NO: 11255902 NR Description: flavonol synthase-like protein - Arabidopsis
  misc_feature (1)..(82): Homolog of NCBI NO: 15229181 NR Description: putative protein; protein id: At3g49630.1
  misc_feature (1)..(82): Homolog of NCBI NO: 21554579 NR Description: flavonol synthase-like protein [Arabidopsis
  misc_feature (1)..(82): Homolog of NCBI NO: 18409039 NR Description: flavonol synthase - like protein
  misc_feature (1)..(82): Homolog of NCBI NO: 6984228 NR Description: putative flavonol synthase-like protein
MREVRNVTREFFQLPYEEKLKIKMTPQSGYRGYQRIGENITKGKPDMHEAIDCYTPIRPGKYGDLAKPMEGSNLWPKYPSNFE

SEQ ID NO: 18838 - DNA, 468 bp, Zea mays subsp. mays
  misc_feature (1)..(468): Ceres Seq. ID no. 1851208
  misc_feature: MA Experiment ID: 20000487 Result: Up-regulated in Transcription
  misc_feature: MA Experiment 20000487 PARAMETER Experiment Name: Zm_50mM_NH4NO3_L_to_H_P Parameter: Organism Value: Zea mays
  misc_feature: MA Experiment 20000487 PARAMETER Experiment Name: Zm_50mM_NH4NO3_L_to_H_P Parameter: Timepoint (hr) Value: 4
  misc_feature: MA Experiment 20000487 PARAMETER Experiment Name: Zm_50mM_NH4NO3_L_to_H_P Parameter: Tissue Value: Leaves
  misc_feature: MA Experiment 20000487 PARAMETER Experiment Name: Zm_50mM_NH4NO3_L_to_H_P Parameter: Treatment Value: 50mM NH4NO3 vs. 100mM Mannitol
  misc_feature: MA Experiment ID: 20000488 Result: Up-regulated in Transcription
  misc_feature: MA Experiment 20000488 PARAMETER Experiment Name: Zm_50mM_NH4NO3_L_to_H_P Parameter: Organism Value: Zea mays
  misc_feature: MA Experiment 20000488 PARAMETER Experiment Name: Zm_50mM_NH4NO3_L_to_H_P Parameter: Timepoint (hr) Value: 8
  misc_feature: MA Experiment 20000488 PARAMETER Experiment Name: Zm_50mM_NH4NO3_L_to_H_P Parameter: Tissue Value: Leaves
  misc_feature: MA Experiment 20000488 PARAMETER Experiment Name: Zm_50mM_NH4NO3_L_to_H_P Parameter: Treatment Value: 50mM NH4NO3 vs. 100mM Mannitol
  misc_feature: MA Experiment ID: 20000492 Result: Up-regulated in Transcription
  misc_feature: MA Experiment 20000492 PARAMETER Experiment Name: Zm_Hybrid_Seed_Dev_P Parameter: DAP Value: 12
  misc_feature: MA Experiment 20000492 PARAMETER Experiment Name: Zm_Hybrid_Seed_Dev_P Parameter: Organism Value: Zea mays
  misc_feature: MA Experiment 20000492 PARAMETER Experiment Name: Zm_Hybrid_Seed_Dev_P Parameter: Plant Line Value: 35A19
  misc_feature: MA Experiment 20000492 PARAMETER Experiment Name: Zm_Hybrid_Seed_Dev_P Parameter: Tissue Value: Fert Kernel vs. Unfert Floret
  misc_feature: MA Experiment ID: 20001605 Result: Up-regulated in Transcription
  misc_feature: MA Experiment 20001605 PARAMETER Experiment Name: Zm_50ppm_KNO3_L-to-H_P Parameter: Age (day) Value: 19
  misc_feature: MA Experiment 20001605 PARAMETER Experiment Name: Zm_50ppm_KNO3_L-to-H_P Parameter: Organism Value: Zea mays
  misc_feature: MA Experiment 20001605 PARAMETER Experiment Name: Zm_50ppm_KNO3_L-to-H_P Parameter: Plant Line Value: 35A19
  misc_feature: MA Experiment 20001605 PARAMETER Experiment Name: Zm_50ppm_KNO3_L-to-H_P Parameter: Timepoint (hr) Value: 4
  misc_feature: MA Experiment 20001605 PARAMETER Experiment Name: Zm_50ppm_KNO3_L-to-H_P Parameter: Tissue Value: Shoots
  misc_feature: MA Experiment 20001605 PARAMETER Experiment Name: Zm_50ppm_KNO3_L-to-H_P Parameter: Treatment Value: 50ppm KNO3 vs. 50ppm KCl
  misc_feature: MA Experiment ID: 20001606 Result: Up-regulated in Transcription
  misc_feature: MA Experiment 20001606 PARAMETER Experiment Name: Zm_50ppm_KNO3_L-to-H_P Parameter: Age (day) Value: 19
  misc_feature: MA Experiment 20001606 PARAMETER Experiment Name: Zm_50ppm_KNO3_L-to-H_P Parameter: Organism Value: Zea mays
  misc_feature: MA Experiment 20001606 PARAMETER Experiment Name: Zm_50ppm_KNO3_L-to-H_P Parameter: Plant Line Value: 35A19
  misc_feature: MA Experiment 20001606 PARAMETER Experiment Name: Zm_50ppm_KNO3_L-to-H_P Parameter: Timepoint (hr) Value: 8
  misc_feature: MA Experiment 20001606 PARAMETER Experiment Name: Zm_50ppm_KNO3_L-to-H_P Parameter: Tissue Value: Shoots
  misc_feature: MA Experiment 20001606 PARAMETER Experiment Name: Zm_50ppm_KNO3_L-to-H_P Parameter: Treatment Value: 50ppm KNO3 vs. 50ppm KCl
  misc_feature: MA Experiment ID: 20001610 Result: Up-regulated in Transcription
  misc_feature: MA Experiment 20001610 PARAMETER Experiment Name: Zm_50ppm_KNO3_L-to-H_P Parameter: Age (day) Value: 19
  misc_feature: MA Experiment 20001610 PARAMETER Experiment Name: Zm_50ppm_KNO3_L-to-H_P Parameter: Organism Value: Zea mays
  misc_feature: MA Experiment 20001610 PARAMETER Experiment Name: Zm_50ppm_KNO3_L-to-H_P Parameter: Plant Line Value: 35A19
  misc_feature: MA Experiment 20001610 PARAMETER Experiment Name: Zm_50ppm_KNO3_L-to-H_P Parameter: Timepoint (hr) Value: 2
  misc_feature: MA Experiment 20001610 PARAMETER Experiment Name: Zm_50ppm_KNO3_L-to-H_P Parameter: Tissue Value: Roots
  misc_feature: MA Experiment 20001610 PARAMETER Experiment Name: Zm_50ppm_KNO3_L-to-H_P Parameter: Treatment Value: 50ppm KNO3 vs. 50ppm KCl
  misc_feature: Pfam Name: SWIB Pfam Description: SWIB/MDM2 domain
atccccagaaccacacggataaaccctagctgcgcgagccccccggcgatgtcggtggccatccgctccggcgagctccttgcgtgccccgtcgcactccggcgggcgcccttggctgtgtctgtggtgtcggtgcggatgagggctaggggcgccgtggctgtgcgggcggaggcaacggccgagggggtagggaaagaggggaagaaggcggcggggaagaagaagccggcgagcgggatcaccaagccgaagcccatctctacagagctgcgggagttcgtcggcggcgcggcggagctgccccggactgaggccatcaagctggtatgggcgcacatcaagggcaacaacctccaggatccaaacaacaagaagataataatctgcgatgagaaactgaagaagaaggggcactcctactctgagatcatcaacgagagcgtgattgagtcggtggactcgctg

SEQ ID NO: 18839 - protein, 156 aa, Zea mays subsp. mays
  peptide (1)..(156): Ceres Seq. ID no. 1851209
  misc_feature: Pfam Name: SWIB Pfam Description: SWIB/MDM2 domain
  misc_feature (18)..(135): Homolog of NCBI NO: 21593643 NR Description: unknown [Arabidopsis thaliana]
  misc_feature (36)..(135): Homolog of NCBI NO: 6324869 NR Description: Topoisomerase 1 and RAD52 epistasis group
  misc_feature (71)..(135): Homolog of NCBI NO: 33667910 NR Description: SWIb domain-containing protein [Solanum chacoense]
  misc_feature (17)..(136): Homolog of NCBI NO: 21593713 NR Description: unknown [Arabidopsis thaliana]
  misc_feature (44)..(136): Homolog of NCBI NO: 18397658 NR Description: expressed protein
  misc_feature (19)..(136): Homolog of NCBI NO: 19698859 NR Description: unknown protein [Arabidopsis thaliana]
  misc_feature (19)..(136): Homolog of NCBI NO: 15235320 NR Description: putative protein
  misc_feature (19)..(136): Homolog of NCBI NO: 14423526 NR Description: putative protein [Arabidopsis thaliana]
  misc_feature (19)..(136): Homolog of NCBI NO: 21553903 NR Description: unknown [Arabidopsis thaliana]
  misc_feature (12)..(135): Homolog of NCBI NO: 14488372 NR Description: hypothetical protein [Oryza sativa (japonica
IPRTTRINPSCASPPAMSVAIRSGELLACPVALRRAPLAVSVVSVRMRARGAVAVRAEATAEGVGKEGKKAAGKKKPASGITKPKPISTELREFVGGAAELPRTEAIKLVWAHIKGNNLQDPNNKKIIICDEKLKKKGHSYSEIINESVIESVDSL

SEQ ID NO: 18840 - protein, 140 aa, Zea mays subsp. mays
  peptide (1)..(140): Ceres Seq. ID no. 1851210
  misc_feature: Pfam Name: SWIB Pfam Description: SWIB/MDM2 domain
  misc_feature (2)..(119): Homolog of NCBI NO: 21593643 NR Description: unknown [Arabidopsis thaliana]
  misc_feature (20)..(119): Homolog of NCBI NO: 6324869 NR Description: Topoisomerase 1 and RAD52 epistasis group
  misc_feature (55)..(119): Homolog of NCBI NO: 33667910 NR Description: SWIb domain-containing protein [Solanum chacoense]
  misc_feature (1)..(120): Homolog of NCBI NO: 21593713 NR Description: unknown [Arabidopsis thaliana]
  misc_feature (28)..(120): Homolog of NCBI NO: 18397658 NR Description: expressed protein
  misc_feature (3)..(120): Homolog of NCBI NO: 19698859 NR Description: unknown protein [Arabidopsis thaliana]
  misc_feature (3)..(120): Homolog of NCBI NO: 15235320 NR Description: putative protein
  misc_feature (3)..(120): Homolog of NCBI NO: 14423526 NR Description: putative protein [Arabidopsis thaliana]
  misc_feature (3)..(120): Homolog of NCBI NO: 21553903 NR Description: unknown [Arabidopsis thaliana]
  misc_feature (1)..(119): Homolog of NCBI NO: 14488372 NR Description: hypothetical protein [Oryza sativa (japonica
MSVAIRSGELLACPVALRRAPLAVSVVSVRMRARGAVAVRAEATAEGVGKEGKKAAGKKKPASGITKPKPISTELREFVGGAAELPRTEAIKLVWAHIKGNNLQDPNNKKIIICDEKLKKKGHSYSEIINESVIESVDSL

SEQ ID NO: 18841 - protein, 110 aa, Zea mays subsp. mays
  peptide (1)..(110): Ceres Seq. ID no. 1851211
  misc_feature: Pfam Name: SWIB Pfam Description: SWIB/MDM2 domain
  misc_feature (1)..(89): Homolog of NCBI NO: 21593643 NR Description: unknown [Arabidopsis thaliana]
  misc_feature (1)..(89): Homolog of NCBI NO: 6324869 NR Description: Topoisomerase 1 and RAD52 epistasis group
  misc_feature (25)..(89): Homolog of NCBI NO: 33667910 NR Description: SWIb domain-containing protein [Solanum chacoense]
  misc_feature (1)..(90): Homolog of NCBI NO: 21593713 NR Description: unknown [Arabidopsis thaliana]
  misc_feature (1)..(90): Homolog of NCBI NO: 18397658 NR Description: expressed protein
  misc_feature (1)..(90): Homolog of NCBI NO: 19698859 NR Description: unknown protein [Arabidopsis thaliana]
  misc_feature (1)..(90): Homolog of NCBI NO: 15235320 NR Description: putative protein
  misc_feature (1)..(90): Homolog of NCBI NO: 14423526 NR Description: putative protein [Arabidopsis thaliana]
  misc_feature (1)..(90): Homolog of NCBI NO: 21553903 NR Description: unknown [Arabidopsis thaliana]
  misc_feature (1)..(89): Homolog of NCBI NO: 14488372 NR Description: hypothetical protein [Oryza sativa (japonica
MRARGAVAVRAEATAEGVGKEGKKAAGKKKPASGITKPKPISTELREFVGGAAELPRTEAIKLVWAHIKGNNLQDPNNKKIIICDEKLKKKGHSYSEIINESVIESVDSL

SEQ ID NO: 18842 - DNA, 1863 bp, Zea mays subsp. mays
  misc_feature (1)..(1863): Ceres Seq. ID no. 12566913
  misc_feature: MA Experiment ID: 108504 Result: Down-regulated in Transcription
  misc_feature: MA Experiment 108504 PARAMETER Experiment Name: Zm_Drought_P Parameter: Age (day) Value: 8
  misc_feature: MA Experiment 108504 PARAMETER Experiment Name: Zm_Drought_P Parameter: Organism Value: Zea mays
  misc_feature: MA Experiment 108504 PARAMETER Experiment Name: Zm_Drought_P Parameter: Plant Line Value: 35A19
  misc_feature: MA Experiment 108504 PARAMETER Experiment Name: Zm_Drought_P Parameter: Timepoint (hr) Value: 12
  misc_feature: MA Experiment 108504 PARAMETER Experiment Name: Zm_Drought_P Parameter: Tissue Value: Aerial
  misc_feature: MA Experiment 108504 PARAMETER Experiment Name: Zm_Drought_P Parameter: Treatment Value: Drought vs. No Drought
  misc_feature: MA Experiment ID: 108530 Result: Down-regulated in Transcription
  misc_feature: MA Experiment 108530 PARAMETER Experiment Name: Zm_Imbibed_Seeds_P Parameter: Age (day) Value: 6 vs. 2
  misc_feature: MA Experiment 108530 PARAMETER Experiment Name: Zm_Imbibed_Seeds_P Parameter: Organism Value: Zea mays
  misc_feature: MA Experiment 108530 PARAMETER Experiment Name: Zm_Imbibed_Seeds_P Parameter: Plant Line Value: 35A19
  misc_feature: MA Experiment 108530 PARAMETER Experiment Name: Zm_Imbibed_Seeds_P Parameter: Tissue Value: Aerial vs. Embryo
  misc_feature: MA Experiment ID: 108535 Result: Up-regulated in Transcription
  misc_feature: MA Experiment 108535 PARAMETER Experiment Name: Zm_Meristem_P Parameter: Age (day) Value: 8
  misc_feature: MA Experiment 108535 PARAMETER Experiment Name: Zm_Meristem_P Parameter: Organism Value: Zea mays
  misc_feature: MA Experiment 108535 PARAMETER Experiment Name: Zm_Meristem_P Parameter: Plant Line Value: 35A19
  misc_feature: MA Experiment 108535 PARAMETER Experiment Name: Zm_Meristem_P Parameter: Tissue Value: Root Meristem vs. Above Root Meristem
  misc_feature: MA Experiment ID: 108544 Result: Down-regulated in Transcription
  misc_feature: MA Experiment ID: 108597 Result: Down-regulated in Transcription
  misc_feature: MA Experiment 108597 PARAMETER Experiment Name: Zm_100uM_ABA_P Parameter: Age (day) Value: 9
  misc_feature: MA Experiment 108597 PARAMETER Experiment Name: Zm_100uM_ABA_P Parameter: Organism Value: Zea mays
  misc_feature: MA Experiment 108597 PARAMETER Experiment Name: Zm_100uM_ABA_P Parameter: Plant Line Value: 35A19
  misc_feature: MA Experiment 108597 PARAMETER Experiment Name: Zm_100uM_ABA_P Parameter: Timepoint (hr) Value: 24
  misc_feature: MA Experiment 108597 PARAMETER Experiment Name: Zm_100uM_ABA_P Parameter: Tissue Value: Aerial
  misc_feature: MA Experiment 108597 PARAMETER Experiment Name: Zm_100uM_ABA_P Parameter: Treatment Value: 100uM ABA vs. No Treatment
  misc_feature: MA Experiment ID: 108687 Result: Down-regulated in Transcription
  misc_feature: MA Experiment 108687 PARAMETER Experiment Name: Zm_Embryos-Flowers__P Parameter: Tissue Value: Embryo vs. Aerial+
  misc_feature: MA Experiment ID: 20000492 Result: Up-regulated in Transcription
  misc_feature: MA Experiment 20000492 PARAMETER Experiment Name: Zm_Hybrid_Seed_Dev_P Parameter: DAP Value: 12
  misc_feature: MA Experiment 20000492 PARAMETER Experiment Name: Zm_Hybrid_Seed_Dev_P Parameter: Organism Value: Zea mays
  misc_feature: MA Experiment 20000492 PARAMETER Experiment Name: Zm_Hybrid_Seed_Dev_P Parameter: Plant Line Value: 35A19
  misc_feature: MA Experiment 20000492 PARAMETER Experiment Name: Zm_Hybrid_Seed_Dev_P Parameter: Tissue Value: Fert Kernel vs. Unfert Floret
  misc_feature: MA Experiment ID: 20000535 Result: Up-regulated in Transcription
  misc_feature: MA Experiment 20000535 PARAMETER Experiment Name: Zm_Hybrid_Seed_Dev_P Parameter: DAP Value: 30 vs. 12
  misc_feature: MA Experiment 20000535 PARAMETER Experiment Name: Zm_Hybrid_Seed_Dev_P Parameter: Organism Value: Zea mays
  misc_feature: MA Experiment 20000535 PARAMETER Experiment Name: Zm_Hybrid_Seed_Dev_P Parameter: Plant Line Value: 35A19
  misc_feature: MA Experiment 20000535 PARAMETER Experiment Name: Zm_Hybrid_Seed_Dev_P Parameter: Tissue Value: Embryo vs. Unfert Floret
  misc_feature: MA Experiment ID: 20000632 Result: Down-regulated in Transcription
  misc_feature: MA Experiment 20000632 PARAMETER Experiment Name: Zm_Herbicide-Treatments_P Parameter: Timepoint (hr) Value: 4
  misc_feature: MA Experiment 20000632 PARAMETER Experiment Name: Zm_Herbicide-Treatments_P Parameter: Tissue Value: Aerial
  misc_feature: MA Experiment 20000632 PARAMETER Experiment Name: Zm_Herbicide-Treatments_P Parameter: Treatment Value: Glean vs. No Treatment
gcgggaaactctcaaaatcatcttctccgtttccagtccacaaccttctccattcctcaataccgcaaaccctagaaaaatctcgctccgcaaaaccatgagcgcccctatggagatctccttcactgcgcccccaccccctccggacgcagcgtctaccgccgacgcttccccgctgctggaacctgccgccgcgcagatgctgccccctgtcgccgcagtctcctcctcgcagccgatgcagcagacagctgcggctgcggccgtggttgctccttccccggccgacgataaggtcctcgtgtcagttgaggtactgttgcacgccacgagcgtagctcgccacgaggacgtccaggtggcggtcgagaggatgctcgaagctcgaagcttaagctatgttgatgggcctgtgccaattcctgccgataattcttttcttcttgaaaatgtcaaaaggatacaaataagtgatactgatgagtgggttgagaatcacaaagttctcttattttggcaagtcaagcctgttgtgcatgtgttccagctgagtgaagatggtccaggtgaggaaccaagcgaggatgatacactctctagctttaatgagtgggccttaccggccaaagaatttgatggtctgtgggaaagtttactatatgaagttggtctcaagcagaggttgctgagatatgctgtcagtgctttgctttttactgaaagaggtgtggacacatgtctggtttcatggaaccggattgtacttttgcatggtccacctggaacaggaaagacttccttgtgtaaagcactagcacagaaactttctattcggttcaaatcaaggtattctatgtgtcaattgattgaagtcaatgctcattcattgttcagcaagtggttttctgaaagtggaaaactggttgccaaacttttccagaagatccaggagatggtggaggaagaaagcaacctagtatttgtattaatagatgaagttgaaagccttgctgctgccagacaagctgccatatctggctctgaaccttcagactccattagagttgtgaatgcactgctaacacaaatggacaaactgaagtcttggccaaatgttatcattttgacaacatcgaatattactacagcaatagatattgcatttgttgacagggcagacattaaggcatatgtcggaccccctacgcttcaagcacgatacgagatcttgaggtcatgcatacaggaactcttaagagttggtattcttacatatcctcagggtagtagtgtgccatgtattctgaactattcgaccctgaaggagaagaagcactgtcctgaggctgcagaaccccatggtgcgcttcatctatccaatctactgtatgaagccgcaaaactgtgtgagggacttagtggccggtcattgaggaaactccctttcctgacacatgcctctgttaccaatccgtcatgctgcgatgcttctactttcttgcatacattgatacagactgcacggagagaagtcttggagtcacgtggttagttcacccttgaaaccttggcgtcttttggaagagcaaaatgctaacagttcattccaaacaccatgtcctggagtcccctgatgtgatcaattgccgggtcgttaaaaccataagaaagtccatcccatcgctagagttaggttagtgttaaatgtagagagacaagaacaaagaatgaatgaattggcttaattccattgattgatcggtatgtatatacatggcgaacagtcgccttgacgttccttagggatgtcacacggttaatagtaagcctagtcacaaatccgtttgaagatagatccgttgg

SEQ ID NO: 18843 - protein, 516 aa, Zea mays subsp. mays
  peptide (1)..(516): Ceres Seq. ID no. 12566914
  misc_feature (253)..(417): Pfam Name: ATPase family associated with various cellular Pfam Description: ATPase family associated with various cellular
  misc_feature (86)..(515): Homolog of NCBI NO: 34853393 NR Description: similar to thyroid hormone receptor interactor 13
  misc_feature (101)..(503): Homolog of NCBI NO: 38969923 NR Description: Unknown (protein for MGC:76197) [Silurana
  misc_feature (86)..(515): Homolog of NCBI NO: 20908701 NR Description: thyroid hormone receptor interactor 13 [Mus
  misc_feature (86)..(503): Homolog of NCBI NO: 11321607 NR Description: thyroid hormone receptor interactor 13
  misc_feature (86)..(515): Homolog of NCBI NO: 12845703 NR Description: unnamed protein product [Mus musculus]
  misc_feature (470)..(513): Homolog of NCBI NO: 7485976 NR Description: hypothetical protein F22K18.90 - Arabidopsis
  misc_feature (82)..(160): Homolog of NCBI NO: 7485976 NR Description: hypothetical protein F22K18.90 - Arabidopsis
  misc_feature (195)..(424): Homolog of NCBI NO: 7485976 NR Description: hypothetical protein F22K18.90 - Arabidopsis
  misc_feature (82)..(513): Homolog of NCBI NO: 30686626 NR Description: protein -related binding protein [Arabidopsis
  misc_feature (37)..(516): Homolog of NCBI NO: 38605777 NR Description: OSJNBa0044K18.20 [Oryza sativa (japonica
RETLKIIFSVSSPQPSPFLNTANPRKISLRKTMSAPMEISFTAPPPPPDAASTADASPLLEPAAAQMLPPVAAVSSSQPMQQTAAAAAVVAPSPADDKVLVSVEVLLHATSVARHEDVQVAVERMLEARSLSYVDGPVPIPADNSFLLENVKRIQISDTDEWVENHKVLLFWQVKPVVHVFQLSEDGPGEEPSEDDTLSSFNEWALPAKEFDGLWESLLYEVGLKQRLLRYAVSALLFTERGVDTCLVSWNRIVLLHGPPGTGKTSLCKALAQKLSIRFKSRYSMCQLIEVNAHSLFSKWFSESGKLVAKLFQKIQEMVEEESNLVFVLIDEVESLAAARQAAISGSEPSDSIRVVNALLTQMDKLKSWPNVIILTTSNITTAIDIAFVDRADIKAYVGPPTLQARYEILRSCIQELLRVGILTYPQGSSVPCILNYSTLKEKKHCPEAAEPHGALHLSNLLYEAAKLCEGLSGRSLRKLPFLTHASVTNPSCCDASTFLHTLIQTARREVLESRG

SEQ ID NO: 18844 - protein, 484 aa, Zea mays subsp. mays
  peptide (1)..(484): Ceres Seq. ID no. 12566915
  misc_feature (221)..(385): Pfam Name: ATPase family associated with various cellular Pfam Description: ATPase family associated with various cellular
  misc_feature (54)..(483): Homolog of NCBI NO: 34853393 NR Description: similar to thyroid hormone receptor interactor 13
  misc_feature (69)..(471): Homolog of NCBI NO: 38969923 NR Description: Unknown (protein for MGC:76197) [Silurana
  misc_feature (54)..(483): Homolog of NCBI NO: 20908701 NR Description: thyroid hormone receptor interactor 13 [Mus
  misc_feature (54)..(471): Homolog of NCBI NO: 11321607 NR Description: thyroid hormone receptor interactor 13
  misc_feature (54)..(483): Homolog of NCBI NO: 12845703 NR Description: unnamed protein product [Mus musculus]
  misc_feature (438)..(481): Homolog of NCBI NO: 7485976 NR Description: hypothetical protein F22K18.90 - Arabidopsis
  misc_feature (50)..(128): Homolog of NCBI NO: 7485976 NR Description: hypothetical protein F22K18.90 - Arabidopsis
  misc_feature (163)..(392): Homolog of NCBI NO: 7485976 NR Description: hypothetical protein F22K18.90 - Arabidopsis
  misc_feature (50)..(481): Homolog of NCBI NO: 30686626 NR Description: protein -related binding protein [Arabidopsis
  misc_feature (5)..(484): Homolog of NCBI NO: 38605777 NR Description: OSJNBa0044K18.20 [Oryza sativa (japonica
MSAPMEISFTAPPPPPDAASTADASPLLEPAAAQMLPPVAAVSSSQPMQQTAAAAAVVAPSPADDKVLVSVEVLLHATSVARHEDVQVAVERMLEARSLSYVDGPVPIPADNSFLLENVKRIQISDTDEWVENHKVLLFWQVKPVVHVFQLSEDGPGEEPSEDDTLSSFNEWALPAKEFDGLWESLLYEVGLKQRLLRYAVSALLFTERGVDTCLVSWNRIVLLHGPPGTGKTSLCKALAQKLSIRFKSRYSMCQLIEVNAHSLFSKWFSESGKLVAKLFQKIQEMVEEESNLVFVLIDEVESLAAARQAAISGSEPSDSIRVVNALLTQMDKLKSWPNVIILTTSNITTAIDIAFVDRADIKAYVGPPTLQARYEILRSCIQELLRVGILTYPQGSSVPCILNYSTLKEKKHCPEAAEPHGALHLSNLLYEAAKLCEGLSGRSLRKLPFLTHASVTNPSCCDASTFLHTLIQTARREVLESRG

SEQ ID NO: 18845 - protein, 480 aa, Zea mays subsp. mays
  peptide (1)..(480): Ceres Seq. ID no. 12566916
  misc_feature (217)..(381): Pfam Name: ATPase family associated with various cellular Pfam Description: ATPase family associated with various cellular
  misc_feature (46)..(477): Homolog of NCBI NO: 30686626 NR Description: protein -related binding protein [Arabidopsis
  misc_feature (50)..(479): Homolog of NCBI NO: 34853393 NR Description: similar to thyroid hormone receptor interactor 13
  misc_feature (50)..(479): Homolog of NCBI NO: 20908701 NR Description: thyroid hormone receptor interactor 13 [Mus
  misc_feature (50)..(479): Homolog of NCBI NO: 12845703 NR Description: unnamed protein product [Mus musculus]
  misc_feature (46)..(124): Homolog of NCBI NO: 7485976 NR Description: hypothetical protein F22K18.90 - Arabidopsis
  misc_feature (159)..(388): Homolog of NCBI NO: 7485976 NR Description: hypothetical protein F22K18.90 - Arabidopsis
  misc_feature (434)..(477): Homolog of NCBI NO: 7485976 NR Description: hypothetical protein F22K18.90 - Arabidopsis
  misc_feature (50)..(467): Homolog of NCBI NO: 11321607 NR Description: thyroid hormone receptor interactor 13
  misc_feature (65)..(467): Homolog of NCBI NO: 38969923 NR Description: Unknown (protein for MGC:76197) [Silurana
  misc_feature (1)..(480): Homolog of NCBI NO: 38605777 NR Description: OSJNBa0044K18.20 [Oryza sativa (japonica
MEISFTAPPPPPDAASTADASPLLEPAAAQMLPPVAAVSSSQPMQQTAAAAAVVAPSPADDKVLVSVEVLLHATSVARHEDVQVAVERMLEARSLSYVDGPVPIPADNSFLLENVKRIQISDTDEWVENHKVLLFWQVKPVVHVFQLSEDGPGEEPSEDDTLSSFNEWALPAKEFDGLWESLLYEVGLKQRLLRYAVSALLFTERGVDTCLVSWNRIVLLHGPPGTGKTSLCKALAQKLSIRFKSRYSMCQLIEVNAHSLFSKWFSESGKLVAKLFQKIQEMVEEESNLVFVLIDEVESLAAARQAAISGSEPSDSIRVVNALLTQMDKLKSWPNVIILTTSNITTAIDIAFVDRADIKAYVGPPTLQARYEILRSCIQELLRVGILTYPQGSSVPCILNYSTLKEKKHCPEAAEPHGALHLSNLLYEAAKLCEGLSGRSLRKLPFLTHASVTNPSCCDASTFLHTLIQTARREVLESRG

SEQ ID NO: 18846 - DNA, 457 bp, Zea mays subsp. mays
  misc_feature (1)..(457): Ceres Seq. ID no. 12387788
  misc_feature: MA Experiment ID: 108504 Result: Up-regulated in Transcription
  misc_feature: MA Experiment 108504 PARAMETER Experiment Name: Zm_Drought_P Parameter: Age (day) Value: 8
  misc_feature: MA Experiment 108504 PARAMETER Experiment Name: Zm_Drought_P Parameter: Organism Value: Zea mays
  misc_feature: MA Experiment 108504 PARAMETER Experiment Name: Zm_Drought_P Parameter: Plant Line Value: 35A19
  misc_feature: MA Experiment 108504 PARAMETER Experiment Name: Zm_Drought_P Parameter: Timepoint (hr) Value: 12
  misc_feature: MA Experiment 108504 PARAMETER Experiment Name: Zm_Drought_P Parameter: Tissue Value: Aerial
  misc_feature: MA Experiment 108504 PARAMETER Experiment Name: Zm_Drought_P Parameter: Treatment Value: Drought vs. No Drought
  misc_feature: MA Experiment ID: 108527 Result: Up-regulated in Transcription
  misc_feature: MA Experiment 108527 PARAMETER Experiment Name: Zm_5mM_NO_P Parameter: Age (day) Value: 8
  misc_feature: MA Experiment 108527 PARAMETER Experiment Name: Zm_5mM_NO_P Parameter: Organism Value: Zea mays
  misc_feature: MA Experiment 108527 PARAMETER Experiment Name: Zm_5mM_NO_P Parameter: Plant Line Value: 35A19
  misc_feature: MA Experiment 108527 PARAMETER Experiment Name: Zm_5mM_NO_P Parameter: Timepoint (hr) Value: 6
  misc_feature: MA Experiment 108527 PARAMETER Experiment Name: Zm_5mM_NO_P Parameter: Tissue Value: Aerial
  misc_feature: MA Experiment 108527 PARAMETER Experiment Name: Zm_5mM_NO_P Parameter: Treatment Value: 5mM NO vs. No Treatment
  misc_feature: MA Experiment ID: 108529 Result: Up-regulated in Transcription
  misc_feature: MA Experiment 108529 PARAMETER Experiment Name: Zm_Imbibed_Seeds_P Parameter: Age (day) Value: 5 vs. 2
  misc_feature: MA Experiment 108529 PARAMETER Experiment Name: Zm_Imbibed_Seeds_P Parameter: Organism Value: Zea mays
  misc_feature: MA Experiment 108529 PARAMETER Experiment Name: Zm_Imbibed_Seeds_P Parameter: Plant Line Value: 35A19
  misc_feature: MA Experiment 108529 PARAMETER Experiment Name: Zm_Imbibed_Seeds_P Parameter: Tissue Value: Roots vs. Embryo
  misc_feature: MA Experiment ID: 108535 Result: Down-regulated in Transcription
  misc_feature: MA Experiment 108535 PARAMETER Experiment Name: Zm_Meristem_P Parameter: Age (day) Value: 8
  misc_feature: MA Experiment 108535 PARAMETER Experiment Name: Zm_Meristem_P Parameter: Organism Value: Zea mays
  misc_feature: MA Experiment 108535 PARAMETER Experiment Name: Zm_Meristem_P Parameter: Plant Line Value: 35A19
  misc_feature: MA Experiment 108535 PARAMETER Experiment Name: Zm_Meristem_P Parameter: Tissue Value: Root Meristem vs. Above Root Meristem
  misc_feature: MA Experiment ID: 108556 Result: Up-regulated in Transcription
  misc_feature: MA Experiment 108556 PARAMETER Experiment Name: Zm_Drought_P Parameter: Age (day) Value: 9
  misc_feature: MA Experiment 108556 PARAMETER Experiment Name: Zm_Drought_P Parameter: Organism Value: Zea mays
  misc_feature: MA Experiment 108556 PARAMETER Experiment Name: Zm_Drought_P Parameter: Plant Line Value: 35A19
  misc_feature: MA Experiment 108556 PARAMETER Experiment Name: Zm_Drought_P Parameter: Timepoint (hr) Value: 24
  misc_feature: MA Experiment 108556 PARAMETER Experiment Name: Zm_Drought_P Parameter: Tissue Value: Aerial
  misc_feature: MA Experiment 108556 PARAMETER Experiment Name: Zm_Drought_P Parameter: Treatment Value: Drought vs. No Drought
  misc_feature: MA Experiment ID: 108689 Result: Up-regulated in Transcription
  misc_feature: MA Experiment 108689 PARAMETER Experiment Name: Zm_Drought_Roots_P Parameter: Age (day) Value: 9
  misc_feature: MA Experiment 108689 PARAMETER Experiment Name: Zm_Drought_Roots_P Parameter: Organism Value: Zea mays
  misc_feature: MA Experiment 108689 PARAMETER Experiment Name: Zm_Drought_Roots_P Parameter: Plant Line Value: 35A19
  misc_feature: MA Experiment 108689 PARAMETER Experiment Name: Zm_Drought_Roots_P Parameter: Timepoint (hr) Value: 24
  misc_feature: MA Experiment 108689 PARAMETER Experiment Name: Zm_Drought_Roots_P Parameter: Tissue Value: Roots
  misc_feature: MA Experiment 108689 PARAMETER Experiment Name: Zm_Drought_Roots_P Parameter: Treatment Value: Drought vs. No Drought
  misc_feature: MA Experiment ID: 20000479 Result: Up-regulated in Transcription
  misc_feature: MA Experiment 20000479 PARAMETER Experiment Name: Zm_Drought_P Parameter: Age (day) Value: 10
  misc_feature: MA Experiment 20000479 PARAMETER Experiment Name: Zm_Drought_P Parameter: Organism Value: Zea mays
  misc_feature: MA Experiment 20000479 PARAMETER Experiment Name: Zm_Drought_P Parameter: Plant Line Value: 35A19
  misc_feature: MA Experiment 20000479 PARAMETER Experiment Name: Zm_Drought_P Parameter: Timepoint (hr) Value: 48
  misc_feature: MA Experiment 20000479 PARAMETER Experiment Name: Zm_Drought_P Parameter: Tissue Value: Aerial
  misc_feature: MA Experiment 20000479 PARAMETER Experiment Name: Zm_Drought_P Parameter: Treatment Value: Drought vs. No Drought
  misc_feature: MA Experiment ID: 20000535 Result: Down-regulated in Transcription
  misc_feature: MA Experiment 20000535 PARAMETER Experiment Name: Zm_Hybrid_Seed_Dev_P Parameter: DAP Value: 30 vs. 12
  misc_feature: MA Experiment 20000535 PARAMETER Experiment Name: Zm_Hybrid_Seed_Dev_P Parameter: Organism Value: Zea mays
  misc_feature: MA Experiment 20000535 PARAMETER Experiment Name: Zm_Hybrid_Seed_Dev_P Parameter: Plant Line Value: 35A19
  misc_feature: MA Experiment 20000535 PARAMETER Experiment Name: Zm_Hybrid_Seed_Dev_P Parameter: Tissue Value: Embryo vs. Unfert Floret
  misc_feature: MA Experiment ID: 20000626 Result: Up-regulated in Transcription
  misc_feature: MA Experiment 20000626 PARAMETER Experiment Name: Zm_Herbicide-Treatments_P Parameter: Timepoint (hr) Value: 12
  misc_feature: MA Experiment 20000626 PARAMETER Experiment Name: Zm_Herbicide-Treatments_P Parameter: Tissue Value: Aerial
  misc_feature: MA Experiment 20000626 PARAMETER Experiment Name: Zm_Herbicide-Treatments_P Parameter: Treatment Value: Roundup vs. No Treatment
atctatccagtcgcatctccctctccgaaatcaaggtagcgtacaccgctgcagtttctagagccctctctgccactcgtgatcccactagtcacaatgcctgccctcgccaagcccgcctcccgcaccgccaagcccgccgcggctccgaagccgaagcctgccgccgccaagccgaaggcggccaccgctggtgcctcccacccgccttacttcgagatgatcaaggaggctatcacggcgctcaaggagaggaccggctccagctcgcaagcgatcgccaagtatgtgggggacaagcacggcgcgtcaacctcttgcactatttattcattcataagttggatgacatcaaataatgatattaacttgatgtattcgcatcttattcattgtaaaaacgttgctcataattaaagagcatccatccaatctcaaagagatttctggagcaatc

SEQ ID NO: 18847 - protein, 118 aa, Zea mays subsp. mays
  peptide (1)..(118): Ceres Seq. ID no. 12387789
LSSRISLSEIKVAYTAAVSRALSATRDPTSHNACPRQARLPHRQARRGSEAEACRRQAEGGHRWCLPPALLRDDQGGYHGAQGEDRLQLASDRQVCGGQARRVNLLHYLFIHKLDDIK

SEQ ID NO: 18848 - protein, 106 aa, Zea mays subsp. mays
  peptide (1)..(106): Ceres Seq. ID no. 12387790
  misc_feature (1)..(71): Homolog of NCBI NO: 6474950 NR Description: variant of histone H1 [Lilium longiflorum]
  misc_feature (1)..(69): Homolog of NCBI NO: 729668 NR Description: Histone H1
  misc_feature (1)..(71): Homolog of NCBI NO: 121950 NR Description: HISTONE H1
  misc_feature (1)..(70): Homolog of NCBI NO: 585238 NR Description: Histone H1-I
  misc_feature (1)..(69): Homolog of NCBI NO: 7439658 NR Description: histone H1, stress-inducible - tomato
  misc_feature (1)..(69): Homolog of NCBI NO: 2623960 NR Description: histone H1 [Apium graveolens]
  misc_feature (10)..(72): Homolog of NCBI NO: 25553627 NR Description: putative histone H1 [Oryza sativa (japonica
  misc_feature (1)..(82): Homolog of NCBI NO: 5230785 NR Description: histone H1 WH1B.1 [Triticum aestivum]
  misc_feature (1)..(70): Homolog of NCBI NO: 18463959 NR Description: histone H1-like protein [Zea mays]
  misc_feature (1)..(82): Homolog of NCBI NO: 22135471 NR Description: histone H1-like protein HON101 [Zea mays]
MPALAKPASRTAKPAAAPKPKPAAAKPKAATAGASHPPYFEMIKEAITALKERTGSSSQAIAKYVGDKHGASTSCTIYSFISWMTSNNDINLMYSHLIHCKNVAHN

SEQ ID NO: 18849 - protein, 65 aa, Zea mays subsp. mays
  peptide (1)..(65): Ceres Seq. ID no. 12387791
  misc_feature (1)..(30): Homolog of NCBI NO: 6474950 NR Description: variant of histone H1 [Lilium longiflorum]
  misc_feature (1)..(28): Homolog of NCBI NO: 729668 NR Description: Histone H1
  misc_feature (1)..(30): Homolog of NCBI NO: 121950 NR Description: HISTONE H1
  misc_feature (1)..(29): Homolog of NCBI NO: 585238 NR Description: Histone H1-I
  misc_feature (1)..(28): Homolog of NCBI NO: 7439658 NR Description: histone H1, stress-inducible - tomato
  misc_feature (1)..(28): Homolog of NCBI NO: 2623960 NR Description: histone H1 [Apium graveolens]
  misc_feature (1)..(31): Homolog of NCBI NO: 25553627 NR Description: putative histone H1 [Oryza sativa (japonica
  misc_feature (1)..(41): Homolog of NCBI NO: 5230785 NR Description: histone H1 WH1B.1 [Triticum aestivum]
  misc_feature (1)..(29): Homolog of NCBI NO: 18463959 NR Description: histone H1-like protein [Zea mays]
  misc_feature (1)..(41): Homolog of NCBI NO: 22135471 NR Description: histone H1-like protein HON101 [Zea mays]
MIKEAITALKERTGSSSQAIAKYVGDKHGASTSCTIYSFISWMTSNNDINLMYSHLIHCKNVAHN

SEQ ID NO: 18850 - DNA, 1320 bp, Zea mays subsp. mays
  misc_feature (1)..(1320): Ceres Seq. ID no. 12360889
  misc_feature: MA Experiment ID: 108527 Result: Down-regulated in Transcription
  misc_feature: MA Experiment 108527 PARAMETER Experiment Name: Zm_5mM_NO_P Parameter: Age (day) Value: 8
  misc_feature: MA Experiment 108527 PARAMETER Experiment Name: Zm_5mM_NO_P Parameter: Organism Value: Zea mays
  misc_feature: MA Experiment 108527 PARAMETER Experiment Name: Zm_5mM_NO_P Parameter: Plant Line Value: 35A19
  misc_feature: MA Experiment 108527 PARAMETER Experiment Name: Zm_5mM_NO_P Parameter: Timepoint (hr) Value: 6
  misc_feature: MA Experiment 108527 PARAMETER Experiment Name: Zm_5mM_NO_P Parameter: Tissue Value: Aerial
  misc_feature: MA Experiment 108527 PARAMETER Experiment Name: Zm_5mM_NO_P Parameter: Treatment Value: 5mM NO vs. No Treatment
  misc_feature: MA Experiment ID: 108528 Result: Up-regulated in Transcription
  misc_feature: MA Experiment 108528 PARAMETER Experiment Name: Zm_Imbibed_Seeds_P Parameter: Age (day) Value: 5 vs. 2
  misc_feature: MA Experiment 108528 PARAMETER Experiment Name: Zm_Imbibed_Seeds_P Parameter: Organism Value: Zea mays
  misc_feature: MA Experiment 108528 PARAMETER Experiment Name: Zm_Imbibed_Seeds_P Parameter: Plant Line Value: 35A19
  misc_feature: MA Experiment 108528 PARAMETER Experiment Name: Zm_Imbibed_Seeds_P Parameter: Tissue Value: Aerial vs. Embryo
  misc_feature: MA Experiment ID: 108530 Result: Up-regulated in Transcription
  misc_feature: MA Experiment 108530 PARAMETER Experiment Name: Zm_Imbibed_Seeds_P Parameter: Age (day) Value: 6 vs. 2
  misc_feature: MA Experiment 108530 PARAMETER Experiment Name: Zm_Imbibed_Seeds_P Parameter: Organism Value: Zea mays
  misc_feature: MA Experiment 108530 PARAMETER Experiment Name: Zm_Imbibed_Seeds_P Parameter: Plant Line Value: 35A19
  misc_feature: MA Experiment 108530 PARAMETER Experiment Name: Zm_Imbibed_Seeds_P Parameter: Tissue Value: Aerial vs. Embryo
  misc_feature: MA Experiment ID: 108536 Result: Down-regulated in Transcription
  misc_feature: MA Experiment 108536 PARAMETER Experiment Name: Zm_Meristem_P Parameter: Age (day) Value: 8
  misc_feature: MA Experiment 108536 PARAMETER Experiment Name: Zm_Meristem_P Parameter: Organism Value: Zea mays
  misc_feature: MA Experiment 108536 PARAMETER Experiment Name: Zm_Meristem_P Parameter: Plant Line Value: 35A19
  misc_feature: MA Experiment 108536 PARAMETER Experiment Name: Zm_Meristem_P Parameter: Tissue Value: Shoot Meristem vs. Above Shoot Meristem
  misc_feature: MA Experiment ID: 108545 Result: Up-regulated in Transcription
  misc_feature: MA Experiment 108545 PARAMETER Experiment Name: Zm_Imbibed_Seeds_P Parameter: Age (day) Value: 3 vs. 2
  misc_feature: MA Experiment 108545 PARAMETER Experiment Name: Zm_Imbibed_Seeds_P Parameter: Organism Value: Zea mays
  misc_feature: MA Experiment 108545 PARAMETER Experiment Name: Zm_Imbibed_Seeds_P Parameter: Plant Line Value: 35A19
  misc_feature: MA Experiment 108545 PARAMETER Experiment Name: Zm_Imbibed_Seeds_P Parameter: Tissue Value: Aerial vs. Embryo
  misc_feature: MA Experiment ID: 108547 Result: Up-regulated in Transcription
  misc_feature: MA Experiment 108547 PARAMETER Experiment Name: Zm_Imbibed_Seeds_P Parameter: Age (day) Value: 4 vs. 2
  misc_feature: MA Experiment 108547 PARAMETER Experiment Name: Zm_Imbibed_Seeds_P Parameter: Organism Value: Zea mays
  misc_feature: MA Experiment 108547 PARAMETER Experiment Name: Zm_Imbibed_Seeds_P Parameter: Plant Line Value: 35A19
  misc_feature: MA Experiment 108547 PARAMETER Experiment Name: Zm_Imbibed_Seeds_P Parameter: Tissue Value: Aerial vs. Embryo
  misc_feature: MA Experiment ID: 108559 Result: Down-regulated in Transcription
  misc_feature: MA Experiment 108559 PARAMETER Experiment Name: Zm_5mM_NO_P Parameter: Age (day) Value: 8
  misc_feature: MA Experiment 108559 PARAMETER Experiment Name: Zm_5mM_NO_P Parameter: Organism Value: Zea mays
  misc_feature: MA Experiment 108559 PARAMETER Experiment Name: Zm_5mM_NO_P Parameter: Plant Line Value: 35A19
  misc_feature: MA Experiment 108559 PARAMETER Experiment Name: Zm_5mM_NO_P Parameter: Timepoint (hr) Value: 12
  misc_feature: MA Experiment 108559 PARAMETER Experiment Name: Zm_5mM_NO_P Parameter: Tissue Value: Aerial
  misc_feature: MA Experiment 108559 PARAMETER Experiment Name: Zm_5mM_NO_P Parameter: Treatment Value: 5mM NO vs. No Treatment
  misc_feature: MA Experiment ID: 108688 Result: Down-regulated in Transcription
  misc_feature: MA Experiment 108688 PARAMETER Experiment Name: Zm_Embryos-Flowers__P Parameter: Tissue Value: Immature Flowers vs. Aerial+
  misc_feature: MA Experiment ID: 108689 Result: Up-regulated in Transcription
  misc_feature: MA Experiment 108689 PARAMETER Experiment Name: Zm_Drought_Roots_P Parameter: Age (day) Value: 9
  misc_feature: MA Experiment 108689 PARAMETER Experiment Name: Zm_Drought_Roots_P Parameter: Organism Value: Zea mays
  misc_feature: MA Experiment 108689 PARAMETER Experiment Name: Zm_Drought_Roots_P Parameter: Plant Line Value: 35A19
  misc_feature: MA Experiment 108689 PARAMETER Experiment Name: Zm_Drought_Roots_P Parameter: Timepoint (hr) Value: 24
  misc_feature: MA Experiment 108689 PARAMETER Experiment Name: Zm_Drought_Roots_P Parameter: Tissue Value: Roots
  misc_feature: MA Experiment 108689 PARAMETER Experiment Name: Zm_Drought_Roots_P Parameter: Treatment Value: Drought vs. No Drought
  misc_feature: MA Experiment ID: 20000477 Result: Down-regulated in Transcription
  misc_feature: MA Experiment 20000477 PARAMETER Experiment Name: Zm_5mM_SA_P Parameter: Age (day) Value: 10
  misc_feature: MA Experiment 20000477 PARAMETER Experiment Name: Zm_5mM_SA_P Parameter: Organism Value: Zea mays
  misc_feature: MA Experiment 20000477 PARAMETER Experiment Name: Zm_5mM_SA_P Parameter: Plant Line Value: 35A19
  misc_feature: MA Experiment 20000477 PARAMETER Experiment Name: Zm_5mM_SA_P Parameter: Timepoint (hr) Value: 48
  misc_feature: MA Experiment 20000477 PARAMETER Experiment Name: Zm_5mM_SA_P Parameter: Tissue Value: Aerial
  misc_feature: MA Experiment 20000477 PARAMETER Experiment Name: Zm_5mM_SA_P Parameter: Treatment Value: 5mM SA vs. No Treatment
  misc_feature: MA Experiment ID: 20000478 Result: Down-regulated in Transcription
  misc_feature: MA Experiment 20000478 PARAMETER Experiment Name: Zm_5mM_SA_P Parameter: Age (day) Value: 11
  misc_feature: MA Experiment 20000478 PARAMETER Experiment Name: Zm_5mM_SA_P Parameter: Organism Value: Zea mays
  misc_feature: MA Experiment 20000478 PARAMETER Experiment Name: Zm_5mM_SA_P Parameter: Plant Line Value: 35A19
  misc_feature: MA Experiment 20000478 PARAMETER Experiment Name: Zm_5mM_SA_P Parameter: Timepoint (hr) Value: 72
  misc_feature: MA Experiment 20000478 PARAMETER Experiment Name: Zm_5mM_SA_P Parameter: Tissue Value: Aerial
  misc_feature: MA Experiment 20000478 PARAMETER Experiment Name: Zm_5mM_SA_P Parameter: Treatment Value: 5mM SA vs. No Treatment
  misc_feature: MA Experiment ID: 20000492 Result: Down-regulated in Transcription
  misc_feature: MA Experiment 20000492 PARAMETER Experiment Name: Zm_Hybrid_Seed_Dev_P Parameter: DAP Value: 12
  misc_feature: MA Experiment 20000492 PARAMETER Experiment Name: Zm_Hybrid_Seed_Dev_P Parameter: Organism Value: Zea mays
  misc_feature: MA Experiment 20000492 PARAMETER Experiment Name: Zm_Hybrid_Seed_Dev_P Parameter: Plant Line Value: 35A19
  misc_feature: MA Experiment 20000492 PARAMETER Experiment Name: Zm_Hybrid_Seed_Dev_P Parameter: Tissue Value: Fert Kernel vs. Unfert Floret
gcacgagaccattacctagaacatcctaatcgaaaaacttgtcgtctcgtccactcggtcgatcgccttatctcctcctctcccagtcctcccgcccctcgccccatcccccaccacccagtcagtgtctgtcaccgcctcaccgaccacacgccaagggaagaagcagcagcgccatggccgcgccgctcacggccgtccgggcccgcctcctcctcctcccagtgacctgcacggcagccggtaccaccggccggccggcccctccgtccaagagcagcaggccgcgtctactaccaccaggcaccacccggtgccggtgctccaggcctcccatggaggcggtggcgccggtgtccgcggcggcggtgggcggcgctgctgctgctgccggcggacgcggcgctggcggtgggcggcgagttggggatcctcgagggccgcagcttcgcgctgctgcacccgctcatcatgggcgggctcttcgcgtacacgctctgggcggggtacctcggctggcagtggcgccgggtgcgcaccgtccaggacgagatcaacgcgctcaagaagcagctcaagcccgccgccgcggccactcccgcggcggtcggcgccggcgcggactcctcctccaccacaaccccgccgcccgctgcggccagcaagtcgccgtcgccggcggaggcccggatcgaggagctcaccgacgagcggaaggcgctgctcaaggggtcgttccgggaccgccacttcaacgcgggctccctcctcctcggcctcggcgtgctcgagtccgtcggcggcgcgctcaacacctggttccgcaccggcaagctgttcccgggcccgcacctcttcgcgggcgccgccatcaccgtgctgtgggccgccgcggccgcgctcgtcccggcgatgcagaagggggacgagacggcccgcagcctgcacatcgcgctcaacgccgtcaacgtcctgctcttcgtctggcagatccccaccgggctcgagatcgtcggcaaggtcttcgagttcaccacctggccatgagacgacgtccttgtgcgtgcgtgtctgctctgctatgcgcatcctgcatgtcccttcacccttctcttctctttcgtcccatcccatgacccatgtattgcttggtagtgttaggttcaatctccgtctgcaggtcgttgttttcttgacctgtcgaagtcgatccatgttcacaaagctgtgatgctgagaatgccaatcacaagttcctttacactgtacatgacaagagttcgttctgcagtacacagtctttagttaagccgaatcgcc

SEQ ID NO: 18851 - protein, 319 aa, Zea mays subsp. mays
  peptide (1)..(319): Ceres Seq. ID no. 12360890
  misc_feature (70)..(268): Pfam Name: HlyD family secretion protein Pfam Description: HlyD family secretion protein
MAAPLTAVRARLLLLPVTCTAAGTTGRPAPPSKSSRPRLLPPGTTRCRCSRPPMEAVAPVSAAAVGGAAAAAGGRGAGGGRRVGDPRGPQLRAAAPAHHGRALRVHALGGVPRLAVAPGAHRPGRDQRAQEAAQARRRGHSRGGRRRRGLLLHHNPAARCGQQVAVAGGGPDRGAHRRAEGAAQGVVPGPPLQRGLPPPRPRRARVRRRRAQHLVPHRQAVPGPAPLRGRRHHRAVGRRGRARPGDAEGGRDGPQPAHRAQRRQRPALRLADPHRARDRRQGLRVHHLAMRRRPCACVSALLCASCMSLHPSLLFRPIP

SEQ ID NO: 18852 - protein, 266 aa, Zea mays subsp. mays
  peptide (1)..(266): Ceres Seq. ID no. 12360891
  misc_feature (17)..(215): Pfam Name: HlyD family secretion protein Pfam Description: HlyD family secretion protein
MEAVAPVSAAAVGGAAAAAGGRGAGGGRRVGDPRGPQLRAAAPAHHGRALRVHALGGVPRLAVAPGAHRPGRDQRAQEAAQARRRGHSRGGRRRRGLLLHHNPAARCGQQVAVAGGGPDRGAHRRAEGAAQGVVPGPPLQRGLPPPRPRRARVRRRRAQHLVPHRQAVPGPAPLRGRRHHRAVGRRGRARPGDAEGGRDGPQPAHRAQRRQRPALRLADPHRARDRRQGLRVHHLAMRRRPCACVSALLCASCMSLHPSLLFRPIP

SEQ ID NO: 18853 - protein, 191 aa, Zea mays subsp. mays
  peptide (1)..(191): Ceres Seq. ID no. 12360892
  misc_feature (79)..(185): Homolog of NCBI NO: 33864786 NR Description: conserved hypothetical protein [Synechococcus sp.
  misc_feature (79)..(184): Homolog of NCBI NO: 23130190 NR Description: hypothetical protein [Nostoc punctiforme]
  misc_feature (79)..(184): Homolog of NCBI NO: 17229007 NR Description: hypothetical protein [Nostoc sp. PCC 7120]
  misc_feature (79)..(184): Homolog of NCBI NO: 16330950 NR Description: hypothetical protein [Synechocystis sp. PCC 6803]
  misc_feature (1)..(35): Homolog of NCBI NO: 17230241 NR Description: hypothetical protein [Nostoc sp. PCC 7120]
  misc_feature (79)..(184): Homolog of NCBI NO: 17230241 NR Description: hypothetical protein [Nostoc sp. PCC 7120]
  misc_feature (1)..(27): Homolog of NCBI NO: 22299036 NR Description: ORF_ID:tll1493~hypothetical protein
  misc_feature (73)..(184): Homolog of NCBI NO: 22299036 NR Description: ORF_ID:tll1493~hypothetical protein
  misc_feature (1)..(191): Homolog of NCBI NO: 15228623 NR Description: putative protein
MGGLFAYTLWAGYLGWQWRRVRTVQDEINALKKQLKPAAAATPAAVGAGADSSSTTTPPPAAASKSPSPAEARIEELTDERKALLKGSFRDRHFNAGSLLLGLGVLESVGGALNTWFRTGKLFPGPHLFAGAAITVLWAAAAALVPAMQKGDETARSLHIALNAVNVLLFVWQIPTGLEIVGKVFEFTTWP

SEQ ID NO: 18854 - DNA, 1372 bp, Zea mays subsp. mays
  misc_feature (1)..(1372): Ceres Seq. ID no. 12381735
  misc_feature: MA Experiment ID: 108689 Result: Up-regulated in Transcription
  misc_feature: MA Experiment 108689 PARAMETER Experiment Name: Zm_Drought_Roots_P Parameter: Age (day) Value: 9
  misc_feature: MA Experiment 108689 PARAMETER Experiment Name: Zm_Drought_Roots_P Parameter: Organism Value: Zea mays
  misc_feature: MA Experiment 108689 PARAMETER Experiment Name: Zm_Drought_Roots_P Parameter: Plant Line Value: 35A19
  misc_feature: MA Experiment 108689 PARAMETER Experiment Name: Zm_Drought_Roots_P Parameter: Timepoint (hr) Value: 24
  misc_feature: MA Experiment 108689 PARAMETER Experiment Name: Zm_Drought_Roots_P Parameter: Tissue Value: Roots
  misc_feature: MA Experiment 108689 PARAMETER Experiment Name: Zm_Drought_Roots_P Parameter: Treatment Value: Drought vs. No Drought
  misc_feature: MA Experiment ID: 20000478 Result: Down-regulated in Transcription
  misc_feature: MA Experiment 20000478 PARAMETER Experiment Name: Zm_5mM_SA_P Parameter: Age (day) Value: 11
  misc_feature: MA Experiment 20000478 PARAMETER Experiment Name: Zm_5mM_SA_P Parameter: Organism Value: Zea mays
  misc_feature: MA Experiment 20000478 PARAMETER Experiment Name: Zm_5mM_SA_P Parameter: Plant Line Value: 35A19
  misc_feature: MA Experiment 20000478 PARAMETER Experiment Name: Zm_5mM_SA_P Parameter: Timepoint (hr) Value: 72
  misc_feature: MA Experiment 20000478 PARAMETER Experiment Name: Zm_5mM_SA_P Parameter: Tissue Value: Aerial
  misc_feature: MA Experiment 20000478 PARAMETER Experiment Name: Zm_5mM_SA_P Parameter: Treatment Value: 5mM SA vs. No Treatment
  misc_feature: MA Experiment ID: 20000492 Result: Up-regulated in Transcription
  misc_feature: MA Experiment 20000492 PARAMETER Experiment Name: Zm_Hybrid_Seed_Dev_P Parameter: DAP Value: 12
  misc_feature: MA Experiment 20000492 PARAMETER Experiment Name: Zm_Hybrid_Seed_Dev_P Parameter: Organism Value: Zea mays
  misc_feature: MA Experiment 20000492 PARAMETER Experiment Name: Zm_Hybrid_Seed_Dev_P Parameter: Plant Line Value: 35A19
  misc_feature: MA Experiment 20000492 PARAMETER Experiment Name: Zm_Hybrid_Seed_Dev_P Parameter: Tissue Value: Fert Kernel vs. Unfert Floret
gcacgagaccattacctagaacatcctaatcaaaaaaccgacgagcaccccctgagcctccgccgtcgagttcgagacgagacggtaccactatggagagtgagcaccacctgttcgagatcgcggccgcccggctcgagcgtagttctgccttcttggacgaggactactcttcatggtctccctgcatacagggctaccactggcgatgcgtctgctccgctgatcccgccgctggtacggcgtccttcaccgtctctcttccctacagcagcacccgcgagcccctcaacgcctcgttcaagctcagcctgctggaccgaggaggcctgccggtgccgtccaggacccgagccaccttgttccagaactgcctgatccagcagatgtggcagttggagtgtccgggcttcctcaccagggacgacctggagcggcaggagtactacctcgacaacgacggcggccgctgcttccacgtccgctgtgacatcgccatcaagcccttcgccgcggccacggccggcgacggcgacggcgacgtcgcggtgcccccgtccgacgacctccaccggcacctcggcgacctgctggcgcgcaaggacggcgcggacgtcacgttccagctggtcgacgccggcgagacgttctccgcgcaccggtgcgtgctcgcggcgcggtcgcccgtgttcagagcgcagctgttcggcgagatgatggagagcaacaagggcaccggcgtcgtcataccggttgaggacatggaagcccaggtgttcagcgccctgctggccttcatctacaccgactcgttgccgccggagaccgacagcgacgacgacgacgacgaagaagccatggtgcactatcagcttctgcttgccgccgcggacaggtacggcgtcgacaggatgaagctggtttgccaggagaagctgtgcaagcacatacgcgcggactcggtggcgacgatgctggttttagctgaccgacaccattgccctgcgctcaaggaggcgtgctttcgtttcctctcttctagcgccaatcttgcctccttcactgagacgacggatggcttcgaggtgctcaacgccagctgccctgctgttctcaaggagctactggcccaagcttgccaccgttttgatcttctgagtaaccatggccgacggtttccagtttcatacaatgcaggttgctctgctcgtttctcaaaagcgatgcacttctttgatgaattagtacgtgcaggttttgaacgcattttccggtggtctgcgaaaacgaaaaatcgctcgaaattcgttgaatttcgtaaatctcgagcactttgtaacttcaaatttgaaaaccccgattttcattgctc

SEQ ID NO: 18855 - protein, 426 aa, Zea mays subsp. mays
  peptide (1)..(426): Ceres Seq. ID no. 12381736
  misc_feature (163)..(286): Pfam Name: BTB/POZ domain Pfam Description: BTB/POZ domain
  misc_feature (107)..(345): Homolog of NCBI NO: 37534542 NR Description: putative speckle-type protein
  misc_feature (100)..(347): Homolog of NCBI NO: 37534570 NR Description: putative speckle-type protein
  misc_feature (107)..(351): Homolog of NCBI NO: 37534476 NR Description: hypothetical protein [Oryza sativa (japonica
  misc_feature (1)..(345): Homolog of NCBI NO: 37534474 NR Description: hypothetical protein [Oryza sativa (japonica
  misc_feature (60)..(348): Homolog of NCBI NO: 37534488 NR Description: hypothetical protein [Oryza sativa (japonica
  misc_feature (107)..(346): Homolog of NCBI NO: 37534590 NR Description: putative speckle-type protein
  misc_feature (105)..(345): Homolog of NCBI NO: 37534532 NR Description: putative speckle-type protein
  misc_feature (1)..(350): Homolog of NCBI NO: 37534534 NR Description: putative speckle-type protein
  misc_feature (1)..(347): Homolog of NCBI NO: 37534588 NR Description: putative speckle-type protein
  misc_feature (60)..(347): Homolog of NCBI NO: 37534480 NR Description: hypothetical protein [Oryza sativa (japonica
MESEHHLFEIAAARLERSSAFLDEDYSSWSPCIQGYHWRCVCSADPAAGTASFTVSLPYSSTREPLNASFKLSLLDRGGLPVPSRTRATLFQNCLIQQMWQLECPGFLTRDDLERQEYYLDNDGGRCFHVRCDIAIKPFAAATAGDGDGDVAVPPSDDLHRHLGDLLARKDGADVTFQLVDAGETFSAHRCVLAARSPVFRAQLFGEMMESNKGTGVVIPVEDMEAQVFSALLAFIYTDSLPPETDSDDDDDEEAMVHYQLLLAAADRYGVDRMKLVCQEKLCKHIRADSVATMLVLADRHHCPALKEACFRFLSSSANLASFTETTDGFEVLNASCPAVLKELLAQACHRFDLLSNHGRRFPVSYNAGCSARFSKAMHFFDELVRAGFERIFRWSAKTKNRSKFVEFRKSRALCNFKFENPDFHC

SEQ ID NO: 18856 - protein, 328 aa, Zea mays subsp. mays
  peptide (1)..(328): Ceres Seq. ID no. 12381737
  misc_feature (65)..(188): Pfam Name: BTB/POZ domain Pfam Description: BTB/POZ domain
  misc_feature (9)..(247): Homolog of NCBI NO: 37534542 NR Description: putative speckle-type protein
  misc_feature (2)..(249): Homolog of NCBI NO: 37534570 NR Description: putative speckle-type protein
  misc_feature (9)..(253): Homolog of NCBI NO: 37534476 NR Description: hypothetical protein [Oryza sativa (japonica
  misc_feature (1)..(247): Homolog of NCBI NO: 37534474 NR Description: hypothetical protein [Oryza sativa (japonica
  misc_feature (1)..(250): Homolog of NCBI NO: 37534488 NR Description: hypothetical protein [Oryza sativa (japonica
  misc_feature (9)..(248): Homolog of NCBI NO: 37534590 NR Description: putative speckle-type protein
  misc_feature (7)..(247): Homolog of NCBI NO: 37534532 NR Description: putative speckle-type protein
  misc_feature (1)..(252): Homolog of NCBI NO: 37534534 NR Description: putative speckle-type protein
  misc_feature (1)..(249): Homolog of NCBI NO: 37534588 NR Description: putative speckle-type protein
  misc_feature (1)..(249): Homolog of NCBI NO: 37534480 NR Description: hypothetical protein [Oryza sativa (japonica
MWQLECPGFLTRDDLERQEYYLDNDGGRCFHVRCDIAIKPFAAATAGDGDGDVAVPPSDDLHRHLGDLLARKDGADVTFQLVDAGETFSAHRCVLAARSPVFRAQLFGEMMESNKGTGVVIPVEDMEAQVFSALLAFIYTDSLPPETDSDDDDDEEAMVHYQLLLAAADRYGVDRMKLVCQEKLCKHIRADSVATMLVLADRHHCPALKEACFRFLSSSANLASFTETTDGFEVLNASCPAVLKELLAQACHRFDLLSNHGRRFPVSYNAGCSARFSKAMHFFDELVRAGFERIFRWSAKTKNRSKFVEFRKSRALCNFKFENPDFHC

SEQ ID NO: 18857 - protein, 219 aa, Zea mays subsp. mays
  peptide (1)..(219): Ceres Seq. ID no. 12381738
  misc_feature (1)..(79): Pfam Name: BTB/POZ domain Pfam Description: BTB/POZ domain
  misc_feature (1)..(138): Homolog of NCBI NO: 37534542 NR Description: putative speckle-type protein
  misc_feature (1)..(140): Homolog of NCBI NO: 37534570 NR Description: putative speckle-type protein
  misc_feature (1)..(144): Homolog of NCBI NO: 37534476 NR Description: hypothetical protein [Oryza sativa (japonica
  misc_feature (1)..(138): Homolog of NCBI NO: 37534474 NR Description: hypothetical protein [Oryza sativa (japonica
  misc_feature (1)..(141): Homolog of NCBI NO: 37534488 NR Description: hypothetical protein [Oryza sativa (japonica
  misc_feature (1)..(139): Homolog of NCBI NO: 37534590 NR Description: putative speckle-type protein
  misc_feature (1)..(138): Homolog of NCBI NO: 37534532 NR Description: putative speckle-type protein
  misc_feature (1)..(143): Homolog of NCBI NO: 37534534 NR Description: putative speckle-type protein
  misc_feature (1)..(140): Homolog of NCBI NO: 37534588 NR Description: putative speckle-type protein
  misc_feature (1)..(140): Homolog of NCBI NO: 37534480 NR Description: hypothetical protein [Oryza sativa (japonica
MMESNKGTGVVIPVEDMEAQVFSALLAFIYTDSLPPETDSDDDDDEEAMVHYQLLLAAADRYGVDRMKLVCQEKLCKHIRADSVATMLVLADRHHCPALKEACFRFLSSSANLASFTETTDGFEVLNASCPAVLKELLAQACHRFDLLSNHGRRFPVSYNAGCSARFSKAMHFFDELVRAGFERIFRWSAKTKNRSKFVEFRKSRALCNFKFENPDFHC

SEQ ID NO: 18858 - DNA, 959 bp, Zea mays subsp. mays
  misc_feature (1)..(959): Ceres Seq. ID no. 12364026
  misc_feature: MA Experiment ID: 108523 Result: Down-regulated in Transcription
  misc_feature: MA Experiment 108523 PARAMETER Experiment Name: Zm_42deg_Heat_P Parameter: Age (day) Value: 8
  misc_feature: MA Experiment 108523 PARAMETER Experiment Name: Zm_42deg_Heat_P Parameter: Organism Value: Zea mays
  misc_feature: MA Experiment 108523 PARAMETER Experiment Name: Zm_42deg_Heat_P Parameter: Plant Line Value: 35A19
  misc_feature: MA Experiment 108523 PARAMETER Experiment Name: Zm_42deg_Heat_P Parameter: Temperature (deg C) Value: 42 vs. 22
  misc_feature: MA Experiment 108523 PARAMETER Experiment Name: Zm_42deg_Heat_P Parameter: Timepoint (hr) Value: 6
  misc_feature: MA Experiment 108523 PARAMETER Experiment Name: Zm_42deg_Heat_P Parameter: Tissue Value: Aerial
  misc_feature: MA Experiment ID: 108527 Result: Up-regulated in Transcription
  misc_feature: MA Experiment 108527 PARAMETER Experiment Name: Zm_5mM_NO_P Parameter: Age (day) Value: 8
  misc_feature: MA Experiment 108527 PARAMETER Experiment Name: Zm_5mM_NO_P Parameter: Organism Value: Zea mays
  misc_feature: MA Experiment 108527 PARAMETER Experiment Name: Zm_5mM_NO_P Parameter: Plant Line Value: 35A19
  misc_feature: MA Experiment 108527 PARAMETER Experiment Name: Zm_5mM_NO_P Parameter: Timepoint (hr) Value: 6
  misc_feature: MA Experiment 108527 PARAMETER Experiment Name: Zm_5mM_NO_P Parameter: Tissue Value: Aerial
  misc_feature: MA Experiment 108527 PARAMETER Experiment Name: Zm_5mM_NO_P Parameter: Treatment Value: 5mM NO vs. No Treatment
  misc_feature: MA Experiment ID: 108528 Result: Down-regulated in Transcription
  misc_feature: MA Experiment 108528 PARAMETER Experiment Name: Zm_Imbibed_Seeds_P Parameter: Age (day) Value: 5 vs. 2
  misc_feature: MA Experiment 108528 PARAMETER Experiment Name: Zm_Imbibed_Seeds_P Parameter: Organism Value: Zea mays
  misc_feature: MA Experiment 108528 PARAMETER Experiment Name: Zm_Imbibed_Seeds_P Parameter: Plant Line Value: 35A19
  misc_feature: MA Experiment 108528 PARAMETER Experiment Name: Zm_Imbibed_Seeds_P Parameter: Tissue Value: Aerial vs. Embryo
  misc_feature: MA Experiment ID: 108529 Result: Up-regulated in Transcription
  misc_feature: MA Experiment 108529 PARAMETER Experiment Name: Zm_Imbibed_Seeds_P Parameter: Age (day) Value: 5 vs. 2
  misc_feature: MA Experiment 108529 PARAMETER Experiment Name: Zm_Imbibed_Seeds_P Parameter: Organism Value: Zea mays
  misc_feature: MA Experiment 108529 PARAMETER Experiment Name: Zm_Imbibed_Seeds_P Parameter: Plant Line Value: 35A19
  misc_feature: MA Experiment 108529 PARAMETER Experiment Name: Zm_Imbibed_Seeds_P Parameter: Tissue Value: Roots vs. Embryo
  misc_feature: MA Experiment ID: 108530 Result: Down-regulated in Transcription
  misc_feature: MA Experiment 108530 PARAMETER Experiment Name: Zm_Imbibed_Seeds_P Parameter: Age (day) Value: 6 vs. 2
  misc_feature: MA Experiment 108530 PARAMETER Experiment Name: Zm_Imbibed_Seeds_P Parameter: Organism Value: Zea mays
  misc_feature: MA Experiment 108530 PARAMETER Experiment Name: Zm_Imbibed_Seeds_P Parameter: Plant Line Value: 35A19
  misc_feature: MA Experiment 108530 PARAMETER Experiment Name: Zm_Imbibed_Seeds_P Parameter: Tissue Value: Aerial vs. Embryo
  misc_feature: MA Experiment ID: 108534 Result: Down-regulated in Transcription
  misc_feature: MA Experiment 108534 PARAMETER Experiment Name: Zm_4deg_Cold_P Parameter: Age (hr) Value: 8
  misc_feature: MA Experiment 108534 PARAMETER Experiment Name: Zm_4deg_Cold_P Parameter: Organism Value: Zea mays
  misc_feature: MA Experiment 108534 PARAMETER Experiment Name: Zm_4deg_Cold_P Parameter: Plant Line Value: 35A19
  misc_feature: MA Experiment 108534 PARAMETER Experiment Name: Zm_4deg_Cold_P Parameter: Temperature (deg C) Value: 4 vs. 22
  misc_feature: MA Experiment 108534 PARAMETER Experiment Name: Zm_4deg_Cold_P Parameter: Timepoint (hr) Value: 6
  misc_feature: MA Experiment 108534 PARAMETER Experiment Name: Zm_4deg_Cold_P Parameter: Tissue Value: Aerial
  misc_feature: MA Experiment ID: 108535 Result: Down-regulated in Transcription
  misc_feature: MA Experiment 108535 PARAMETER Experiment Name: Zm_Meristem_P Parameter: Age (day) Value: 8
  misc_feature: MA Experiment 108535 PARAMETER Experiment Name: Zm_Meristem_P Parameter: Organism Value: Zea mays
  misc_feature: MA Experiment 108535 PARAMETER Experiment Name: Zm_Meristem_P Parameter: Plant Line Value: 35A19
  misc_feature: MA Experiment 108535 PARAMETER Experiment Name: Zm_Meristem_P Parameter: Tissue Value: Root Meristem vs. Above Root Meristem
  misc_feature: MA Experiment ID: 108543 Result: Up-regulated in Transcription
  misc_feature: MA Experiment ID: 108544 Result: Up-regulated in Transcription
  misc_feature: MA Experiment ID: 108545 Result: Down-regulated in Transcription
  misc_feature: MA Experiment 108545 PARAMETER Experiment Name: Zm_Imbibed_Seeds_P Parameter: Age (day) Value: 3 vs. 2
  misc_feature: MA Experiment 108545 PARAMETER Experiment Name: Zm_Imbibed_Seeds_P Parameter: Organism Value: Zea mays
  misc_feature: MA Experiment 108545 PARAMETER Experiment Name: Zm_Imbibed_Seeds_P Parameter: Plant Line Value: 35A19
  misc_feature: MA Experiment 108545 PARAMETER Experiment Name: Zm_Imbibed_Seeds_P Parameter: Tissue Value: Aerial vs. Embryo
  misc_feature: MA Experiment ID: 108546 Result: Up-regulated in Transcription
  misc_feature: MA Experiment 108546 PARAMETER Experiment Name: Zm_Imbibed_Seeds_P Parameter: Age (day) Value: 3 vs. 2
  misc_feature: MA Experiment 108546 PARAMETER Experiment Name: Zm_Imbibed_Seeds_P Parameter: Organism Value: Zea mays
  misc_feature: MA Experiment 108546 PARAMETER Experiment Name: Zm_Imbibed_Seeds_P Parameter: Plant Line Value: 35A19
  misc_feature: MA Experiment 108546 PARAMETER Experiment Name: Zm_Imbibed_Seeds_P Parameter: Tissue Value: Roots vs. Embryo
  misc_feature: MA Experiment ID: 108559 Result: Up-regulated in Transcription
  misc_feature: MA Experiment 108559 PARAMETER Experiment Name: Zm_5mM_NO_P Parameter: Age (day) Value: 8
  misc_feature: MA Experiment 108559 PARAMETER Experiment Name: Zm_5mM_NO_P Parameter: Organism Value: Zea mays
  misc_feature: MA Experiment 108559 PARAMETER Experiment Name: Zm_5mM_NO_P Parameter: Plant Line Value: 35A19
  misc_feature: MA Experiment 108559 PARAMETER Experiment Name: Zm_5mM_NO_P Parameter: Timepoint (hr) Value: 12
  misc_feature: MA Experiment 108559 PARAMETER Experiment Name: Zm_5mM_NO_P Parameter: Tissue Value: Aerial
  misc_feature: MA Experiment 108559 PARAMETER Experiment Name: Zm_5mM_NO_P Parameter: Treatment Value: 5mM NO vs. No Treatment
  misc_feature: MA Experiment ID: 108597 Result: Up-regulated in Transcription
  misc_feature: MA Experiment 108597 PARAMETER Experiment Name: Zm_100uM_ABA_P Parameter: Age (day) Value: 9
  misc_feature: MA Experiment 108597 PARAMETER Experiment Name: Zm_100uM_ABA_P Parameter: Organism Value: Zea mays
  misc_feature: MA Experiment 108597 PARAMETER Experiment Name: Zm_100uM_ABA_P Parameter: Plant Line Value: 35A19
  misc_feature: MA Experiment 108597 PARAMETER Experiment Name: Zm_100uM_ABA_P Parameter: Timepoint (hr) Value: 24
  misc_feature: MA Experiment 108597 PARAMETER Experiment Name: Zm_100uM_ABA_P Parameter: Tissue Value: Aerial
  misc_feature: MA Experiment 108597 PARAMETER Experiment Name: Zm_100uM_ABA_P Parameter: Treatment Value: 100uM ABA vs. No Treatment
  misc_feature: MA Experiment ID: 20000108 Result: Down-regulated in Transcription
  misc_feature: MA Experiment 20000108 PARAMETER Experiment Name: Zm_Root-Tips_P Parameter: Age (day) Value: 12
  misc_feature: MA Experiment 20000108 PARAMETER Experiment Name: Zm_Root-Tips_P Parameter: Organism Value: Zea mays
  misc_feature: MA Experiment 20000108 PARAMETER Experiment Name: Zm_Root-Tips_P Parameter: Tissue Value: Root tips vs. Root mid region    35
  misc_feature: MA Experiment 20000108 PARAMETER Experiment Name: Zm_Root-Tips_P Parameter: Tissue Value: Root tips vs. Root mid region   Sequence Listing-Misc Features (4)
  misc_feature: MA Experiment ID: 20000477 Result: Up-regulated in Transcription
  misc_feature: MA Experiment 20000477 PARAMETER Experiment Name: Zm_5mM_SA_P Parameter: Age (day) Value: 10
  misc_feature: MA Experiment 20000477 PARAMETER Experiment Name: Zm_5mM_SA_P Parameter: Organism Value: Zea mays
  misc_feature: MA Experiment 20000477 PARAMETER Experiment Name: Zm_5mM_SA_P Parameter: Plant Line Value: 35A19
  misc_feature: MA Experiment 20000477 PARAMETER Experiment Name: Zm_5mM_SA_P Parameter: Timepoint (hr) Value: 48
  misc_feature: MA Experiment 20000477 PARAMETER Experiment Name: Zm_5mM_SA_P Parameter: Tissue Value: Aerial
  misc_feature: MA Experiment 20000477 PARAMETER Experiment Name: Zm_5mM_SA_P Parameter: Treatment Value: 5mM SA vs. No Treatment
  misc_feature: MA Experiment ID: 20000478 Result: Up-regulated in Transcription
  misc_feature: MA Experiment 20000478 PARAMETER Experiment Name: Zm_5mM_SA_P Parameter: Age (day) Value: 11
  misc_feature: MA Experiment 20000478 PARAMETER Experiment Name: Zm_5mM_SA_P Parameter: Organism Value: Zea mays
  misc_feature: MA Experiment 20000478 PARAMETER Experiment Name: Zm_5mM_SA_P Parameter: Plant Line Value: 35A19
  misc_feature: MA Experiment 20000478 PARAMETER Experiment Name: Zm_5mM_SA_P Parameter: Timepoint (hr) Value: 72
  misc_feature: MA Experiment 20000478 PARAMETER Experiment Name: Zm_5mM_SA_P Parameter: Tissue Value: Aerial
  misc_feature: MA Experiment 20000478 PARAMETER Experiment Name: Zm_5mM_SA_P Parameter: Treatment Value: 5mM SA vs. No Treatment
  misc_feature: MA Experiment ID: 20000480 Result: Up-regulated in Transcription
  misc_feature: MA Experiment 20000480 PARAMETER Experiment Name: Zm_Drought_P Parameter: Age (day) Value: 11
  misc_feature: MA Experiment 20000480 PARAMETER Experiment Name: Zm_Drought_P Parameter: Organism Value: Zea mays
  misc_feature: MA Experiment 20000480 PARAMETER Experiment Name: Zm_Drought_P Parameter: Plant Line Value: 35A19
  misc_feature: MA Experiment 20000480 PARAMETER Experiment Name: Zm_Drought_P Parameter: Timepoint (hr) Value: 72
  misc_feature: MA Experiment 20000480 PARAMETER Experiment Name: Zm_Drought_P Parameter: Tissue Value: Aerial
  misc_feature: MA Experiment 20000480 PARAMETER Experiment Name: Zm_Drought_P Parameter: Treatment Value: Drought vs. No Drought
  misc_feature: MA Experiment ID: 20000487 Result: Down-regulated in Transcription
  misc_feature: MA Experiment 20000487 PARAMETER Experiment Name: Zm_50mM_NH4NO3_L_to_H_P Parameter: Organism Value: Zea mays
  misc_feature: MA Experiment 20000487 PARAMETER Experiment Name: Zm_50mM_NH4NO3_L_to_H_P Parameter: Timepoint (hr) Value: 4
  misc_feature: MA Experiment 20000487 PARAMETER Experiment Name: Zm_50mM_NH4NO3_L_to_H_P Parameter: Tissue Value: Leaves
  misc_feature: MA Experiment 20000487 PARAMETER Experiment Name: Zm_50mM_NH4NO3_L_to_H_P Parameter: Treatment Value: 50mM NH4NO3 vs. 100mM Mannitol
  misc_feature: MA Experiment ID: 20000492 Result: Down-regulated in Transcription
  misc_feature: MA Experiment 20000492 PARAMETER Experiment Name: Zm_Hybrid_Seed_Dev_P Parameter: DAP Value: 12
  misc_feature: MA Experiment 20000492 PARAMETER Experiment Name: Zm_Hybrid_Seed_Dev_P Parameter: Organism Value: Zea mays
  misc_feature: MA Experiment 20000492 PARAMETER Experiment Name: Zm_Hybrid_Seed_Dev_P Parameter: Plant Line Value: 35A19
  misc_feature: MA Experiment 20000492 PARAMETER Experiment Name: Zm_Hybrid_Seed_Dev_P Parameter: Tissue Value: Fert Kernel vs. Unfert Floret
  misc_feature: MA Experiment ID: 20000532 Result: Up-regulated in Transcription
  misc_feature: MA Experiment 20000532 PARAMETER Experiment Name: Zm_0.001percent_MeJA_P Parameter: Age (day) Value: 10
  misc_feature: MA Experiment 20000532 PARAMETER Experiment Name: Zm_0.001percent_MeJA_P Parameter: Organism Value: Zea mays
  misc_feature: MA Experiment 20000532 PARAMETER Experiment Name: Zm_0.001percent_MeJA_P Parameter: Plant Line Value: 35A19
  misc_feature: MA Experiment 20000532 PARAMETER Experiment Name: Zm_0.001percent_MeJA_P Parameter: Timepoint (hr) Value: 48
  misc_feature: MA Experiment 20000532 PARAMETER Experiment Name: Zm_0.001percent_MeJA_P Parameter: Tissue Value: Aerial
  misc_feature: MA Experiment 20000532 PARAMETER Experiment Name: Zm_0.001percent_MeJA_P Parameter: Treatment Value: 0.001percent MeJA vs. No Treatment
  misc_feature: MA Experiment ID: 20000533 Result: Up-regulated in Transcription
  misc_feature: MA Experiment 20000533 PARAMETER Experiment Name: Zm_0.001percent_MeJA_P Parameter: Age (day) Value: 11
  misc_feature: MA Experiment 20000533 PARAMETER Experiment Name: Zm_0.001percent_MeJA_P Parameter: Organism Value: Zea mays
  misc_feature: MA Experiment 20000533 PARAMETER Experiment Name: Zm_0.001percent_MeJA_P Parameter: Plant Line Value: 35A19
  misc_feature: MA Experiment 20000533 PARAMETER Experiment Name: Zm_0.001percent_MeJA_P Parameter: Timepoint (hr) Value: 72
  misc_feature: MA Experiment 20000533 PARAMETER Experiment Name: Zm_0.001percent_MeJA_P Parameter: Tissue Value: Aerial
  misc_feature: MA Experiment 20000533 PARAMETER Experiment Name: Zm_0.001percent_MeJA_P Parameter: Treatment Value: 0.001percent MeJA vs. No Treatment
  misc_feature: MA Experiment ID: 20000535 Result: Down-regulated in Transcription
  misc_feature: MA Experiment 20000535 PARAMETER Experiment Name: Zm_Hybrid_Seed_Dev_P Parameter: DAP Value: 30 vs. 12
  misc_feature: MA Experiment 20000535 PARAMETER Experiment Name: Zm_Hybrid_Seed_Dev_P Parameter: Organism Value: Zea mays
  misc_feature: MA Experiment 20000535 PARAMETER Experiment Name: Zm_Hybrid_Seed_Dev_P Parameter: Plant Line Value: 35A19
  misc_feature: MA Experiment 20000535 PARAMETER Experiment Name: Zm_Hybrid_Seed_Dev_P Parameter: Tissue Value: Embryo vs. Unfert Floret
  misc_feature: MA Experiment ID: 20000626 Result: Up-regulated in Transcription
  misc_feature: MA Experiment 20000626 PARAMETER Experiment Name: Zm_Herbicide-Treatments_P Parameter: Timepoint (hr) Value: 12
  misc_feature: MA Experiment 20000626 PARAMETER Experiment Name: Zm_Herbicide-Treatments_P Parameter: Tissue Value: Aerial
  misc_feature: MA Experiment 20000626 PARAMETER Experiment Name: Zm_Herbicide-Treatments_P Parameter: Treatment Value: Roundup vs. No Treatment
  misc_feature: MA Experiment ID: 20001610 Result: Down-regulated in Transcription
  misc_feature: MA Experiment 20001610 PARAMETER Experiment Name: Zm_50ppm_KNO3_L-to-H_P Parameter: Age (day) Value: 19
  misc_feature: MA Experiment 20001610 PARAMETER Experiment Name: Zm_50ppm_KNO3_L-to-H_P Parameter: Organism Value: Zea mays
  misc_feature: MA Experiment 20001610 PARAMETER Experiment Name: Zm_50ppm_KNO3_L-to-H_P Parameter: Plant Line Value: 35A19
  misc_feature: MA Experiment 20001610 PARAMETER Experiment Name: Zm_50ppm_KNO3_L-to-H_P Parameter: Timepoint (hr) Value: 2
  misc_feature: MA Experiment 20001610 PARAMETER Experiment Name: Zm_50ppm_KNO3_L-to-H_P Parameter: Tissue Value: Roots
  misc_feature: MA Experiment 20001610 PARAMETER Experiment Name: Zm_50ppm_KNO3_L-to-H_P Parameter: Treatment Value: 50ppm KNO3 vs. 50ppm KCl
  misc_feature: MA Experiment ID: 20001612 Result: Down-regulated in Transcription
  misc_feature: MA Experiment 20001612 PARAMETER Experiment Name: Zm_50ppm_KNO3_L-to-H_P Parameter: Age (day) Value: 19
  misc_feature: MA Experiment 20001612 PARAMETER Experiment Name: Zm_50ppm_KNO3_L-to-H_P Parameter: Organism Value: Zea mays
  misc_feature: MA Experiment 20001612 PARAMETER Experiment Name: Zm_50ppm_KNO3_L-to-H_P Parameter: Plant Line Value: 35A19
  misc_feature: MA Experiment 20001612 PARAMETER Experiment Name: Zm_50ppm_KNO3_L-to-H_P Parameter: Timepoint (hr) Value: 8
  misc_feature: MA Experiment 20001612 PARAMETER Experiment Name: Zm_50ppm_KNO3_L-to-H_P Parameter: Tissue Value: Roots
  misc_feature: MA Experiment 20001612 PARAMETER Experiment Name: Zm_50ppm_KNO3_L-to-H_P Parameter: Treatment Value: 50ppm KNO3 vs. 50ppm KCl
gcacgagaccattacctagaacatcctaatcaaaaatcgtcagagacacgcgtccaaacatacagctagctagcctctgcatgcctacgtacagcatggccaaggccgagctgctgctcctcgccctcgtggcttcgctctccgtgctgccattctcctccctcgccgtgtaccaggacttctgcatcgccgacctatccgccgccgccacgccgggcggctacccgtgcaagcccccgaaggacgtgaccgccgacgacttccactacggcggcctcgccacccccggcacggcgctgaaacccttcaaaatctccctgggctcggccgtcgtcaccacgttccccggcctgaacgggctgggcatctccgccgcgcggatggtgatggtcccgggcggcgtcgcgccgctgcactcccacccgggaggcaccgagctcatcttcgtcatcgagggcagcgtcgtctgcggcttcatcagcgccacgctcaacagggtgtacaccaagacgctgtacgccggcgacctgatggtgctcccgcagggccagctccacttccagtacagccacggcaacaccacggcggtgacgctgtcctcgttcagcagcgacaaccccggcctgcagatcctcgacttcgcgctcttcgccaacgacctgcccacagaggtcgtgaacaaggtgaccaacctggacgaactgcagatcgtcaagctcaaggcactgttcggagggaggggctagacggatatatatgtactccgtatataggaacagtcaacggtgttgatcattgaattgtgtgtgtattattctatacttgtgatggatgtttgtcttgtcattctataaaataaattgtaacgcgcgcagcaggcgtgagagcgaaagtagctgccacatttgatgtactaatatttacatctccattgttgataataatacattattggcctc

SEQ ID NO: 18859 - protein, 221 aa, Zea mays subsp. mays
  peptide (1)..(221): Ceres Seq. ID no. 12364027
  misc_feature (65)..(210): Pfam Name: Cupin Pfam Description: Cupin
  misc_feature (12)..(219): Homolog of NCBI NO: 18203684 NR Description: Auxin-binding protein ABP19a precursor
  misc_feature (13)..(221): Homolog of NCBI NO: 7242813 NR Description: germin-like protein [Phaseolus vulgaris]
  misc_feature (21)..(221): Homolog of NCBI NO: 13277342 NR Description: Germin-like protein [Pisum sativum]
  misc_feature (6)..(214): Homolog of NCBI NO: 38568035 NR Description: OSJNBa0065J03.5 [Oryza sativa (japonica
  misc_feature (6)..(221): Homolog of NCBI NO: 7447327 NR Description: germin-like protein - rice
  misc_feature (6)..(221): Homolog of NCBI NO: 4239821 NR Description: germin-like protein 1 [Oryza sativa]
  misc_feature (6)..(221): Homolog of NCBI NO: 2655293 NR Description: germin-like protein 5 [Oryza sativa]
  misc_feature (9)..(221): Homolog of NCBI NO: 7447326 NR Description: germin-like protein 1 - barley
  misc_feature (9)..(221): Homolog of NCBI NO: 21322655 NR Description: adenosine diphosphate glucose pyrophosphatase
  misc_feature (9)..(221): Homolog of NCBI NO: 13160411 NR Description: adenosine diphosphate glucose pyrophosphatase
MPTYSMAKAELLLLALVASLSVLPFSSLAVYQDFCIADLSAAATPGGYPCKPPKDVTADDFHYGGLATPGTALKPFKISLGSAVVTTFPGLNGLGISAARMVMVPGGVAPLHSHPGGTELIFVIEGSVVCGFISATLNRVYTKTLYAGDLMVLPQGQLHFQYSHGNTTAVTLSSFSSDNPGLQILDFALFANDLPTEVVNKVTNLDELQIVKLKALFGGRG

SEQ ID NO: 18860 - protein, 216 aa, Zea mays subsp. mays
  peptide (1)..(216): Ceres Seq. ID no. 12364028
  misc_feature (60)..(205): Pfam Name: Cupin Pfam Description: Cupin
  misc_feature (7)..(214): Homolog of NCBI NO: 18203684 NR Description: Auxin-binding protein ABP19a precursor
  misc_feature (8)..(216): Homolog of NCBI NO: 7242813 NR Description: germin-like protein [Phaseolus vulgaris]
  misc_feature (16)..(216): Homolog of NCBI NO: 13277342 NR Description: Germin-like protein [Pisum sativum]
  misc_feature (1)..(209): Homolog of NCBI NO: 38568035 NR Description: OSJNBa0065J03.5 [Oryza sativa (japonica
  misc_feature (1)..(216): Homolog of NCBI NO: 7447327 NR Description: germin-like protein - rice
  misc_feature (1)..(216): Homolog of NCBI NO: 4239821 NR Description: germin-like protein 1 [Oryza sativa]
  misc_feature (1)..(216): Homolog of NCBI NO: 2655293 NR Description: germin-like protein 5 [Oryza sativa]
  misc_feature (4)..(216): Homolog of NCBI NO: 7447326 NR Description: germin-like protein 1 - barley
  misc_feature (4)..(216): Homolog of NCBI NO: 21322655 NR Description: adenosine diphosphate glucose pyrophosphatase
  misc_feature (4)..(216): Homolog of NCBI NO: 13160411 NR Description: adenosine diphosphate glucose pyrophosphatase
MAKAELLLLALVASLSVLPFSSLAVYQDFCIADLSAAATPGGYPCKPPKDVTADDFHYGGLATPGTALKPFKISLGSAVVTTFPGLNGLGISAARMVMVPGGVAPLHSHPGGTELIFVIEGSVVCGFISATLNRVYTKTLYAGDLMVLPQGQLHFQYSHGNTTAVTLSSFSSDNPGLQILDFALFANDLPTEVVNKVTNLDELQIVKLKALFGGRG

SEQ ID NO: 18861 - protein, 121 aa, Zea mays subsp. mays
  peptide (1)..(121): Ceres Seq. ID no. 12364029
  misc_feature (1)..(110): Pfam Name: Cupin Pfam Description: Cupin
  misc_feature (1)..(121): Homolog of NCBI NO: 21322655 NR Description: adenosine diphosphate glucose pyrophosphatase
  misc_feature (1)..(119): Homolog of NCBI NO: 18203684 NR Description: Auxin-binding protein ABP19a precursor
  misc_feature (1)..(121): Homolog of NCBI NO: 13277342 NR Description: Germin-like protein [Pisum sativum]
  misc_feature (1)..(121): Homolog of NCBI NO: 7447327 NR Description: germin-like protein - rice
  misc_feature (1)..(121): Homolog of NCBI NO: 2655293 NR Description: germin-like protein 5 [Oryza sativa]
  misc_feature (1)..(121): Homolog of NCBI NO: 7447326 NR Description: germin-like protein 1 - barley
  misc_feature (1)..(121): Homolog of NCBI NO: 4239821 NR Description: germin-like protein 1 [Oryza sativa]
  misc_feature (1)..(114): Homolog of NCBI NO: 38568035 NR Description: OSJNBa0065J03.5 [Oryza sativa (japonica
  misc_feature (1)..(121): Homolog of NCBI NO: 7242813 NR Description: germin-like protein [Phaseolus vulgaris]
  misc_feature (1)..(121): Homolog of NCBI NO: 13160411 NR Description: adenosine diphosphate glucose pyrophosphatase
MVMVPGGVAPLHSHPGGTELIFVIEGSVVCGFISATLNRVYTKTLYAGDLMVLPQGQLHFQYSHGNTTAVTLSSFSSDNPGLQILDFALFANDLPTEVVNKVTNLDELQIVKLKALFGGRG

SEQ ID NO: 18862 - DNA, 1218 bp, Zea mays subsp. mays
  misc_feature (1)..(1218): Ceres Seq. ID no. 12368278
  misc_feature: MA Experiment ID: 108522 Result: Down-regulated in Transcription
  misc_feature: MA Experiment 108522 PARAMETER Experiment Name: Zm_42deg_Heat_P Parameter: Age (day) Value: 8
  misc_feature: MA Experiment 108522 PARAMETER Experiment Name: Zm_42deg_Heat_P Parameter: Organism Value: Zea mays
  misc_feature: MA Experiment 108522 PARAMETER Experiment Name: Zm_42deg_Heat_P Parameter: Plant Line Value: 35A19
  misc_feature: MA Experiment 108522 PARAMETER Experiment Name: Zm_42deg_Heat_P Parameter: Temperature (deg C) Value: 42 vs. 22
  misc_feature: MA Experiment 108522 PARAMETER Experiment Name: Zm_42deg_Heat_P Parameter: Timepoint (hr) Value: 1
  misc_feature: MA Experiment 108522 PARAMETER Experiment Name: Zm_42deg_Heat_P Parameter: Tissue Value: Aerial
  misc_feature: MA Experiment ID: 108523 Result: Down-regulated in Transcription
  misc_feature: MA Experiment 108523 PARAMETER Experiment Name: Zm_42deg_Heat_P Parameter: Age (day) Value: 8
  misc_feature: MA Experiment 108523 PARAMETER Experiment Name: Zm_42deg_Heat_P Parameter: Organism Value: Zea mays
  misc_feature: MA Experiment 108523 PARAMETER Experiment Name: Zm_42deg_Heat_P Parameter: Plant Line Value: 35A19
  misc_feature: MA Experiment 108523 PARAMETER Experiment Name: Zm_42deg_Heat_P Parameter: Temperature (deg C) Value: 42 vs. 22
  misc_feature: MA Experiment 108523 PARAMETER Experiment Name: Zm_42deg_Heat_P Parameter: Timepoint (hr) Value: 6
  misc_feature: MA Experiment 108523 PARAMETER Experiment Name: Zm_42deg_Heat_P Parameter: Tissue Value: Aerial
  misc_feature: MA Experiment ID: 108543 Result: Down-regulated in Transcription
  misc_feature: MA Experiment ID: 108544 Result: Down-regulated in Transcription
gcacgagaccattacctagaacatcctaatcaaaaaatcgcatcgatcgggcaggcattaattgtacagctttattagctcctgcttctgcttctgcttctgcttcttcttagctggagactagagaaagaagaagacacagtgatcatcggcatagatagtaagtagaagaagagctagcaggaagaagcagcagctagctagctgacccaacgaaatgacgatgagagatgagatcgtcttcttcgacgtggagacgacggctccgtcggcggccgggcccggtcggtggtggctgctggagttcggcgccatcctggtgtgccccaggaagctggtggaggtaggcagctacgacaccctcatccgcccgggcgacctctccgccgtctccaggcgattcacggacgacgtggaggcggccataatggcgtcggcgccgccccttcaaggacgtggccgacaagatattcgacatcctggacggccgcgtttgggctgggcacaacatccagcgtttcgactgcccccgcatccgcgaggccttcgccgacatcgggcgccccgccccggagcccgtcggcgtcatcgactccctcaacgtcctggccgcacacttcggccgccgcgccggagacctcaagatggccaccctcgcgacctacttcggcatcgggaagcagaagcacaggggcctggacgacgcgcgcatgaacctcgaggtgctcaagcactgcgccaccgtcctgctgctggagtccagcctgccggacgtcctctgcgcgcagcagtctcgccgagccgcggtcaccaggaggacgtcgcaggcgcagaccatcaagccgccacctaaacatgctgtgcaccaccacctgcggcccggcggcgtcgtcatgtcgcagacaaagctaccatttaccgctgtaacagctacacctgcacctgcggccgccaccccctgcggcaagaggaatagcctgggcaaggtggtggcgagggccgtgacggcggcgaccactgccccattgagtagcagtagcagcacaagcacaaacactaggcgccccgtgacggcgaccacgcccttccacatgatcctcaggcactccagggccatcctcagatgatgatccatgtttcattcattcattctttctttggatgatccatgatcggatttcgttccattcaattcaattgtacagttccatcgatttg

SEQ ID NO: 18863 - protein, 211 aa, Zea mays subsp. mays
  peptide (1)..(211): Ceres Seq. ID no. 12368279
  misc_feature (4)..(109): Homolog of NCBI NO: 30697522 NR Description: exonuclease protein family [Arabidopsis thaliana]
  misc_feature (4)..(109): Homolog of NCBI NO: 9757860 NR Description: exonuclease-like protein [Arabidopsis thaliana]
  misc_feature (6)..(102): Homolog of NCBI NO: 37534222 NR Description: putative exonuclease [Oryza sativa (japonica
  misc_feature (4)..(59): Homolog of NCBI NO: 15221225 NR Description: putative exonuclease
  misc_feature (4)..(59): Homolog of NCBI NO: 15240840 NR Description: exonuclease-like protein; protein id: At5g07710.1
  misc_feature (2)..(78): Homolog of NCBI NO: 15236050 NR Description: hypothetical protein; protein id: At4g39810.1
  misc_feature (4)..(75): Homolog of NCBI NO: 9945064 NR Description: similar to Arabidopsis chromosome BAC genomics
MTMRDEIVFFDVETTAPSAAGPGRWWLLEFGAILVCPRKLVEVGSYDTLIRPGDLSAVSRRFTDDVEAAIMASAPPLQGRGRQDIRHPGRPRLGWAQHPAFRLPPHPRGLRRHRAPRPGARRRHRLPQRPGRTLRPPRRRPQDGHPRDLLRHREAEAQGPGRRAHEPRGAQALRHRPAAGVQPAGRPLRAAVSPSRGHQEDVAGADHQAAT

SEQ ID NO: 18864 - protein, 209 aa, Zea mays subsp. mays
  peptide (1)..(209): Ceres Seq. ID no. 12368280
  misc_feature (2)..(107): Homolog of NCBI NO: 30697522 NR Description: exonuclease protein family [Arabidopsis thaliana]
  misc_feature (2)..(107): Homolog of NCBI NO: 9757860 NR Description: exonuclease-like protein [Arabidopsis thaliana]
  misc_feature (4)..(100): Homolog of NCBI NO: 37534222 NR Description: putative exonuclease [Oryza sativa (japonica
  misc_feature (2)..(57): Homolog of NCBI NO: 15221225 NR Description: putative exonuclease
  misc_feature (2)..(57): Homolog of NCBI NO: 15240840 NR Description: exonuclease-like protein; protein id: At5g07710.1
  misc_feature (1)..(76): Homolog of NCBI NO: 15236050 NR Description: hypothetical protein; protein id: At4g39810.1
  misc_feature (2)..(73): Homolog of NCBI NO: 9945064 NR Description: similar to Arabidopsis chromosome BAC genomics
MRDEIVFFDVETTAPSAAGPGRWWLLEFGAILVCPRKLVEVGSYDTLIRPGDLSAVSRRFTDDVEAAIMASAPPLQGRGRQDIRHPGRPRLGWAQHPAFRLPPHPRGLRRHRAPRPGARRRHRLPQRPGRTLRPPRRRPQDGHPRDLLRHREAEAQGPGRRAHEPRGAQALRHRPAAGVQPAGRPLRAAVSPSRGHQEDVAGADHQAAT

SEQ ID NO: 18865 - protein, 160 aa, Zea mays subsp. mays
  peptide (1)..(160): Ceres Seq. ID no. 12368281
  misc_feature (87)..(146): Pfam Name: Equine herpesvirus glycoprotein gp2 Pfam Description: Equine herpesvirus glycoprotein gp2
  misc_feature (87)..(146): Homolog of NCBI NO: 17221108 NR Description: glycoprotein gp2 [Equine herpesvirus 1]
  misc_feature (87)..(146): Homolog of NCBI NO: 17221114 NR Description: glycoprotein gp2 [Equine herpesvirus 1]
  misc_feature (1)..(45): Homolog of NCBI NO: 37534220 NR Description: putative exonuclease [Oryza sativa (japonica
  misc_feature (1)..(45): Homolog of NCBI NO: 9757860 NR Description: exonuclease-like protein [Arabidopsis thaliana]
  misc_feature (1)..(70): Homolog of NCBI NO: 37534222 NR Description: putative exonuclease [Oryza sativa (japonica
  misc_feature (1)..(69): Homolog of NCBI NO: 30697522 NR Description: exonuclease protein family [Arabidopsis thaliana]
  misc_feature (1)..(45): Homolog of NCBI NO: 15221225 NR Description: putative exonuclease
  misc_feature (1)..(42): Homolog of NCBI NO: 15240840 NR Description: exonuclease-like protein; protein id: At5g07710.1
  misc_feature (1)..(70): Homolog of NCBI NO: 15236050 NR Description: hypothetical protein; protein id: At4g39810.1
  misc_feature (1)..(100): Homolog of NCBI NO: 9945064 NR Description: similar to Arabidopsis chromosome BAC genomics
MATLATYFGIGKQKHRGLDDARMNLEVLKHCATVLLLESSLPDVLCAQQSRRAAVTRRTSQAQTIKPPPKHAVHHHLRPGGVVMSQTKLPFTAVTATPAPAAATPCGKRNSLGKVVARAVTAATTAPLSSSSSTSTNTRRPVTATTPFHMILRHSRAILR

SEQ ID NO: 18866 - DNA, 1747 bp, Zea mays subsp. mays
  misc_feature (1)..(1747): Ceres Seq. ID no. 13493123
  misc_feature: MA Experiment ID: 108535 Result: Down-regulated in Transcription
  misc_feature: MA Experiment 108535 PARAMETER Experiment Name: Zm_Meristem_P Parameter: Age (day) Value: 8
  misc_feature: MA Experiment 108535 PARAMETER Experiment Name: Zm_Meristem_P Parameter: Organism Value: Zea mays
  misc_feature: MA Experiment 108535 PARAMETER Experiment Name: Zm_Meristem_P Parameter: Plant Line Value: 35A19
  misc_feature: MA Experiment 108535 PARAMETER Experiment Name: Zm_Meristem_P Parameter: Tissue Value: Root Meristem vs. Above Root Meristem
  misc_feature: MA Experiment ID: 108544 Result: Down-regulated in Transcription
  misc_feature: MA Experiment ID: 108689 Result: Down-regulated in Transcription
  misc_feature: MA Experiment 108689 PARAMETER Experiment Name: Zm_Drought_Roots_P Parameter: Age (day) Value: 9
  misc_feature: MA Experiment 108689 PARAMETER Experiment Name: Zm_Drought_Roots_P Parameter: Organism Value: Zea mays
  misc_feature: MA Experiment 108689 PARAMETER Experiment Name: Zm_Drought_Roots_P Parameter: Plant Line Value: 35A19
  misc_feature: MA Experiment 108689 PARAMETER Experiment Name: Zm_Drought_Roots_P Parameter: Timepoint (hr) Value: 24
  misc_feature: MA Experiment 108689 PARAMETER Experiment Name: Zm_Drought_Roots_P Parameter: Tissue Value: Roots
  misc_feature: MA Experiment 108689 PARAMETER Experiment Name: Zm_Drought_Roots_P Parameter: Treatment Value: Drought vs. No Drought
  misc_feature: MA Experiment ID: 20000108 Result: Down-regulated in Transcription
  misc_feature: MA Experiment 20000108 PARAMETER Experiment Name: Zm_Root-Tips_P Parameter: Age (day) Value: 12
  misc_feature: MA Experiment 20000108 PARAMETER Experiment Name: Zm_Root-Tips_P Parameter: Organism Value: Zea mays
  misc_feature: MA Experiment 20000108 PARAMETER Experiment Name: Zm_Root-Tips_P Parameter: Tissue Value: Root tips vs. Root mid region    35
  misc_feature: MA Experiment 20000108 PARAMETER Experiment Name: Zm_Root-Tips_P Parameter: Tissue Value: Root tips vs. Root mid region   Sequence Listing-Misc Features (4)
  misc_feature: MA Experiment ID: 20000477 Result: Up-regulated in Transcription
  misc_feature: MA Experiment 20000477 PARAMETER Experiment Name: Zm_5mM_SA_P Parameter: Age (day) Value: 10
  misc_feature: MA Experiment 20000477 PARAMETER Experiment Name: Zm_5mM_SA_P Parameter: Organism Value: Zea mays
  misc_feature: MA Experiment 20000477 PARAMETER Experiment Name: Zm_5mM_SA_P Parameter: Plant Line Value: 35A19
  misc_feature: MA Experiment 20000477 PARAMETER Experiment Name: Zm_5mM_SA_P Parameter: Timepoint (hr) Value: 48
  misc_feature: MA Experiment 20000477 PARAMETER Experiment Name: Zm_5mM_SA_P Parameter: Tissue Value: Aerial
  misc_feature: MA Experiment 20000477 PARAMETER Experiment Name: Zm_5mM_SA_P Parameter: Treatment Value: 5mM SA vs. No Treatment
  misc_feature: MA Experiment ID: 20000492 Result: Down-regulated in Transcription
  misc_feature: MA Experiment 20000492 PARAMETER Experiment Name: Zm_Hybrid_Seed_Dev_P Parameter: DAP Value: 12
  misc_feature: MA Experiment 20000492 PARAMETER Experiment Name: Zm_Hybrid_Seed_Dev_P Parameter: Organism Value: Zea mays
  misc_feature: MA Experiment 20000492 PARAMETER Experiment Name: Zm_Hybrid_Seed_Dev_P Parameter: Plant Line Value: 35A19
  misc_feature: MA Experiment 20000492 PARAMETER Experiment Name: Zm_Hybrid_Seed_Dev_P Parameter: Tissue Value: Fert Kernel vs. Unfert Floret
  misc_feature: MA Experiment ID: 20000535 Result: Down-regulated in Transcription
  misc_feature: MA Experiment 20000535 PARAMETER Experiment Name: Zm_Hybrid_Seed_Dev_P Parameter: DAP Value: 30 vs. 12
  misc_feature: MA Experiment 20000535 PARAMETER Experiment Name: Zm_Hybrid_Seed_Dev_P Parameter: Organism Value: Zea mays
  misc_feature: MA Experiment 20000535 PARAMETER Experiment Name: Zm_Hybrid_Seed_Dev_P Parameter: Plant Line Value: 35A19
  misc_feature: MA Experiment 20000535 PARAMETER Experiment Name: Zm_Hybrid_Seed_Dev_P Parameter: Tissue Value: Embryo vs. Unfert Floret
taatcgaaaaacctccacccgccccgtcccgttttgacggccctttctcccctctcctccgcgagcgccgccgcagtagaacccggtggtaacccactgccgcaagcatcccaccgcgccgagctacgcgacggacgcggcgcgcggcccacaacccaaccgcagcggcaacaaccgctctataaagcaatccccccacctaccggctccgcggcctcgctcgcttcgctttcccccaaatccaccgcgggctcgagctcggaggagaggagacgagacgacccaagactttctcacccccctttgcttcctgcgcaattcctgcggcagcgcctttctctctttcaatggacagcgactacgttgctagcctgctcatgggcatgggctcatccgcccctgcgctcgacttcgccgcgctggacgccgggttcctcgaaacgctctgcggcggcggcggcggcctcttcggggtgtccggggtcgccgcgggggccgggtgtggcggcgtgtccccggaggggtcgtcggtgtccgacccggcgtgggcgcgcgccagggacgatgacaatgtcaggaagcgcaaggagccgcccacggggtccgccggcggcaaggaggcctgcccgggcaaggctgcggaggccaagggtccggacgggaagaggtgcagagtgggcggcagcgacagcccggtgaagccgaaggtagaggaggtggcggcgagcgacgcctcggttgaactcaaagcgcagaagaagggcaaggggaagaccgccaagccggcagtcgaaccgcccaaggactacgtccatgtccgggcgcggcgagggcaggcgactgacagccacagcctcgcagagagggttagaagagagaagatcagccagaggatgaagtttctgcaggacctagtgccaggatgcaacaaggtggttggcaaggcactcatgctcgatgagatcataaactacgtccagtcgctgcagcagcaagtcgagttcctgtccatgaagctcgccactgtgaacccacagcttgacttcagcaacctgtcgacactcctacacaaagacatgtaccaaccatgtggcccttcggcaaattcggtctttccactggaaagtgacggtgcagctttcccattctgcgaccaagcggatcttttccacagctttggttcgggttcggctgctatggaggatcagtgctctctaagcctgctagacacggctctgccccacgcggccaacccacagtttgcttttcaaaagcagcagagggacttctgggaggatggcctacagaacgcattgcctaccggtagtgagcaaagacaggaggaggatgggcttttagtacccaactttgatggccagttacatgctgaccagacaaaggttgagttctagtccctggtgctcctcccaaggttgatatttttgtatataggtggggtaccaagacctgtggcaagcaaagctctctctttctctctgtgtccgaagctgaccatcattagagtctaggcctgcgaactgatttcgttccgtgataatgctgcatgtatggcatctcgattcttcccacagagatcatgtgatgtgatcgacctcgagaaattaaaagtagattgtgtactagatatggcgcaaatattacatgcgccatcttctaaagttgtactgattggtatgtaagggcgctgggtggtgttggaacggataccgtgtactgtttgttgctt

SEQ ID NO: 18867 - protein, 354 aa, Zea mays subsp. mays
  peptide (1)..(354): Ceres Seq. ID no. 13493124
  misc_feature (164)..(214): Pfam Name: Helix-loop-helix DNA-binding domain Pfam Description: Helix-loop-helix DNA-binding domain
  misc_feature (120)..(255): Homolog of NCBI NO: 15231450 NR Description: bHLH protein family [Arabidopsis thaliana]
  misc_feature (1)..(276): Homolog of NCBI NO: 20127085 NR Description: putative bHLH transcription factor [Arabidopsis
  misc_feature (51)..(256): Homolog of NCBI NO: 34898690 NR Description: hypothetical protein [Oryza sativa (japonica
  misc_feature (1)..(276): Homolog of NCBI NO: 15239013 NR Description: bHLH protein family [Arabidopsis thaliana]
  misc_feature (122)..(323): Homolog of NCBI NO: 20127044 NR Description: putative bHLH transcription factor [Arabidopsis
  misc_feature (60)..(266): Homolog of NCBI NO: 22331295 NR Description: bHLH protein [Arabidopsis thaliana]
  misc_feature (122)..(323): Homolog of NCBI NO: 15221563 NR Description: DNA-binding protein -related [Arabidopsis
  misc_feature (1)..(323): Homolog of NCBI NO: 30697769 NR Description: DNA-binding protein -related [Arabidopsis
  misc_feature (23)..(296): Homolog of NCBI NO: 34906952 NR Description: DNA-binding protein-like protein
  misc_feature (35)..(354): Homolog of NCBI NO: 29647487 NR Description: OJ1191_A10.7 [Oryza sativa (japonica
MDSDYVASLLMGMGSSAPALDFAALDAGFLETLCGGGGGLFGVSGVAAGAGCGGVSPEGSSVSDPAWARARDDDNVRKRKEPPTGSAGGKEACPGKAAEAKGPDGKRCRVGGSDSPVKPKVEEVAASDASVELKAQKKGKGKTAKPAVEPPKDYVHVRARRGQATDSHSLAERVRREKISQRMKFLQDLVPGCNKVVGKALMLDEIINYVQSLQQQVEFLSMKLATVNPQLDFSNLSTLLHKDMYQPCGPSANSVFPLESDGAAFPFCDQADLFHSFGSGSAAMEDQCSLSLLDTALPHAANPQFAFQKQQRDFWEDGLQNALPTGSEQRQEEDGLLVPNFDGQLHADQTKVEF

SEQ ID NO: 18868 - protein, 344 aa, Zea mays subsp. mays
  peptide (1)..(344): Ceres Seq. ID no. 13493125
  misc_feature (154)..(204): Pfam Name: Helix-loop-helix DNA-binding domain Pfam Description: Helix-loop-helix DNA-binding domain
  misc_feature (110)..(245): Homolog of NCBI NO: 15231450 NR Description: bHLH protein family [Arabidopsis thaliana]
  misc_feature (1)..(266): Homolog of NCBI NO: 20127085 NR Description: putative bHLH transcription factor [Arabidopsis
  misc_feature (41)..(246): Homolog of NCBI NO: 34898690 NR Description: hypothetical protein [Oryza sativa (japonica
  misc_feature (1)..(266): Homolog of NCBI NO: 15239013 NR Description: bHLH protein family [Arabidopsis thaliana]
  misc_feature (112)..(313): Homolog of NCBI NO: 20127044 NR Description: putative bHLH transcription factor [Arabidopsis
  misc_feature (50)..(256): Homolog of NCBI NO: 22331295 NR Description: bHLH protein [Arabidopsis thaliana]
  misc_feature (112)..(313): Homolog of NCBI NO: 15221563 NR Description: DNA-binding protein -related [Arabidopsis
  misc_feature (1)..(313): Homolog of NCBI NO: 30697769 NR Description: DNA-binding protein -related [Arabidopsis
  misc_feature (13)..(286): Homolog of NCBI NO: 34906952 NR Description: DNA-binding protein-like protein
  misc_feature (25)..(344): Homolog of NCBI NO: 29647487 NR Description: OJ1191_A10.7 [Oryza sativa (japonica
MGMGSSAPALDFAALDAGFLETLCGGGGGLFGVSGVAAGAGCGGVSPEGSSVSDPAWARARDDDNVRKRKEPPTGSAGGKEACPGKAAEAKGPDGKRCRVGGSDSPVKPKVEEVAASDASVELKAQKKGKGKTAKPAVEPPKDYVHVRARRGQATDSHSLAERVRREKISQRMKFLQDLVPGCNKVVGKALMLDEIINYVQSLQQQVEFLSMKLATVNPQLDFSNLSTLLHKDMYQPCGPSANSVFPLESDGAAFPFCDQADLFHSFGSGSAAMEDQCSLSLLDTALPHAANPQFAFQKQQRDFWEDGLQNALPTGSEQRQEEDGLLVPNFDGQLHADQTKVEF

SEQ ID NO: 18869 - protein, 342 aa, Zea mays subsp. mays
  peptide (1)..(342): Ceres Seq. ID no. 13493126
  misc_feature (152)..(202): Pfam Name: Helix-loop-helix DNA-binding domain Pfam Description: Helix-loop-helix DNA-binding domain
  misc_feature (108)..(243): Homolog of NCBI NO: 15231450 NR Description: bHLH protein family [Arabidopsis thaliana]
  misc_feature (1)..(264): Homolog of NCBI NO: 20127085 NR Description: putative bHLH transcription factor [Arabidopsis
  misc_feature (39)..(244): Homolog of NCBI NO: 34898690 NR Description: hypothetical protein [Oryza sativa (japonica
  misc_feature (1)..(264): Homolog of NCBI NO: 15239013 NR Description: bHLH protein family [Arabidopsis thaliana]
  misc_feature (110)..(311): Homolog of NCBI NO: 20127044 NR Description: putative bHLH transcription factor [Arabidopsis
  misc_feature (48)..(254): Homolog of NCBI NO: 22331295 NR Description: bHLH protein [Arabidopsis thaliana]
  misc_feature (110)..(311): Homolog of NCBI NO: 15221563 NR Description: DNA-binding protein -related [Arabidopsis
  misc_feature (1)..(311): Homolog of NCBI NO: 30697769 NR Description: DNA-binding protein -related [Arabidopsis
  misc_feature (11)..(284): Homolog of NCBI NO: 34906952 NR Description: DNA-binding protein-like protein
  misc_feature (23)..(342): Homolog of NCBI NO: 29647487 NR Description: OJ1191_A10.7 [Oryza sativa (japonica
MGSSAPALDFAALDAGFLETLCGGGGGLFGVSGVAAGAGCGGVSPEGSSVSDPAWARARDDDNVRKRKEPPTGSAGGKEACPGKAAEAKGPDGKRCRVGGSDSPVKPKVEEVAASDASVELKAQKKGKGKTAKPAVEPPKDYVHVRARRGQATDSHSLAERVRREKISQRMKFLQDLVPGCNKVVGKALMLDEIINYVQSLQQQVEFLSMKLATVNPQLDFSNLSTLLHKDMYQPCGPSANSVFPLESDGAAFPFCDQADLFHSFGSGSAAMEDQCSLSLLDTALPHAANPQFAFQKQQRDFWEDGLQNALPTGSEQRQEEDGLLVPNFDGQLHADQTKVEF

SEQ ID NO: 18870 - DNA, 2001 bp, Zea mays subsp. mays
  misc_feature (1)..(2001): Ceres Seq. ID no. 12368484
  misc_feature: MA Experiment ID: 108689 Result: Up-regulated in Transcription
  misc_feature: MA Experiment 108689 PARAMETER Experiment Name: Zm_Drought_Roots_P Parameter: Age (day) Value: 9
  misc_feature: MA Experiment 108689 PARAMETER Experiment Name: Zm_Drought_Roots_P Parameter: Organism Value: Zea mays
  misc_feature: MA Experiment 108689 PARAMETER Experiment Name: Zm_Drought_Roots_P Parameter: Plant Line Value: 35A19
  misc_feature: MA Experiment 108689 PARAMETER Experiment Name: Zm_Drought_Roots_P Parameter: Timepoint (hr) Value: 24
  misc_feature: MA Experiment 108689 PARAMETER Experiment Name: Zm_Drought_Roots_P Parameter: Tissue Value: Roots
  misc_feature: MA Experiment 108689 PARAMETER Experiment Name: Zm_Drought_Roots_P Parameter: Treatment Value: Drought vs. No Drought
  misc_feature: MA Experiment ID: 20000479 Result: Up-regulated in Transcription
  misc_feature: MA Experiment 20000479 PARAMETER Experiment Name: Zm_Drought_P Parameter: Age (day) Value: 10
  misc_feature: MA Experiment 20000479 PARAMETER Experiment Name: Zm_Drought_P Parameter: Organism Value: Zea mays
  misc_feature: MA Experiment 20000479 PARAMETER Experiment Name: Zm_Drought_P Parameter: Plant Line Value: 35A19
  misc_feature: MA Experiment 20000479 PARAMETER Experiment Name: Zm_Drought_P Parameter: Timepoint (hr) Value: 48
  misc_feature: MA Experiment 20000479 PARAMETER Experiment Name: Zm_Drought_P Parameter: Tissue Value: Aerial
  misc_feature: MA Experiment 20000479 PARAMETER Experiment Name: Zm_Drought_P Parameter: Treatment Value: Drought vs. No Drought
  misc_feature: MA Experiment ID: 20000492 Result: Down-regulated in Transcription
  misc_feature: MA Experiment 20000492 PARAMETER Experiment Name: Zm_Hybrid_Seed_Dev_P Parameter: DAP Value: 12
  misc_feature: MA Experiment 20000492 PARAMETER Experiment Name: Zm_Hybrid_Seed_Dev_P Parameter: Organism Value: Zea mays
  misc_feature: MA Experiment 20000492 PARAMETER Experiment Name: Zm_Hybrid_Seed_Dev_P Parameter: Plant Line Value: 35A19
  misc_feature: MA Experiment 20000492 PARAMETER Experiment Name: Zm_Hybrid_Seed_Dev_P Parameter: Tissue Value: Fert Kernel vs. Unfert Floret
gcacgagaccattacctagaacatcctaatcaaaaggaggccccggggatcggtggccaggctgagctcctcccagagtcccagtacgcctccggagtccggatccgcggagccaggctgagctgctcccgtggtctactctccagtacgcggctcggcagggaccgggagcgaggacgagcgtcctgcgtcgacgggatcggcgtgccaggggagcgctgaaatctgcgcttccgtctccggacggccgatgccaggccttgctcgggagaggtagcaaacgaaacatggagctgaggcggctgctgctgcttgcgctcatctgcctgcgtgctccccgtttggcttcggctcagcagccggatgaggcgacggtcatagttaagggctccactaggattgcggaaacggatgacaactacgtctgtgctacaattgattggtggccgccggagaagtgcaactacaatcagtgcccatggggccaggcgtcaattcttaatctggatctggatcacccgtttctggctcaggccattcaagcatttgaccatttgaggattaggctgggaggctccttgcaagaccgagttgtttatgatgtgggaacagaaagtccatgctccccatttacaaatgtatccaatgccttgtttggtttctcagttggttgccttggtatggataggtgggacaaactgaatgacctattcgagagaacaggagcaattgtcacatttggtgtgaatgcactctacgggaggtataatgttcgacgttccatctgggcaggcaaatggaattccactaatgcatatgattttgtaaaatacacaatctcaaagggatacccagttggctcttgggaatttggcaatgagctgagtgggcatggaatcggagcaaaagttgatgctaaactttatggaaaagatgtaattgaatttaaatccatccttcggcaattgtataaggcaccactgtcccagccactcctgttagccccgggagggttctttgatcaacagtggtattctcagctacttgagacttcaggtcatggtgttgttaatgccttatctcaccatgtatataatcttggtggagggaatgatgttcatcttataaggaagatcttagacccaaagtacttggatcgtgctgaagatacttacagagacatgcaacttaccatccaaaggcatggaacatgggcttctgcttgggtcagtgaaagtggcggtgtattcaacaatggtggtcaactggtgtcaaatacattcatcaacagtatctggtatctagatcagcttgggatggcatctaagtacaacacaaaagtgttctgcagacagactctcatcggtggcaactatggactgctcgacacgcaaacttttctgccaaatcctgattactacagcgctctactatggcatcggcttatgggcaatggagttctttcagttgatataaacgcaccgcgtcaaatacgcgcttatgctcattgtaggaaacaacagcaaggcatcacgattctgttgatcaacctgagcaacactactggatacaacgtcactctccagaacgacatcaacgtcagcttgggcaaaagacctgaccttgagaagcgcagttctttcacgcacaggctcaggaaagcagtctcatggctggggaggaaaccagcaagcaacaccaggaggcgggaggagtaccatctgaccgccaaggacggcgatctccagagcaaaacgatgctgctcaacggggccccgttggaacttggagacgctggcagcattccagctatggatccggtgctcgtcgccgttgatttgccggtgcagctagcaccaacatccatcgccttcgtagtcctacccaagtttgaggccaaggcttgttcttgacacatgagctcttgaaatcagtttttttttgtgtgtgccttgaaatgttccatagacctatttcgtgaaagaaatcatacaacgcggc

SEQ ID NO: 18871 - protein, 541 aa, Zea mays subsp. mays
  peptide (1)..(541): Ceres Seq. ID no. 12368485
  misc_feature (26)..(343): Pfam Name: Glycosyl hydrolase family 79, N-terminal domain Pfam Description: Glycosyl hydrolase family 79, N-terminal domain
  misc_feature (1)..(541): Homolog of NCBI NO: 30692670 NR Description: expressed protein [Arabidopsis thaliana]
  misc_feature (1)..(73): Homolog of NCBI NO: 24413987 NR Description: contains ESTs
  misc_feature (74)..(541): Homolog of NCBI NO: 24413987 NR Description: contains ESTs
  misc_feature (463)..(541): Homolog of NCBI NO: 34393590 NR Description: putative beta-glucuronidase precursor
  misc_feature (6)..(452): Homolog of NCBI NO: 34393590 NR Description: putative beta-glucuronidase precursor
  misc_feature (22)..(541): Homolog of NCBI NO: 15240869 NR Description: glycosyl hydrolase family 79
  misc_feature (26)..(541): Homolog of NCBI NO: 9757846 NR Description: contains similarity to heparanase~gene_id:MFB13.2
  misc_feature (7)..(541): Homolog of NCBI NO: 22327999 NR Description: glycosyl hydrolase family 79
  misc_feature (6)..(541): Homolog of NCBI NO: 10176717 NR Description: contains similarity to heparanase~gene_id:MXM12.7
  misc_feature (1)..(540): Homolog of NCBI NO: 38174813 NR Description: putative heparanase [Hordeum vulgare subsp.
MELRRLLLLALICLRAPRLASAQQPDEATVIVKGSTRIAETDDNYVCATIDWWPPEKCNYNQCPWGQASILNLDLDHPFLAQAIQAFDHLRIRLGGSLQDRVVYDVGTESPCSPFTNVSNALFGFSVGCLGMDRWDKLNDLFERTGAIVTFGVNALYGRYNVRRSIWAGKWNSTNAYDFVKYTISKGYPVGSWEFGNELSGHGIGAKVDAKLYGKDVIEFKSILRQLYKAPLSQPLLLAPGGFFDQQWYSQLLETSGHGVVNALSHHVYNLGGGNDVHLIRKILDPKYLDRAEDTYRDMQLTIQRHGTWASAWVSESGGVFNNGGQLVSNTFINSIWYLDQLGMASKYNTKVFCRQTLIGGNYGLLDTQTFLPNPDYYSALLWHRLMGNGVLSVDINAPRQIRAYAHCRKQQQGITILLINLSNTTGYNVTLQNDINVSLGKRPDLEKRSSFTHRLRKAVSWLGRKPASNTRRREEYHLTAKDGDLQSKTMLLNGAPLELGDAGSIPAMDPVLVAVDLPVQLAPTSIAFVVLPKFEAKACS

SEQ ID NO: 18872 - protein, 410 aa, Zea mays subsp. mays
  peptide (1)..(410): Ceres Seq. ID no. 12368486
  misc_feature (1)..(212): Pfam Name: Glycosyl hydrolase family 79, N-terminal domain Pfam Description: Glycosyl hydrolase family 79, N-terminal domain
  misc_feature (1)..(410): Homolog of NCBI NO: 10177640 NR Description: contains similarity to heparanase~gene_id:MGG23.2
  misc_feature (1)..(410): Homolog of NCBI NO: 30692670 NR Description: expressed protein [Arabidopsis thaliana]
  misc_feature (1)..(410): Homolog of NCBI NO: 24413987 NR Description: contains ESTs
  misc_feature (332)..(410): Homolog of NCBI NO: 34393590 NR Description: putative beta-glucuronidase precursor
  misc_feature (1)..(321): Homolog of NCBI NO: 34393590 NR Description: putative beta-glucuronidase precursor
  misc_feature (1)..(410): Homolog of NCBI NO: 15240869 NR Description: glycosyl hydrolase family 79
  misc_feature (1)..(410): Homolog of NCBI NO: 9757846 NR Description: contains similarity to heparanase~gene_id:MFB13.2
  misc_feature (1)..(410): Homolog of NCBI NO: 22327999 NR Description: glycosyl hydrolase family 79
  misc_feature (1)..(410): Homolog of NCBI NO: 10176717 NR Description: contains similarity to heparanase~gene_id:MXM12.7
  misc_feature (1)..(409): Homolog of NCBI NO: 38174813 NR Description: putative heparanase [Hordeum vulgare subsp.
MDRWDKLNDLFERTGAIVTFGVNALYGRYNVRRSIWAGKWNSTNAYDFVKYTISKGYPVGSWEFGNELSGHGIGAKVDAKLYGKDVIEFKSILRQLYKAPLSQPLLLAPGGFFDQQWYSQLLETSGHGVVNALSHHVYNLGGGNDVHLIRKILDPKYLDRAEDTYRDMQLTIQRHGTWASAWVSESGGVFNNGGQLVSNTFINSIWYLDQLGMASKYNTKVFCRQTLIGGNYGLLDTQTFLPNPDYYSALLWHRLMGNGVLSVDINAPRQIRAYAHCRKQQQGITILLINLSNTTGYNVTLQNDINVSLGKRPDLEKRSSFTHRLRKAVSWLGRKPASNTRRREEYHLTAKDGDLQSKTMLLNGAPLELGDAGSIPAMDPVLVAVDLPVQLAPTSIAFVVLPKFEAKACS

SEQ ID NO: 18873 - DNA, 483 bp, Zea mays subsp. mays
  misc_feature (1)..(483): Ceres Seq. ID no. 1846912
  misc_feature: MA Experiment ID: 108536 Result: Down-regulated in Transcription
  misc_feature: MA Experiment 108536 PARAMETER Experiment Name: Zm_Meristem_P Parameter: Age (day) Value: 8
  misc_feature: MA Experiment 108536 PARAMETER Experiment Name: Zm_Meristem_P Parameter: Organism Value: Zea mays
  misc_feature: MA Experiment 108536 PARAMETER Experiment Name: Zm_Meristem_P Parameter: Plant Line Value: 35A19
  misc_feature: MA Experiment 108536 PARAMETER Experiment Name: Zm_Meristem_P Parameter: Tissue Value: Shoot Meristem vs. Above Shoot Meristem
  misc_feature: MA Experiment ID: 108543 Result: Up-regulated in Transcription
  misc_feature: MA Experiment ID: 20000478 Result: Down-regulated in Transcription
  misc_feature: MA Experiment 20000478 PARAMETER Experiment Name: Zm_5mM_SA_P Parameter: Age (day) Value: 11
  misc_feature: MA Experiment 20000478 PARAMETER Experiment Name: Zm_5mM_SA_P Parameter: Organism Value: Zea mays
  misc_feature: MA Experiment 20000478 PARAMETER Experiment Name: Zm_5mM_SA_P Parameter: Plant Line Value: 35A19
  misc_feature: MA Experiment 20000478 PARAMETER Experiment Name: Zm_5mM_SA_P Parameter: Timepoint (hr) Value: 72
  misc_feature: MA Experiment 20000478 PARAMETER Experiment Name: Zm_5mM_SA_P Parameter: Tissue Value: Aerial
  misc_feature: MA Experiment 20000478 PARAMETER Experiment Name: Zm_5mM_SA_P Parameter: Treatment Value: 5mM SA vs. No Treatment
  misc_feature: MA Experiment ID: 20000535 Result: Up-regulated in Transcription
  misc_feature: MA Experiment 20000535 PARAMETER Experiment Name: Zm_Hybrid_Seed_Dev_P Parameter: DAP Value: 30 vs. 12
  misc_feature: MA Experiment 20000535 PARAMETER Experiment Name: Zm_Hybrid_Seed_Dev_P Parameter: Organism Value: Zea mays
  misc_feature: MA Experiment 20000535 PARAMETER Experiment Name: Zm_Hybrid_Seed_Dev_P Parameter: Plant Line Value: 35A19
  misc_feature: MA Experiment 20000535 PARAMETER Experiment Name: Zm_Hybrid_Seed_Dev_P Parameter: Tissue Value: Embryo vs. Unfert Floret
gggattcattcgcgcacgtcccaggaaatattgcagggaatcaaaatggagacgttgcagtggatcaataccatcgctacaaggaagacgtcgatctcatgaaaagtttgaactttgatgcctaccggttctcaatctcatggtccaggatcttcccggatggcgaagggaaagtcaatccagaaggtgtagcgtattacaataatttgataaactatctgcttcagcaaggcatgactccttacatcaacctttaccactatgatcttcctcttgcgcttgagaagaaatatggagggtggttaagcgcgaagatggcggacttgtttacagactatgctgacttctgttttaagacctacggcgatcgcgtaaagcactggtttacattcaatgagccaaggatagtagcgctacttggctatgacacagggtcaaatcctcctcaaaggtgcacagatgcgctgctggtgggaattcagc

SEQ ID NO: 18874 - protein, 160 aa, Zea mays subsp. mays
  peptide (1)..(160): Ceres Seq. ID no. 1846913
  misc_feature (1)..(152): Pfam Name: Glycosyl hydrolase family 1 Pfam Description: Glycosyl hydrolase family 1
  misc_feature (1)..(154): Homolog of NCBI NO: 22331147 NR Description: glycosyl hydrolase family 1; protein id:
  misc_feature (1)..(152): Homolog of NCBI NO: 17226270 NR Description: beta-mannosidase enzyme [Lycopersicon esculentum]
  misc_feature (1)..(154): Homolog of NCBI NO: 15229584 NR Description: glycosyl hydrolase family 1
  misc_feature (1)..(154): Homolog of NCBI NO: 9294062 NR Description: beta-glucosidase [Arabidopsis thaliana]
  misc_feature (1)..(152): Homolog of NCBI NO: 22327832 NR Description: glycosyl hydrolase family 1; protein id:
  misc_feature (1)..(151): Homolog of NCBI NO: 3820531 NR Description: beta-glucosidase [Pinus contorta]
  misc_feature (27)..(152): Homolog of NCBI NO: 34914546 NR Description: putative beta-glucosidase
  misc_feature (1)..(152): Homolog of NCBI NO: 34899014 NR Description: putative non-cyanogenic beta-glucosidase
  misc_feature (1)..(152): Homolog of NCBI NO: 1362162 NR Description: beta-glucosidase BGQ60 precursor - barley
  misc_feature (1)..(152): Homolog of NCBI NO: 18875458 NR Description: beta-glucosidase [Oryza sativa]
DSFAHVPGNIAGNQNGDVAVDQYHRYKEDVDLMKSLNFDAYRFSISWSRIFPDGEGKVNPEGVAYYNNLINYLLQQGMTPYINLYHYDLPLALEKKYGGWLSAKMADLFTDYADFCFKTYGDRVKHWFTFNEPRIVALLGYDTGSNPPQRCTDALLVGIQ

SEQ ID NO: 18875 - protein, 128 aa, Zea mays subsp. mays
  peptide (1)..(128): Ceres Seq. ID no. 1846914
  misc_feature (1)..(120): Pfam Name: Glycosyl hydrolase family 1 Pfam Description: Glycosyl hydrolase family 1
  misc_feature (1)..(120): Homolog of NCBI NO: 34914546 NR Description: putative beta-glucosidase
  misc_feature (1)..(120): Homolog of NCBI NO: 22327832 NR Description: glycosyl hydrolase family 1; protein id:
  misc_feature (1)..(119): Homolog of NCBI NO: 3820531 NR Description: beta-glucosidase [Pinus contorta]
  misc_feature (1)..(120): Homolog of NCBI NO: 34899014 NR Description: putative non-cyanogenic beta-glucosidase
  misc_feature (1)..(122): Homolog of NCBI NO: 9294062 NR Description: beta-glucosidase [Arabidopsis thaliana]
  misc_feature (1)..(122): Homolog of NCBI NO: 22331147 NR Description: glycosyl hydrolase family 1; protein id:
  misc_feature (1)..(120): Homolog of NCBI NO: 17226270 NR Description: beta-mannosidase enzyme [Lycopersicon esculentum]
  misc_feature (1)..(122): Homolog of NCBI NO: 15229584 NR Description: glycosyl hydrolase family 1
  misc_feature (1)..(120): Homolog of NCBI NO: 1362162 NR Description: beta-glucosidase BGQ60 precursor - barley
  misc_feature (1)..(120): Homolog of NCBI NO: 18875458 NR Description: beta-glucosidase [Oryza sativa]
MKSLNFDAYRFSISWSRIFPDGEGKVNPEGVAYYNNLINYLLQQGMTPYINLYHYDLPLALEKKYGGWLSAKMADLFTDYADFCFKTYGDRVKHWFTFNEPRIVALLGYDTGSNPPQRCTDALLVGIQ

SEQ ID NO: 18876 - protein, 83 aa, Zea mays subsp. mays
  peptide (1)..(83): Ceres Seq. ID no. 1846915
  misc_feature (1)..(75): Pfam Name: Glycosyl hydrolase family 1 Pfam Description: Glycosyl hydrolase family 1
  misc_feature (1)..(75): Homolog of NCBI NO: 34914546 NR Description: putative beta-glucosidase
  misc_feature (1)..(75): Homolog of NCBI NO: 22327832 NR Description: glycosyl hydrolase family 1; protein id:
  misc_feature (1)..(74): Homolog of NCBI NO: 3820531 NR Description: beta-glucosidase [Pinus contorta]
  misc_feature (1)..(75): Homolog of NCBI NO: 34899014 NR Description: putative non-cyanogenic beta-glucosidase
  misc_feature (1)..(77): Homolog of NCBI NO: 9294062 NR Description: beta-glucosidase [Arabidopsis thaliana]
  misc_feature (1)..(77): Homolog of NCBI NO: 22331147 NR Description: glycosyl hydrolase family 1; protein id:
  misc_feature (1)..(75): Homolog of NCBI NO: 17226270 NR Description: beta-mannosidase enzyme [Lycopersicon esculentum]
  misc_feature (1)..(77): Homolog of NCBI NO: 15229584 NR Description: glycosyl hydrolase family 1
  misc_feature (1)..(75): Homolog of NCBI NO: 1362162 NR Description: beta-glucosidase BGQ60 precursor - barley
  misc_feature (1)..(75): Homolog of NCBI NO: 18875458 NR Description: beta-glucosidase [Oryza sativa]
MTPYINLYHYDLPLALEKKYGGWLSAKMADLFTDYADFCFKTYGDRVKHWFTFNEPRIVALLGYDTGSNPPQRCTDALLVGIQ

SEQ ID NO: 18877 - DNA, 692 bp, Zea mays subsp. mays
  misc_feature (1)..(692): Ceres Seq. ID no. 12375668
  misc_feature: MA Experiment ID: 108530 Result: Up-regulated in Transcription
  misc_feature: MA Experiment 108530 PARAMETER Experiment Name: Zm_Imbibed_Seeds_P Parameter: Age (day) Value: 6 vs. 2
  misc_feature: MA Experiment 108530 PARAMETER Experiment Name: Zm_Imbibed_Seeds_P Parameter: Organism Value: Zea mays
  misc_feature: MA Experiment 108530 PARAMETER Experiment Name: Zm_Imbibed_Seeds_P Parameter: Plant Line Value: 35A19
  misc_feature: MA Experiment 108530 PARAMETER Experiment Name: Zm_Imbibed_Seeds_P Parameter: Tissue Value: Aerial vs. Embryo
  misc_feature: MA Experiment ID: 108556 Result: Down-regulated in Transcription
  misc_feature: MA Experiment 108556 PARAMETER Experiment Name: Zm_Drought_P Parameter: Age (day) Value: 9
  misc_feature: MA Experiment 108556 PARAMETER Experiment Name: Zm_Drought_P Parameter: Organism Value: Zea mays
  misc_feature: MA Experiment 108556 PARAMETER Experiment Name: Zm_Drought_P Parameter: Plant Line Value: 35A19
  misc_feature: MA Experiment 108556 PARAMETER Experiment Name: Zm_Drought_P Parameter: Timepoint (hr) Value: 24
  misc_feature: MA Experiment 108556 PARAMETER Experiment Name: Zm_Drought_P Parameter: Tissue Value: Aerial
  misc_feature: MA Experiment 108556 PARAMETER Experiment Name: Zm_Drought_P Parameter: Treatment Value: Drought vs. No Drought
gagaactcacattgcggttgcggacctcagcttgcccactacagagctaaccaaaagagatgaaagggagcctttcccacgagctcgagacggggctcccagccgccgacgtgtgggaggtctacggaggcctccttgttggggacttgattccccagctgcttcctcaagttttctcaaaggttgaactcgtagagggagacggtggagttggaacggttctgctcgtcactctcccgccagggactcctggatcagaggctttcaaagagaagttcgtcaaggtcgatgacgaaaaccgcgtcaaggagtgcctggtaaccgagggaagcttttttgaccgtggcttcaagaaatacctggtgcgaatcgagatcataggagaagatcgggaggcatccaccataagatcaactatcgagtacgaagttgaccaggagcatgcaggcaacccccctgttgccagtagcagtggcttggctactatcgctaaggccatcgcagaatatatcatcaagcagaagaagaaaggtcctcctgagtcctgagtaattaagctcccatgtaatcaactccgggaagaaaggatattatattatatcgtgtatatgtttgatcagtgaacaactgaagttaatttgtgtctaccaatgaacaaatagaatacggtaacgagcgaatggttgccattt

SEQ ID NO: 18878 - protein, 162 aa, Zea mays subsp. mays
  peptide (1)..(162): Ceres Seq. ID no. 12375669
  misc_feature (3)..(152): Pfam Name: Pathogenesis-related protein Bet v I family Pfam Description: Pathogenesis-related protein Bet v I family
  misc_feature (3)..(152): Homolog of NCBI NO: 1168710 NR Description: Major pollen allergen Bet v 1-M/N (Bet v I-M/N)
  misc_feature (3)..(152): Homolog of NCBI NO: 4006961 NR Description: pollen allergen Betv1, isoform at59 [Betula
  misc_feature (3)..(152): Homolog of NCBI NO: 4376221 NR Description: pollen allergen, Betv1 [Betula pendula]
  misc_feature (3)..(152): Homolog of NCBI NO: 1321724 NR Description: major allergen Bet v 1 [Betula pendula]
  misc_feature (3)..(152): Homolog of NCBI NO: 1168708 NR Description: Major pollen allergen Bet v 1-K (Bet v I-K)
  misc_feature (3)..(152): Homolog of NCBI NO: 1168702 NR Description: Major pollen allergen Bet v 1-C (Bet v I-C)
  misc_feature (3)..(152): Homolog of NCBI NO: 1168701 NR Description: Major pollen allergen Bet v 1-B (Bet v I-B)
  misc_feature (3)..(152): Homolog of NCBI NO: 4376219 NR Description: pollen allergen, Betv1 [Betula pendula]
  misc_feature (1)..(155): Homolog of NCBI NO: 38347061 NR Description: OSJNBa0006A01.2 [Oryza sativa (japonica
  misc_feature (1)..(161): Homolog of NCBI NO: 38347062 NR Description: OSJNBa0006A01.3 [Oryza sativa (japonica
MKGSLSHELETGLPAADVWEVYGGLLVGDLIPQLLPQVFSKVELVEGDGGVGTVLLVTLPPGTPGSEAFKEKFVKVDDENRVKECLVTEGSFFDRGFKKYLVRIEIIGEDREASTIRSTIEYEVDQEHAGNPPVASSSGLATIAKAIAEYIIKQKKKGPPES

SEQ ID NO: 18879 - DNA, 1842 bp, Zea mays subsp. mays
  misc_feature (1)..(1842): Ceres Seq. ID no. 12375598
  misc_feature: MA Experiment ID: 20000478 Result: Up-regulated in Transcription
  misc_feature: MA Experiment 20000478 PARAMETER Experiment Name: Zm_5mM_SA_P Parameter: Age (day) Value: 11
  misc_feature: MA Experiment 20000478 PARAMETER Experiment Name: Zm_5mM_SA_P Parameter: Organism Value: Zea mays
  misc_feature: MA Experiment 20000478 PARAMETER Experiment Name: Zm_5mM_SA_P Parameter: Plant Line Value: 35A19
  misc_feature: MA Experiment 20000478 PARAMETER Experiment Name: Zm_5mM_SA_P Parameter: Timepoint (hr) Value: 72
  misc_feature: MA Experiment 20000478 PARAMETER Experiment Name: Zm_5mM_SA_P Parameter: Tissue Value: Aerial
  misc_feature: MA Experiment 20000478 PARAMETER Experiment Name: Zm_5mM_SA_P Parameter: Treatment Value: 5mM SA vs. No Treatment
  misc_feature: MA Experiment ID: 20000479 Result: Up-regulated in Transcription
  misc_feature: MA Experiment 20000479 PARAMETER Experiment Name: Zm_Drought_P Parameter: Age (day) Value: 10
  misc_feature: MA Experiment 20000479 PARAMETER Experiment Name: Zm_Drought_P Parameter: Organism Value: Zea mays
  misc_feature: MA Experiment 20000479 PARAMETER Experiment Name: Zm_Drought_P Parameter: Plant Line Value: 35A19
  misc_feature: MA Experiment 20000479 PARAMETER Experiment Name: Zm_Drought_P Parameter: Timepoint (hr) Value: 48
  misc_feature: MA Experiment 20000479 PARAMETER Experiment Name: Zm_Drought_P Parameter: Tissue Value: Aerial
  misc_feature: MA Experiment 20000479 PARAMETER Experiment Name: Zm_Drought_P Parameter: Treatment Value: Drought vs. No Drought
  misc_feature: MA Experiment ID: 20000480 Result: Up-regulated in Transcription
  misc_feature: MA Experiment 20000480 PARAMETER Experiment Name: Zm_Drought_P Parameter: Age (day) Value: 11
  misc_feature: MA Experiment 20000480 PARAMETER Experiment Name: Zm_Drought_P Parameter: Organism Value: Zea mays
  misc_feature: MA Experiment 20000480 PARAMETER Experiment Name: Zm_Drought_P Parameter: Plant Line Value: 35A19
  misc_feature: MA Experiment 20000480 PARAMETER Experiment Name: Zm_Drought_P Parameter: Timepoint (hr) Value: 72
  misc_feature: MA Experiment 20000480 PARAMETER Experiment Name: Zm_Drought_P Parameter: Tissue Value: Aerial
  misc_feature: MA Experiment 20000480 PARAMETER Experiment Name: Zm_Drought_P Parameter: Treatment Value: Drought vs. No Drought
  misc_feature: MA Experiment ID: 20000488 Result: Down-regulated in Transcription
  misc_feature: MA Experiment 20000488 PARAMETER Experiment Name: Zm_50mM_NH4NO3_L_to_H_P Parameter: Organism Value: Zea mays
  misc_feature: MA Experiment 20000488 PARAMETER Experiment Name: Zm_50mM_NH4NO3_L_to_H_P Parameter: Timepoint (hr) Value: 8
  misc_feature: MA Experiment 20000488 PARAMETER Experiment Name: Zm_50mM_NH4NO3_L_to_H_P Parameter: Tissue Value: Leaves
  misc_feature: MA Experiment 20000488 PARAMETER Experiment Name: Zm_50mM_NH4NO3_L_to_H_P Parameter: Treatment Value: 50mM NH4NO3 vs. 100mM Mannitol
  misc_feature: MA Experiment ID: 20000535 Result: Up-regulated in Transcription
  misc_feature: MA Experiment 20000535 PARAMETER Experiment Name: Zm_Hybrid_Seed_Dev_P Parameter: DAP Value: 30 vs. 12
  misc_feature: MA Experiment 20000535 PARAMETER Experiment Name: Zm_Hybrid_Seed_Dev_P Parameter: Organism Value: Zea mays
  misc_feature: MA Experiment 20000535 PARAMETER Experiment Name: Zm_Hybrid_Seed_Dev_P Parameter: Plant Line Value: 35A19
  misc_feature: MA Experiment 20000535 PARAMETER Experiment Name: Zm_Hybrid_Seed_Dev_P Parameter: Tissue Value: Embryo vs. Unfert Floret
atccacacatgcagctccaagcatcggtacggcactgagcatcggtgaggcaggcgacgcgcgccgcgcgagagaggcgcctcgcctggggagacagggagggtggccgagcccgagatggccgccgcgagggaggaggacgaggcggcacggccgctgcttctgctgccgcggacggcgcaggaggaccagaagtggtggaggcggtgggcgcgcgaggccgggtgggtggggtacctggccctgcccatggtggtggtgaacctgtcgcagtacgccgtccaggtgtcgtccaacatgatggtggggcacctccccggcgtgctcccgctctcctccgccgccatcgccacctccctcgccaacgtctccgggttcagcctcctgatcggaatggcaagtgcactggagacgctatgcggccaggcctacggtgcgaagcagtaccataagctaggcctagacacctacagagcggtcgtcaccctcctggtggtctgcgtccccctctcgctcctctgggtgttcatggacaagatcctggtcctcataggccaggaccctctcatctcgcaaggcgccgggaggtacatggtctggctgatcccggggctcttcgccaacgcggtgatccagccgctcaccaagttcctgcagacgcagagcctcatctacccgctgctgctgtcgtccgcggcgacggcggcggtccacgtccccctgtgctacgtgatggtgttcaagaccgggctcgggtacacgggcgccgccctgaccataagcatatcgtactggctgaacgtggccatgctcgtcggatacatcgccttctccagctcttgcaaggagacgcgcgcgcgcccgacggtcgaggtcttcaggggagtcgacgcgttcctgcgtctcgccctgccttctgcgctcatgatgtgtcttgaatggtggtcgtttgagctccttactctcatgtcagggcttctacccaacccagagctgcagacctcagtgctttcgatctgtctcacgagtgtaacattactcttcactataccttttggccttggagctgctggaagcacgcgagtggcaaatgagctgggcgctgggaaccctgacggagctcgatcagcagtccgcgtggtgctgtccatggcggggatcgacgcggtcgtcgtgagcggaagccttctggcggcccggcgcctcgtgggcatcgcgtacagcagcgaggaggaggtcatatctgcggtcgccgccatggttcctctggtctgcatcaccgccataactgactgcctacaaggaatcctctcaggcgtcgcccgcgggtgcgggtggcagcacctgggcgcgtacgtgaacctcggctcgttctacctgctggggatcccgatggcgatcctcctcggctttgtgctgcgcatggggtcgagggggctctggatgggcatcgtctgcggctccctgtcgcagaccacgctcatgtccgccatcacgttcttcaccgactggaacaagatggctgagaaggctagagagagggtgttcagcgacaagcagccacaagagccggggccatgatttgtacgccgactagcggcagctgcacatttttccagaccggttttgcaggggatcggaaggcgtttgcttgtcattccgtcgcattcacgaggagggagggggtcatgcctccctcctgcaaagtttctcacaaggcaaatgggttcttgctttgaacttcgccttcctacgtttgatttttgtatcatgtaaagtggagaggaacatggaacgaacaaattggacctcatatatgactaacaaggcgaaaatcatctc

SEQ ID NO: 18880 - protein, 487 aa, Zea mays subsp. mays
  peptide (1)..(487): Ceres Seq. ID no. 12375599
  misc_feature (266)..(429): Pfam Name: MatE Pfam Description: MatE
  misc_feature (6)..(476): Homolog of NCBI NO: 18394206 NR Description: expressed protein
  misc_feature (42)..(465): Homolog of NCBI NO: 25518548 NR Description: hypothetical protein F9L1.10 - Arabidopsis
  misc_feature (13)..(480): Homolog of NCBI NO: 30697399 NR Description: MATE efflux protein - related [Arabidopsis
  misc_feature (13)..(480): Homolog of NCBI NO: 13430684 NR Description: putative MATE efflux family protein [Arabidopsis
  misc_feature (42)..(476): Homolog of NCBI NO: 15218068 NR Description: hypothetical protein; protein id: At1g15160.1
  misc_feature (9)..(465): Homolog of NCBI NO: 25511632 NR Description: F9L1.11 protein - Arabidopsis thaliana
  misc_feature (42)..(476): Homolog of NCBI NO: 22329577 NR Description: hypothetical protein
  misc_feature (9)..(476): Homolog of NCBI NO: 15218070 NR Description: hypothetical protein; protein id: At1g15170.1
  misc_feature (8)..(484): Homolog of NCBI NO: 15223961 NR Description: hypothetical protein; protein id: At1g71140.1
  misc_feature (78)..(473): Homolog of NCBI NO: 34911248 NR Description: P0445E10.22 [Oryza sativa (japonica
MAAAREEDEAARPLLLLPRTAQEDQKWWRRWAREAGWVGYLALPMVVVNLSQYAVQVSSNMMVGHLPGVLPLSSAAIATSLANVSGFSLLIGMASALETLCGQAYGAKQYHKLGLDTYRAVVTLLVVCVPLSLLWVFMDKILVLIGQDPLISQGAGRYMVWLIPGLFANAVIQPLTKFLQTQSLIYPLLLSSAATAAVHVPLCYVMVFKTGLGYTGAALTISISYWLNVAMLVGYIAFSSSCKETRARPTVEVFRGVDAFLRLALPSALMMCLEWWSFELLTLMSGLLPNPELQTSVLSICLTSVTLLFTIPFGLGAAGSTRVANELGAGNPDGARSAVRVVLSMAGIDAVVVSGSLLAARRLVGIAYSSEEEVISAVAAMVPLVCITAITDCLQGILSGVARGCGWQHLGAYVNLGSFYLLGIPMAILLGFVLRMGSRGLWMGIVCGSLSQTTLMSAITFFTDWNKMAEKARERVFSDKQPQEPGP

SEQ ID NO: 18881 - protein, 443 aa, Zea mays subsp. mays
  peptide (1)..(443): Ceres Seq. ID no. 12375600
  misc_feature (222)..(385): Pfam Name: MatE Pfam Description: MatE
  misc_feature (1)..(432): Homolog of NCBI NO: 18394206 NR Description: expressed protein
  misc_feature (1)..(421): Homolog of NCBI NO: 25518548 NR Description: hypothetical protein F9L1.10 - Arabidopsis
  misc_feature (1)..(436): Homolog of NCBI NO: 30697399 NR Description: MATE efflux protein - related [Arabidopsis
  misc_feature (1)..(436): Homolog of NCBI NO: 13430684 NR Description: putative MATE efflux family protein [Arabidopsis
  misc_feature (1)..(432): Homolog of NCBI NO: 15218068 NR Description: hypothetical protein; protein id: At1g15160.1
  misc_feature (1)..(421): Homolog of NCBI NO: 25511632 NR Description: F9L1.11 protein - Arabidopsis thaliana
  misc_feature (1)..(432): Homolog of NCBI NO: 22329577 NR Description: hypothetical protein
  misc_feature (1)..(432): Homolog of NCBI NO: 15218070 NR Description: hypothetical protein; protein id: At1g15170.1
  misc_feature (1)..(440): Homolog of NCBI NO: 15223961 NR Description: hypothetical protein; protein id: At1g71140.1
  misc_feature (34)..(429): Homolog of NCBI NO: 34911248 NR Description: P0445E10.22 [Oryza sativa (japonica
MVVVNLSQYAVQVSSNMMVGHLPGVLPLSSAAIATSLANVSGFSLLIGMASALETLCGQAYGAKQYHKLGLDTYRAVVTLLVVCVPLSLLWVFMDKILVLIGQDPLISQGAGRYMVWLIPGLFANAVIQPLTKFLQTQSLIYPLLLSSAATAAVHVPLCYVMVFKTGLGYTGAALTISISYWLNVAMLVGYIAFSSSCKETRARPTVEVFRGVDAFLRLALPSALMMCLEWWSFELLTLMSGLLPNPELQTSVLSICLTSVTLLFTIPFGLGAAGSTRVANELGAGNPDGARSAVRVVLSMAGIDAVVVSGSLLAARRLVGIAYSSEEEVISAVAAMVPLVCITAITDCLQGILSGVARGCGWQHLGAYVNLGSFYLLGIPMAILLGFVLRMGSRGLWMGIVCGSLSQTTLMSAITFFTDWNKMAEKARERVFSDKQPQEPGP

SEQ ID NO: 18882 - protein, 427 aa, Zea mays subsp. mays
  peptide (1)..(427): Ceres Seq. ID no. 12375601
  misc_feature (206)..(369): Pfam Name: MatE Pfam Description: MatE
  misc_feature (1)..(416): Homolog of NCBI NO: 18394206 NR Description: expressed protein
  misc_feature (1)..(405): Homolog of NCBI NO: 25518548 NR Description: hypothetical protein F9L1.10 - Arabidopsis
  misc_feature (1)..(420): Homolog of NCBI NO: 30697399 NR Description: MATE efflux protein - related [Arabidopsis
  misc_feature (1)..(420): Homolog of NCBI NO: 13430684 NR Description: putative MATE efflux family protein [Arabidopsis
  misc_feature (1)..(416): Homolog of NCBI NO: 15218068 NR Description: hypothetical protein; protein id: At1g15160.1
  misc_feature (1)..(405): Homolog of NCBI NO: 25511632 NR Description: F9L1.11 protein - Arabidopsis thaliana
  misc_feature (1)..(416): Homolog of NCBI NO: 22329577 NR Description: hypothetical protein
  misc_feature (1)..(416): Homolog of NCBI NO: 15218070 NR Description: hypothetical protein; protein id: At1g15170.1
  misc_feature (1)..(424): Homolog of NCBI NO: 15223961 NR Description: hypothetical protein; protein id: At1g71140.1
  misc_feature (18)..(413): Homolog of NCBI NO: 34911248 NR Description: P0445E10.22 [Oryza sativa (japonica
MMVGHLPGVLPLSSAAIATSLANVSGFSLLIGMASALETLCGQAYGAKQYHKLGLDTYRAVVTLLVVCVPLSLLWVFMDKILVLIGQDPLISQGAGRYMVWLIPGLFANAVIQPLTKFLQTQSLIYPLLLSSAATAAVHVPLCYVMVFKTGLGYTGAALTISISYWLNVAMLVGYIAFSSSCKETRARPTVEVFRGVDAFLRLALPSALMMCLEWWSFELLTLMSGLLPNPELQTSVLSICLTSVTLLFTIPFGLGAAGSTRVANELGAGNPDGARSAVRVVLSMAGIDAVVVSGSLLAARRLVGIAYSSEEEVISAVAAMVPLVCITAITDCLQGILSGVARGCGWQHLGAYVNLGSFYLLGIPMAILLGFVLRMGSRGLWMGIVCGSLSQTTLMSAITFFTDWNKMAEKARERVFSDKQPQEPGP

SEQ ID NO: 18883 - DNA, 1102 bp, Zea mays subsp. mays
  misc_feature (1)..(1102): Ceres Seq. ID no. 12435527
  misc_feature: MA Experiment ID: 108522 Result: Up-regulated in Transcription
  misc_feature: MA Experiment 108522 PARAMETER Experiment Name: Zm_42deg_Heat_P Parameter: Age (day) Value: 8
  misc_feature: MA Experiment 108522 PARAMETER Experiment Name: Zm_42deg_Heat_P Parameter: Organism Value: Zea mays
  misc_feature: MA Experiment 108522 PARAMETER Experiment Name: Zm_42deg_Heat_P Parameter: Plant Line Value: 35A19
  misc_feature: MA Experiment 108522 PARAMETER Experiment Name: Zm_42deg_Heat_P Parameter: Temperature (deg C) Value: 42 vs. 22
  misc_feature: MA Experiment 108522 PARAMETER Experiment Name: Zm_42deg_Heat_P Parameter: Timepoint (hr) Value: 1
  misc_feature: MA Experiment 108522 PARAMETER Experiment Name: Zm_42deg_Heat_P Parameter: Tissue Value: Aerial
  misc_feature: MA Experiment ID: 108523 Result: Up-regulated in Transcription
  misc_feature: MA Experiment 108523 PARAMETER Experiment Name: Zm_42deg_Heat_P Parameter: Age (day) Value: 8
  misc_feature: MA Experiment 108523 PARAMETER Experiment Name: Zm_42deg_Heat_P Parameter: Organism Value: Zea mays
  misc_feature: MA Experiment 108523 PARAMETER Experiment Name: Zm_42deg_Heat_P Parameter: Plant Line Value: 35A19
  misc_feature: MA Experiment 108523 PARAMETER Experiment Name: Zm_42deg_Heat_P Parameter: Temperature (deg C) Value: 42 vs. 22
  misc_feature: MA Experiment 108523 PARAMETER Experiment Name: Zm_42deg_Heat_P Parameter: Timepoint (hr) Value: 6
  misc_feature: MA Experiment 108523 PARAMETER Experiment Name: Zm_42deg_Heat_P Parameter: Tissue Value: Aerial
  misc_feature: MA Experiment ID: 108527 Result: Up-regulated in Transcription
  misc_feature: MA Experiment 108527 PARAMETER Experiment Name: Zm_5mM_NO_P Parameter: Age (day) Value: 8
  misc_feature: MA Experiment 108527 PARAMETER Experiment Name: Zm_5mM_NO_P Parameter: Organism Value: Zea mays
  misc_feature: MA Experiment 108527 PARAMETER Experiment Name: Zm_5mM_NO_P Parameter: Plant Line Value: 35A19
  misc_feature: MA Experiment 108527 PARAMETER Experiment Name: Zm_5mM_NO_P Parameter: Timepoint (hr) Value: 6
  misc_feature: MA Experiment 108527 PARAMETER Experiment Name: Zm_5mM_NO_P Parameter: Tissue Value: Aerial
  misc_feature: MA Experiment 108527 PARAMETER Experiment Name: Zm_5mM_NO_P Parameter: Treatment Value: 5mM NO vs. No Treatment
  misc_feature: MA Experiment ID: 108528 Result: Down-regulated in Transcription
  misc_feature: MA Experiment 108528 PARAMETER Experiment Name: Zm_Imbibed_Seeds_P Parameter: Age (day) Value: 5 vs. 2
  misc_feature: MA Experiment 108528 PARAMETER Experiment Name: Zm_Imbibed_Seeds_P Parameter: Organism Value: Zea mays
  misc_feature: MA Experiment 108528 PARAMETER Experiment Name: Zm_Imbibed_Seeds_P Parameter: Plant Line Value: 35A19
  misc_feature: MA Experiment 108528 PARAMETER Experiment Name: Zm_Imbibed_Seeds_P Parameter: Tissue Value: Aerial vs. Embryo
  misc_feature: MA Experiment ID: 108529 Result: Down-regulated in Transcription
  misc_feature: MA Experiment 108529 PARAMETER Experiment Name: Zm_Imbibed_Seeds_P Parameter: Age (day) Value: 5 vs. 2
  misc_feature: MA Experiment 108529 PARAMETER Experiment Name: Zm_Imbibed_Seeds_P Parameter: Organism Value: Zea mays
  misc_feature: MA Experiment 108529 PARAMETER Experiment Name: Zm_Imbibed_Seeds_P Parameter: Plant Line Value: 35A19
  misc_feature: MA Experiment 108529 PARAMETER Experiment Name: Zm_Imbibed_Seeds_P Parameter: Tissue Value: Roots vs. Embryo
  misc_feature: MA Experiment ID: 108530 Result: Down-regulated in Transcription
  misc_feature: MA Experiment 108530 PARAMETER Experiment Name: Zm_Imbibed_Seeds_P Parameter: Age (day) Value: 6 vs. 2
  misc_feature: MA Experiment 108530 PARAMETER Experiment Name: Zm_Imbibed_Seeds_P Parameter: Organism Value: Zea mays
  misc_feature: MA Experiment 108530 PARAMETER Experiment Name: Zm_Imbibed_Seeds_P Parameter: Plant Line Value: 35A19
  misc_feature: MA Experiment 108530 PARAMETER Experiment Name: Zm_Imbibed_Seeds_P Parameter: Tissue Value: Aerial vs. Embryo
  misc_feature: MA Experiment ID: 108544 Result: Up-regulated in Transcription
  misc_feature: MA Experiment ID: 108545 Result: Down-regulated in Transcription
  misc_feature: MA Experiment 108545 PARAMETER Experiment Name: Zm_Imbibed_Seeds_P Parameter: Age (day) Value: 3 vs. 2
  misc_feature: MA Experiment 108545 PARAMETER Experiment Name: Zm_Imbibed_Seeds_P Parameter: Organism Value: Zea mays
  misc_feature: MA Experiment 108545 PARAMETER Experiment Name: Zm_Imbibed_Seeds_P Parameter: Plant Line Value: 35A19
  misc_feature: MA Experiment 108545 PARAMETER Experiment Name: Zm_Imbibed_Seeds_P Parameter: Tissue Value: Aerial vs. Embryo
  misc_feature: MA Experiment ID: 108546 Result: Down-regulated in Transcription
  misc_feature: MA Experiment 108546 PARAMETER Experiment Name: Zm_Imbibed_Seeds_P Parameter: Age (day) Value: 3 vs. 2
  misc_feature: MA Experiment 108546 PARAMETER Experiment Name: Zm_Imbibed_Seeds_P Parameter: Organism Value: Zea mays
  misc_feature: MA Experiment 108546 PARAMETER Experiment Name: Zm_Imbibed_Seeds_P Parameter: Plant Line Value: 35A19
  misc_feature: MA Experiment 108546 PARAMETER Experiment Name: Zm_Imbibed_Seeds_P Parameter: Tissue Value: Roots vs. Embryo
  misc_feature: MA Experiment ID: 108547 Result: Down-regulated in Transcription
  misc_feature: MA Experiment 108547 PARAMETER Experiment Name: Zm_Imbibed_Seeds_P Parameter: Age (day) Value: 4 vs. 2
  misc_feature: MA Experiment 108547 PARAMETER Experiment Name: Zm_Imbibed_Seeds_P Parameter: Organism Value: Zea mays
  misc_feature: MA Experiment 108547 PARAMETER Experiment Name: Zm_Imbibed_Seeds_P Parameter: Plant Line Value: 35A19
  misc_feature: MA Experiment 108547 PARAMETER Experiment Name: Zm_Imbibed_Seeds_P Parameter: Tissue Value: Aerial vs. Embryo
  misc_feature: MA Experiment ID: 20000478 Result: Up-regulated in Transcription
  misc_feature: MA Experiment 20000478 PARAMETER Experiment Name: Zm_5mM_SA_P Parameter: Age (day) Value: 11
  misc_feature: MA Experiment 20000478 PARAMETER Experiment Name: Zm_5mM_SA_P Parameter: Organism Value: Zea mays
  misc_feature: MA Experiment 20000478 PARAMETER Experiment Name: Zm_5mM_SA_P Parameter: Plant Line Value: 35A19
  misc_feature: MA Experiment 20000478 PARAMETER Experiment Name: Zm_5mM_SA_P Parameter: Timepoint (hr) Value: 72
  misc_feature: MA Experiment 20000478 PARAMETER Experiment Name: Zm_5mM_SA_P Parameter: Tissue Value: Aerial
  misc_feature: MA Experiment 20000478 PARAMETER Experiment Name: Zm_5mM_SA_P Parameter: Treatment Value: 5mM SA vs. No Treatment
gcacgagaccattacctagaacatcctaatcgaaaaaatggattattggatggatgaaggtctgggcgggctgggtgtggacgagacgacgctggtgtccgcgctggggcggtggcggcgggagccggagaagcgggcgcagttccggcgcggcttcccgggcttcttctcgtcgagcgccggcgccgggatcgagcggtgcgaggacgagtacctgctgcacctcaaggcggagttcgcgcgcttcaaggacgcggcggtgctgtgggcgatgcacccgtgggagcgcgacgcgcgctgggcgcaccacgtgctgcacaaggcgcacccgccgcacatcctcgtcgaggtcgcctgcacgcgcgccgccgacgacctgctcggcgcccgccgcgcgtaccaggcgctctaccaccgctcgctcgaggaggacgtcgcgtaccgcgtcagggacgccaacgccagtctgctgttggggctggtgagcgcgtaccggtacgagggcgcgcgcgtgaacgaggacctcgccactgaggaagccaaggcgctggccgccgccgttagggccgcgccggcggcggcgaccaagctagtgcagaacgagcaggtggtgcgggtgctggttaccagaagcaagccccatctcggggccaccttcagggtctacatggagctgcacggcaagccgcttgaagaggaactgcccgccgagccgtgcctgcgagaggccgtcaggtgcttggactcgccgcccaagtacttcagcgaggtgatccacagggcgttcagcgacgacgcggacaggtaggccaaggcggcgctcacccgcgtcctcgtgtcccgcgccgacacggacatggaggatatcaaggacgcctacaccaggcagtacgggaccaagctcgccgacgccgtggccaagaacacccacggccactacaaggaagcgctgctcgccatcatcggcaagtgaaaggaacccagggtgtcgtgtggccacatgaataataacacgttctttcaaatgaaacagttaaataagattgtacccatctctgcggaatagataaaagaagagcattctgttgtcatgttatgactg

SEQ ID NO: 18884 - protein, 256 aa, Zea mays subsp. mays
  peptide (1)..(256): Ceres Seq. ID no. 12435528
  misc_feature (82)..(148): Pfam Name: Annexin Pfam Description: Annexin
  misc_feature (11)..(256): Homolog of NCBI NO: 21264397 NR Description: Annexin-like protein RJ4
  misc_feature (11)..(256): Homolog of NCBI NO: 1621539 NR Description: annexin-like protein
  misc_feature (1)..(256): Homolog of NCBI NO: 7441511 NR Description: annexin 2 - upland cotton (fragment)
  misc_feature (11)..(256): Homolog of NCBI NO: 6272285 NR Description: annexin p33 [Zea mays]
  misc_feature (11)..(256): Homolog of NCBI NO: 22326753 NR Description: annexin-like protein; protein id: At5g12380.1
  misc_feature (11)..(256): Homolog of NCBI NO: 7441506 NR Description: annexin P33 - maize
  misc_feature (7)..(256): Homolog of NCBI NO: 33357398 NR Description: Chain A, Annexin Gh1 From Cotton
  misc_feature (7)..(256): Homolog of NCBI NO: 15214410 NR Description: annexin [Gossypium hirsutum]
  misc_feature (7)..(256): Homolog of NCBI NO: 7484723 NR Description: fiber annexin - upland cotton
  misc_feature (1)..(256): Homolog of NCBI NO: 15224946 NR Description: putative annexin
MDYWMDEGLGGLGVDETTLVSALGRWRREPEKRAQFRRGFPGFFSSSAGAGIERCEDEYLLHLKAEFARFKDAAVLWAMHPWERDARWAHHVLHKAHPPHILVEVACTRAADDLLGARRAYQALYHRSLEEDVAYRVRDANASLLLGLVSAYRYEGARVNEDLATEEAKALAAAVRAAPAAATKLVQNEQVVRVLVTRSKPHLGATFRVYMELHGKPLEEELPAEPCLREAVRCLDSPPKYFSEVIHRAFSDDADR

SEQ ID NO: 18885 - protein, 252 aa, Zea mays subsp. mays
  peptide (1)..(252): Ceres Seq. ID no. 12435529
  misc_feature (78)..(144): Pfam Name: Annexin Pfam Description: Annexin
  misc_feature (7)..(252): Homolog of NCBI NO: 21264397 NR Description: Annexin-like protein RJ4
  misc_feature (7)..(252): Homolog of NCBI NO: 1621539 NR Description: annexin-like protein
  misc_feature (1)..(252): Homolog of NCBI NO: 7441511 NR Description: annexin 2 - upland cotton (fragment)
  misc_feature (7)..(252): Homolog of NCBI NO: 6272285 NR Description: annexin p33 [Zea mays]
  misc_feature (7)..(252): Homolog of NCBI NO: 22326753 NR Description: annexin-like protein; protein id: At5g12380.1
  misc_feature (7)..(252): Homolog of NCBI NO: 7441506 NR Description: annexin P33 - maize
  misc_feature (3)..(252): Homolog of NCBI NO: 33357398 NR Description: Chain A, Annexin Gh1 From Cotton
  misc_feature (3)..(252): Homolog of NCBI NO: 15214410 NR Description: annexin [Gossypium hirsutum]
  misc_feature (3)..(252): Homolog of NCBI NO: 7484723 NR Description: fiber annexin - upland cotton
  misc_feature (1)..(252): Homolog of NCBI NO: 15224946 NR Description: putative annexin
MDEGLGGLGVDETTLVSALGRWRREPEKRAQFRRGFPGFFSSSAGAGIERCEDEYLLHLKAEFARFKDAAVLWAMHPWERDARWAHHVLHKAHPPHILVEVACTRAADDLLGARRAYQALYHRSLEEDVAYRVRDANASLLLGLVSAYRYEGARVNEDLATEEAKALAAAVRAAPAAATKLVQNEQVVRVLVTRSKPHLGATFRVYMELHGKPLEEELPAEPCLREAVRCLDSPPKYFSEVIHRAFSDDADR

SEQ ID NO: 18886 - protein, 178 aa, Zea mays subsp. mays
  peptide (1)..(178): Ceres Seq. ID no. 12435530
  misc_feature (4)..(70): Pfam Name: Annexin Pfam Description: Annexin
  misc_feature (1)..(178): Homolog of NCBI NO: 21264397 NR Description: Annexin-like protein RJ4
  misc_feature (1)..(178): Homolog of NCBI NO: 1621539 NR Description: annexin-like protein
  misc_feature (1)..(178): Homolog of NCBI NO: 7441511 NR Description: annexin 2 - upland cotton (fragment)
  misc_feature (1)..(178): Homolog of NCBI NO: 6272285 NR Description: annexin p33 [Zea mays]
  misc_feature (1)..(178): Homolog of NCBI NO: 22326753 NR Description: annexin-like protein; protein id: At5g12380.1
  misc_feature (1)..(178): Homolog of NCBI NO: 7441506 NR Description: annexin P33 - maize
  misc_feature (1)..(178): Homolog of NCBI NO: 33357398 NR Description: Chain A, Annexin Gh1 From Cotton
  misc_feature (1)..(178): Homolog of NCBI NO: 15214410 NR Description: annexin [Gossypium hirsutum]
  misc_feature (1)..(178): Homolog of NCBI NO: 7484723 NR Description: fiber annexin - upland cotton
  misc_feature (1)..(178): Homolog of NCBI NO: 15224946 NR Description: putative annexin
MHPWERDARWAHHVLHKAHPPHILVEVACTRAADDLLGARRAYQALYHRSLEEDVAYRVRDANASLLLGLVSAYRYEGARVNEDLATEEAKALAAAVRAAPAAATKLVQNEQVVRVLVTRSKPHLGATFRVYMELHGKPLEEELPAEPCLREAVRCLDSPPKYFSEVIHRAFSDDADR

SEQ ID NO: 18887 - DNA, 1253 bp, Zea mays subsp. mays
  misc_feature (1)..(1253): Ceres Seq. ID no. 12360598
  misc_feature: MA Experiment ID: 108544 Result: Up-regulated in Transcription
  misc_feature: MA Experiment ID: 20000534 Result: Down-regulated in Transcription
  misc_feature: MA Experiment 20000534 PARAMETER Experiment Name: Zm_Hybrid_Pollen_P Parameter: Age (day) Value: 8
  misc_feature: MA Experiment 20000534 PARAMETER Experiment Name: Zm_Hybrid_Pollen_P Parameter: Organism Value: Zea mays
  misc_feature: MA Experiment 20000534 PARAMETER Experiment Name: Zm_Hybrid_Pollen_P Parameter: Plant Line Value: 35A19
  misc_feature: MA Experiment 20000534 PARAMETER Experiment Name: Zm_Hybrid_Pollen_P Parameter: Tissue Value: Pollen vs. Aerial
gcacgagaccattacctagaacatcctaatcgaaaaagaaagctgaaagcctgagcctgactaccgacgagtgacgagccatggagctccgcgagctgggcggtacgggtctccgcgtcagcaccgtcggctttggtgcctccccgcttggcaacgttttcggggacgtgccccgcgacaccgctcgcgccgccgtccgccgcgcgctcgacctcggcatcaacttcttcgatacctcgccgtactacggtggcacgatatcggagtcagtcctcggagattgcctccgccacgcggccgttccgcgggaccgagtcatcgtcgccaccaagtgcggccgctacaaagacgagggtttcgacttctccgccaaccgtgtgacacgcagcatagacgagagcctcgcccgactggggctggactacgtcgacatcctccacgctcatgacatcgagttcacccatctcgaacagattgtgaatgagacaattcccgcactccagaagatcaaggagaatgggaaggcacggttcattggcatcaccgggttgcctctcagcatctacccttatgtcctcgaccgtgtagcaccaggctcggtggacgtgattctatcttattgtcactacgggatcaatgacacctcccttgttgatctgctcccctacttgaagagcaaaggtgttggggttatcagtgcttcgcccctctccatgggtcttttaacagataatgggccaccggagtggcaccctgcaccagaagaacttaagtcagcatgcaaggctgcagcagatcactgtagaaagaaggggaaaagcattacgaagctagctatgcagtacagcttaatgaacaatgaaatctcgacagttcttgttggaatgaactctttggaacaggtggaggagaatgtggcggctgcactggagttgtcaacatcaggcatcgatgatgaacttctgcgtgaagttgaagcaattcttgagcctgtgaagaatctgacatggcctagcggcatccaacaagcctgacggccagaagcagctttgcctaactggagaagctggcatgatgggcgtatcactgctgttcgatgcagtcaattgtacacaccagcatcattggctgctgattgcaaaatttgcaatgcccgtatggtcattgatggaaggggactgttgggctttgtggtaatttagacatgtcgaataaacgcgcaacgcgagcaatgaaagatcgatgctgaaccg

SEQ ID NO: 18888 - protein, 317 aa, Zea mays subsp. mays
  peptide (1)..(317): Ceres Seq. ID no. 12360599
  misc_feature (1)..(317): Homolog of NCBI NO: 17553316 NR Description: Aldo keto reductase family [Caenorhabditis
  misc_feature (1)..(312): Homolog of NCBI NO: 24646159 NR Description: CG3397-PA [Drosophila melanogaster]
  misc_feature (1)..(317): Homolog of NCBI NO: 39594041 NR Description: Hypothetical protein CBG16615 [Caenorhabditis
  misc_feature (1)..(310): Homolog of NCBI NO: 24646155 NR Description: CG18547-PA [Drosophila melanogaster]
  misc_feature (1)..(315): Homolog of NCBI NO: 31201147 NR Description: ENSANGP00000008370 [Anopheles gambiae]
  misc_feature (1)..(316): Homolog of NCBI NO: 32470782 NR Description: putative oxidoreductase-possibly Aldo/keto
  misc_feature (1)..(310): Homolog of NCBI NO: 29349022 NR Description: putative oxidoreductase [Bacteroides
  misc_feature (1)..(316): Homolog of NCBI NO: 27728731 NR Description: galactose dehydrogenase [Actinidia deliciosa]
  misc_feature (1)..(317): Homolog of NCBI NO: 30267886 NR Description: L-galactose dehydrogenase [Malus x domestica]
  misc_feature (1)..(316): Homolog of NCBI NO: 15235040 NR Description: putative protein
MELRELGGTGLRVSTVGFGASPLGNVFGDVPRDTARAAVRRALDLGINFFDTSPYYGGTISESVLGDCLRHAAVPRDRVIVATKCGRYKDEGFDFSANRVTRSIDESLARLGLDYVDILHAHDIEFTHLEQIVNETIPALQKIKENGKARFIGITGLPLSIYPYVLDRVAPGSVDVILSYCHYGINDTSLVDLLPYLKSKGVGVISASPLSMGLLTDNGPPEWHPAPEELKSACKAAADHCRKKGKSITKLAMQYSLMNNEISTVLVGMNSLEQVEENVAAALELSTSGIDDELLREVEAILEPVKNLTWPSGIQQA

SEQ ID NO: 18889 - DNA, 443 bp, Zea mays subsp. mays
  misc_feature (1)..(443): Ceres Seq. ID no. 5760569
  misc_feature: MA Experiment ID: 108530 Result: Down-regulated in Transcription
  misc_feature: MA Experiment 108530 PARAMETER Experiment Name: Zm_Imbibed_Seeds_P Parameter: Age (day) Value: 6 vs. 2
  misc_feature: MA Experiment 108530 PARAMETER Experiment Name: Zm_Imbibed_Seeds_P Parameter: Organism Value: Zea mays
  misc_feature: MA Experiment 108530 PARAMETER Experiment Name: Zm_Imbibed_Seeds_P Parameter: Plant Line Value: 35A19
  misc_feature: MA Experiment 108530 PARAMETER Experiment Name: Zm_Imbibed_Seeds_P Parameter: Tissue Value: Aerial vs. Embryo
  misc_feature: MA Experiment ID: 108535 Result: Up-regulated in Transcription
  misc_feature: MA Experiment 108535 PARAMETER Experiment Name: Zm_Meristem_P Parameter: Age (day) Value: 8
  misc_feature: MA Experiment 108535 PARAMETER Experiment Name: Zm_Meristem_P Parameter: Organism Value: Zea mays
  misc_feature: MA Experiment 108535 PARAMETER Experiment Name: Zm_Meristem_P Parameter: Plant Line Value: 35A19
  misc_feature: MA Experiment 108535 PARAMETER Experiment Name: Zm_Meristem_P Parameter: Tissue Value: Root Meristem vs. Above Root Meristem
  misc_feature: MA Experiment ID: 20000108 Result: Up-regulated in Transcription
  misc_feature: MA Experiment 20000108 PARAMETER Experiment Name: Zm_Root-Tips_P Parameter: Age (day) Value: 12
  misc_feature: MA Experiment 20000108 PARAMETER Experiment Name: Zm_Root-Tips_P Parameter: Organism Value: Zea mays
  misc_feature: MA Experiment 20000108 PARAMETER Experiment Name: Zm_Root-Tips_P Parameter: Tissue Value: Root tips vs. Root mid region    35
  misc_feature: MA Experiment 20000108 PARAMETER Experiment Name: Zm_Root-Tips_P Parameter: Tissue Value: Root tips vs. Root mid region   Sequence Listing-Misc Features (4)
  misc_feature: MA Experiment ID: 20000478 Result: Down-regulated in Transcription
  misc_feature: MA Experiment 20000478 PARAMETER Experiment Name: Zm_5mM_SA_P Parameter: Age (day) Value: 11
  misc_feature: MA Experiment 20000478 PARAMETER Experiment Name: Zm_5mM_SA_P Parameter: Organism Value: Zea mays
  misc_feature: MA Experiment 20000478 PARAMETER Experiment Name: Zm_5mM_SA_P Parameter: Plant Line Value: 35A19
  misc_feature: MA Experiment 20000478 PARAMETER Experiment Name: Zm_5mM_SA_P Parameter: Timepoint (hr) Value: 72
  misc_feature: MA Experiment 20000478 PARAMETER Experiment Name: Zm_5mM_SA_P Parameter: Tissue Value: Aerial
  misc_feature: MA Experiment 20000478 PARAMETER Experiment Name: Zm_5mM_SA_P Parameter: Treatment Value: 5mM SA vs. No Treatment
  misc_feature: MA Experiment ID: 20000479 Result: Down-regulated in Transcription
  misc_feature: MA Experiment 20000479 PARAMETER Experiment Name: Zm_Drought_P Parameter: Age (day) Value: 10
  misc_feature: MA Experiment 20000479 PARAMETER Experiment Name: Zm_Drought_P Parameter: Organism Value: Zea mays
  misc_feature: MA Experiment 20000479 PARAMETER Experiment Name: Zm_Drought_P Parameter: Plant Line Value: 35A19
  misc_feature: MA Experiment 20000479 PARAMETER Experiment Name: Zm_Drought_P Parameter: Timepoint (hr) Value: 48
  misc_feature: MA Experiment 20000479 PARAMETER Experiment Name: Zm_Drought_P Parameter: Tissue Value: Aerial
  misc_feature: MA Experiment 20000479 PARAMETER Experiment Name: Zm_Drought_P Parameter: Treatment Value: Drought vs. No Drought
  misc_feature: MA Experiment ID: 20000488 Result: Up-regulated in Transcription
  misc_feature: MA Experiment 20000488 PARAMETER Experiment Name: Zm_50mM_NH4NO3_L_to_H_P Parameter: Organism Value: Zea mays
  misc_feature: MA Experiment 20000488 PARAMETER Experiment Name: Zm_50mM_NH4NO3_L_to_H_P Parameter: Timepoint (hr) Value: 8
  misc_feature: MA Experiment 20000488 PARAMETER Experiment Name: Zm_50mM_NH4NO3_L_to_H_P Parameter: Tissue Value: Leaves
  misc_feature: MA Experiment 20000488 PARAMETER Experiment Name: Zm_50mM_NH4NO3_L_to_H_P Parameter: Treatment Value: 50mM NH4NO3 vs. 100mM Mannitol
agcgacccaggcgtcacggcgtgatgcagttcctccgaggcagcggcggcggggcggtgggttcccgggggttgcgtgggaggtgttgcggcgnmactdmtctaagaagcggtccgtggacgtgaggcggatcaaccccaaggtgcccaaggaggaggccgtcgccatttccggccgactcctccagatcctctccgaccatgggcccctcaccgtcggcaacacctggaaccacgccaaggatgctggcatcgctggcctgaacagcaagacgcacatgaagatcctgctgaaatggatgacggggagaaatgtcgtgaagctgacctgcgtgcacgtgggcaacgcgaagaagttcctctactccccgtccactgaaagcagcagcagcagcgccggcgcatcaccgtcatccacatcggcctcgcagtgacagtcagtcg

SEQ ID NO: 18890 - protein, 143 aa, Zea mays subsp. mays
  peptide (1)..(143): Ceres Seq. ID no. 5760570
  misc_feature (31)..(122): Homolog of NCBI NO: 38637563 NR Description: unknown protein [Oryza sativa (japonica
  misc_feature (28)..(131): Homolog of NCBI NO: 21594042 NR Description: unknown [Arabidopsis thaliana]
  misc_feature (28)..(131): Homolog of NCBI NO: 15239880 NR Description: putative protein
  misc_feature (28)..(136): Homolog of NCBI NO: 18410491 NR Description: expressed protein
  misc_feature (18)..(143): Homolog of NCBI NO: 27573361 NR Description: unknown protein [Oryza sativa (japonica
  misc_feature (31)..(31): Xaa is any aa, unknown or other
  misc_feature (32)..(32): Xaa is any aa, unknown or other
  misc_feature (33)..(33): Xaa is any aa, unknown or other
ATQASRRDAVPPRQRRRGGGFPGVAWEVLRXXXSKKRSVDVRRINPKVPKEEAVAISGRLLQILSDHGPLTVGNTWNHAKDAGIAGLNSKTHMKILLKWMTGRNVVKLTCVHVGNAKKFLYSPSTESSSSSAGASPSSTSASQ

SEQ ID NO: 18891 - DNA, 1657 bp, Zea mays subsp. mays; identical to SEQ ID NO: 7414
  misc_feature (1)..(1657): Ceres Seq. ID no. 12548275
  misc_feature: MA Experiment ID: 108527 Result: Down-regulated in Transcription
  misc_feature: MA Experiment 108527 PARAMETER Experiment Name: Zm_5mM_NO_P Parameter: Age (day) Value: 8
  misc_feature: MA Experiment 108527 PARAMETER Experiment Name: Zm_5mM_NO_P Parameter: Organism Value: Zea mays
  misc_feature: MA Experiment 108527 PARAMETER Experiment Name: Zm_5mM_NO_P Parameter: Plant Line Value: 35A19
  misc_feature: MA Experiment 108527 PARAMETER Experiment Name: Zm_5mM_NO_P Parameter: Timepoint (hr) Value: 6
  misc_feature: MA Experiment 108527 PARAMETER Experiment Name: Zm_5mM_NO_P Parameter: Tissue Value: Aerial
  misc_feature: MA Experiment 108527 PARAMETER Experiment Name: Zm_5mM_NO_P Parameter: Treatment Value: 5mM NO vs. No Treatment
  misc_feature: MA Experiment ID: 108528 Result: Up-regulated in Transcription
  misc_feature: MA Experiment 108528 PARAMETER Experiment Name: Zm_Imbibed_Seeds_P Parameter: Age (day) Value: 5 vs. 2
  misc_feature: MA Experiment 108528 PARAMETER Experiment Name: Zm_Imbibed_Seeds_P Parameter: Organism Value: Zea mays
  misc_feature: MA Experiment 108528 PARAMETER Experiment Name: Zm_Imbibed_Seeds_P Parameter: Plant Line Value: 35A19
  misc_feature: MA Experiment 108528 PARAMETER Experiment Name: Zm_Imbibed_Seeds_P Parameter: Tissue Value: Aerial vs. Embryo
  misc_feature: MA Experiment ID: 108529 Result: Down-regulated in Transcription
  misc_feature: MA Experiment 108529 PARAMETER Experiment Name: Zm_Imbibed_Seeds_P Parameter: Age (day) Value: 5 vs. 2
  misc_feature: MA Experiment 108529 PARAMETER Experiment Name: Zm_Imbibed_Seeds_P Parameter: Organism Value: Zea mays
  misc_feature: MA Experiment 108529 PARAMETER Experiment Name: Zm_Imbibed_Seeds_P Parameter: Plant Line Value: 35A19
  misc_feature: MA Experiment 108529 PARAMETER Experiment Name: Zm_Imbibed_Seeds_P Parameter: Tissue Value: Roots vs. Embryo
  misc_feature: MA Experiment ID: 108530 Result: Up-regulated in Transcription
  misc_feature: MA Experiment 108530 PARAMETER Experiment Name: Zm_Imbibed_Seeds_P Parameter: Age (day) Value: 6 vs. 2
  misc_feature: MA Experiment 108530 PARAMETER Experiment Name: Zm_Imbibed_Seeds_P Parameter: Organism Value: Zea mays
  misc_feature: MA Experiment 108530 PARAMETER Experiment Name: Zm_Imbibed_Seeds_P Parameter: Plant Line Value: 35A19
  misc_feature: MA Experiment 108530 PARAMETER Experiment Name: Zm_Imbibed_Seeds_P Parameter: Tissue Value: Aerial vs. Embryo
  misc_feature: MA Experiment ID: 108536 Result: Down-regulated in Transcription
  misc_feature: MA Experiment 108536 PARAMETER Experiment Name: Zm_Meristem_P Parameter: Age (day) Value: 8
  misc_feature: MA Experiment 108536 PARAMETER Experiment Name: Zm_Meristem_P Parameter: Organism Value: Zea mays
  misc_feature: MA Experiment 108536 PARAMETER Experiment Name: Zm_Meristem_P Parameter: Plant Line Value: 35A19
  misc_feature: MA Experiment 108536 PARAMETER Experiment Name: Zm_Meristem_P Parameter: Tissue Value: Shoot Meristem vs. Above Shoot Meristem
  misc_feature: MA Experiment ID: 108544 Result: Down-regulated in Transcription
  misc_feature: MA Experiment ID: 108545 Result: Up-regulated in Transcription
  misc_feature: MA Experiment 108545 PARAMETER Experiment Name: Zm_Imbibed_Seeds_P Parameter: Age (day) Value: 3 vs. 2
  misc_feature: MA Experiment 108545 PARAMETER Experiment Name: Zm_Imbibed_Seeds_P Parameter: Organism Value: Zea mays
  misc_feature: MA Experiment 108545 PARAMETER Experiment Name: Zm_Imbibed_Seeds_P Parameter: Plant Line Value: 35A19
  misc_feature: MA Experiment 108545 PARAMETER Experiment Name: Zm_Imbibed_Seeds_P Parameter: Tissue Value: Aerial vs. Embryo
  misc_feature: MA Experiment ID: 108546 Result: Down-regulated in Transcription
  misc_feature: MA Experiment 108546 PARAMETER Experiment Name: Zm_Imbibed_Seeds_P Parameter: Age (day) Value: 3 vs. 2
  misc_feature: MA Experiment 108546 PARAMETER Experiment Name: Zm_Imbibed_Seeds_P Parameter: Organism Value: Zea mays
  misc_feature: MA Experiment 108546 PARAMETER Experiment Name: Zm_Imbibed_Seeds_P Parameter: Plant Line Value: 35A19
  misc_feature: MA Experiment 108546 PARAMETER Experiment Name: Zm_Imbibed_Seeds_P Parameter: Tissue Value: Roots vs. Embryo
  misc_feature: MA Experiment ID: 108547 Result: Up-regulated in Transcription
  misc_feature: MA Experiment 108547 PARAMETER Experiment Name: Zm_Imbibed_Seeds_P Parameter: Age (day) Value: 4 vs. 2
  misc_feature: MA Experiment 108547 PARAMETER Experiment Name: Zm_Imbibed_Seeds_P Parameter: Organism Value: Zea mays
  misc_feature: MA Experiment 108547 PARAMETER Experiment Name: Zm_Imbibed_Seeds_P Parameter: Plant Line Value: 35A19
  misc_feature: MA Experiment 108547 PARAMETER Experiment Name: Zm_Imbibed_Seeds_P Parameter: Tissue Value: Aerial vs. Embryo
  misc_feature: MA Experiment ID: 108559 Result: Down-regulated in Transcription
  misc_feature: MA Experiment 108559 PARAMETER Experiment Name: Zm_5mM_NO_P Parameter: Age (day) Value: 8
  misc_feature: MA Experiment 108559 PARAMETER Experiment Name: Zm_5mM_NO_P Parameter: Organism Value: Zea mays
  misc_feature: MA Experiment 108559 PARAMETER Experiment Name: Zm_5mM_NO_P Parameter: Plant Line Value: 35A19
  misc_feature: MA Experiment 108559 PARAMETER Experiment Name: Zm_5mM_NO_P Parameter: Timepoint (hr) Value: 12
  misc_feature: MA Experiment 108559 PARAMETER Experiment Name: Zm_5mM_NO_P Parameter: Tissue Value: Aerial
  misc_feature: MA Experiment 108559 PARAMETER Experiment Name: Zm_5mM_NO_P Parameter: Treatment Value: 5mM NO vs. No Treatment
  misc_feature: MA Experiment ID: 108688 Result: Down-regulated in Transcription
  misc_feature: MA Experiment 108688 PARAMETER Experiment Name: Zm_Embryos-Flowers__P Parameter: Tissue Value: Immature Flowers vs. Aerial+

SEQ ID NO: 18892 - protein, 465 aa, Zea mays subsp. mays; identical to SEQ ID NO: 7415
  peptide (1)..(465): Ceres Seq. ID no. 12548276
  misc_feature (66)..(270): Pfam Name: Elongation factor Tu GTP binding domain Pfam Description: Elongation factor Tu GTP binding domain
  misc_feature (1)..(465): Homolog of NCBI NO: 17225494 NR Description: translational elongation factor Tu [Oryza sativa]
  misc_feature (1)..(465): Homolog of NCBI NO: 6525065 NR Description: chloroplast translational elongation factor Tu
  misc_feature (1)..(465): Homolog of NCBI NO: 459241 NR Description: chloroplast elongation factor TuB(EF-TuB)
  misc_feature (3)..(465): Homolog of NCBI NO: 12830555 NR Description: chloroplast translational elongation factor Tu

SEQ ID NO: 18893 - protein, 376 aa, Zea mays subsp. mays; identical to SEQ ID NO: 7416
  peptide (1)..(376): Ceres Seq. ID no. 12548277
  misc_feature (1)..(181): Pfam Name: Elongation factor Tu GTP binding domain Pfam Description: Elongation factor Tu GTP binding domain
  misc_feature (1)..(376): Homolog of NCBI NO: 17225494 NR Description: translational elongation factor Tu [Oryza sativa]
  misc_feature (1)..(376): Homolog of NCBI NO: 6525065 NR Description: chloroplast translational elongation factor Tu
  misc_feature (1)..(376): Homolog of NCBI NO: 459241 NR Description: chloroplast elongation factor TuB(EF-TuB)
  misc_feature (1)..(376): Homolog of NCBI NO: 12830555 NR Description: chloroplast translational elongation factor Tu

SEQ ID NO: 18894 - protein, 318 aa, Zea mays subsp. mays; identical to SEQ ID NO: 7417
  peptide (1)..(318): Ceres Seq. ID no. 12548278
  misc_feature (1)..(123): Pfam Name: Elongation factor Tu GTP binding domain Pfam Description: Elongation factor Tu GTP binding domain
  misc_feature (1)..(318): Homolog of NCBI NO: 17225494 NR Description: translational elongation factor Tu [Oryza sativa]
  misc_feature (1)..(318): Homolog of NCBI NO: 6525065 NR Description: chloroplast translational elongation factor Tu
  misc_feature (1)..(318): Homolog of NCBI NO: 459241 NR Description: chloroplast elongation factor TuB(EF-TuB)
  misc_feature (1)..(318): Homolog of NCBI NO: 12830555 NR Description: chloroplast translational elongation factor Tu

SEQ ID NO: 18895 - DNA, 1540 bp, Zea mays subsp. mays
  misc_feature (1)..(1540): Ceres Seq. ID no. 12418818
  misc_feature: MA Experiment ID: 108527 Result: Up-regulated in Transcription
  misc_feature: MA Experiment 108527 PARAMETER Experiment Name: Zm_5mM_NO_P Parameter: Age (day) Value: 8
  misc_feature: MA Experiment 108527 PARAMETER Experiment Name: Zm_5mM_NO_P Parameter: Organism Value: Zea mays
  misc_feature: MA Experiment 108527 PARAMETER Experiment Name: Zm_5mM_NO_P Parameter: Plant Line Value: 35A19
  misc_feature: MA Experiment 108527 PARAMETER Experiment Name: Zm_5mM_NO_P Parameter: Timepoint (hr) Value: 6
  misc_feature: MA Experiment 108527 PARAMETER Experiment Name: Zm_5mM_NO_P Parameter: Tissue Value: Aerial
  misc_feature: MA Experiment 108527 PARAMETER Experiment Name: Zm_5mM_NO_P Parameter: Treatment Value: 5mM NO vs. No Treatment
  misc_feature: MA Experiment ID: 108529 Result: Up-regulated in Transcription
  misc_feature: MA Experiment 108529 PARAMETER Experiment Name: Zm_Imbibed_Seeds_P Parameter: Age (day) Value: 5 vs. 2
  misc_feature: MA Experiment 108529 PARAMETER Experiment Name: Zm_Imbibed_Seeds_P Parameter: Organism Value: Zea mays
  misc_feature: MA Experiment 108529 PARAMETER Experiment Name: Zm_Imbibed_Seeds_P Parameter: Plant Line Value: 35A19
  misc_feature: MA Experiment 108529 PARAMETER Experiment Name: Zm_Imbibed_Seeds_P Parameter: Tissue Value: Roots vs. Embryo
  misc_feature: MA Experiment ID: 108535 Result: Down-regulated in Transcription
  misc_feature: MA Experiment 108535 PARAMETER Experiment Name: Zm_Meristem_P Parameter: Age (day) Value: 8
  misc_feature: MA Experiment 108535 PARAMETER Experiment Name: Zm_Meristem_P Parameter: Organism Value: Zea mays
  misc_feature: MA Experiment 108535 PARAMETER Experiment Name: Zm_Meristem_P Parameter: Plant Line Value: 35A19
  misc_feature: MA Experiment 108535 PARAMETER Experiment Name: Zm_Meristem_P Parameter: Tissue Value: Root Meristem vs. Above Root Meristem
  misc_feature: MA Experiment ID: 108546 Result: Up-regulated in Transcription
  misc_feature: MA Experiment 108546 PARAMETER Experiment Name: Zm_Imbibed_Seeds_P Parameter: Age (day) Value: 3 vs. 2
  misc_feature: MA Experiment 108546 PARAMETER Experiment Name: Zm_Imbibed_Seeds_P Parameter: Organism Value: Zea mays
  misc_feature: MA Experiment 108546 PARAMETER Experiment Name: Zm_Imbibed_Seeds_P Parameter: Plant Line Value: 35A19
  misc_feature: MA Experiment 108546 PARAMETER Experiment Name: Zm_Imbibed_Seeds_P Parameter: Tissue Value: Roots vs. Embryo
  misc_feature: MA Experiment ID: 108559 Result: Up-regulated in Transcription
  misc_feature: MA Experiment 108559 PARAMETER Experiment Name: Zm_5mM_NO_P Parameter: Age (day) Value: 8
  misc_feature: MA Experiment 108559 PARAMETER Experiment Name: Zm_5mM_NO_P Parameter: Organism Value: Zea mays
  misc_feature: MA Experiment 108559 PARAMETER Experiment Name: Zm_5mM_NO_P Parameter: Plant Line Value: 35A19
  misc_feature: MA Experiment 108559 PARAMETER Experiment Name: Zm_5mM_NO_P Parameter: Timepoint (hr) Value: 12
  misc_feature: MA Experiment 108559 PARAMETER Experiment Name: Zm_5mM_NO_P Parameter: Tissue Value: Aerial
  misc_feature: MA Experiment 108559 PARAMETER Experiment Name: Zm_5mM_NO_P Parameter: Treatment Value: 5mM NO vs. No Treatment
  misc_feature: MA Experiment ID: 20000477 Result: Up-regulated in Transcription
  misc_feature: MA Experiment 20000477 PARAMETER Experiment Name: Zm_5mM_SA_P Parameter: Age (day) Value: 10
  misc_feature: MA Experiment 20000477 PARAMETER Experiment Name: Zm_5mM_SA_P Parameter: Organism Value: Zea mays
  misc_feature: MA Experiment 20000477 PARAMETER Experiment Name: Zm_5mM_SA_P Parameter: Plant Line Value: 35A19
  misc_feature: MA Experiment 20000477 PARAMETER Experiment Name: Zm_5mM_SA_P Parameter: Timepoint (hr) Value: 48
  misc_feature: MA Experiment 20000477 PARAMETER Experiment Name: Zm_5mM_SA_P Parameter: Tissue Value: Aerial
  misc_feature: MA Experiment 20000477 PARAMETER Experiment Name: Zm_5mM_SA_P Parameter: Treatment Value: 5mM SA vs. No Treatment
  misc_feature: MA Experiment ID: 20000627 Result: Up-regulated in Transcription
  misc_feature: MA Experiment 20000627 PARAMETER Experiment Name: Zm_Herbicide-Treatments_P Parameter: Timepoint (hr) Value: 12
  misc_feature: MA Experiment 20000627 PARAMETER Experiment Name: Zm_Herbicide-Treatments_P Parameter: Tissue Value: Aerial
  misc_feature: MA Experiment 20000627 PARAMETER Experiment Name: Zm_Herbicide-Treatments_P Parameter: Treatment Value: Finale vs. No Treatment
gcacgagaccattacctagaacatcctaatcgaaaactttttcgaccaaccttcgtctccagactcgtccaccctataaattgtctcgccagatcattccaatccggcaactcctgctctgcctgagcctgagcgtaggcggctaccagagagaagggtaggcggcgccggcggcgggagcaatacaagagcggtaaatccaagagagatcagagcctcggagggaaacagaagcgcacagagcatggagagcccgatctcgaggactaacctgaattgcatcagcctggcggacccgaacgtccagaaatcagtggcgctcctcaagcaggcatgcctggattcaggcttcttctatgttgtggatcatgggataagccaagagttcatggatgaagtttttgcccagagcaagaagttctttgaccttcctcatagtgagaaaatgaagcttctccgagacgagaagaatagagggtacacacccatgctagatgaaattcttgatcctgaaaatcaagttaatggtgactacaaggaaggatattatattggagttgaggtacctgcagatgatccagaagcaaacaggccattttatggtccaaatcagtggccttctaaagaagtactaccaaaatggagagaagtgatggagcaatatcacagggaggcattgatagtagcaaaatcagtcgcaaggatcatcgctcttgctctagatctagacgtggacttcttcgatagacctgaaatgcttggcgagtccatagccacgctaaggctcctgcactacgaaggtggacaagaaacaggtaaggtgtcagatcctgcaaagggtgtttacggagcgggcgcccattcagactacggcctgataactctcctggcaaccgatgatgtagttgggctccaaatatgcaaggacaagaacgctcagcctcaactgtgggaatacgtagctccgttgaaaggcggatttatcgtcaaccttggcgacatgctcgaaaggtggagtaacggcgttttcaggtcaaccttacatcgagtggtcctagatgggcgagaacgctactcgatagcctacttcgtggaaccaagccacgactgcgtggtggagtgcctgccgacctgcaagtccgaatcaaatcctccaaagttccctccgatcacctgctccgcgtacctgtcccagcgctacaaggacactcacgcggatctgaaatcctacgacgacagcaaggcctgatcagaggactgccctctcctctctctgtctcagcgatcagtacgtacgacgtgtatcctgcaataacactgggtggagggcggcagtaccagtgtaccacagtatcagtataggtatagagagttctgttggtgccaccgtgccaccgtccatgtgttcatgtaagatgacgagaagaatcaagaacgggggccggcgttgaggtccccggccttaatctaggccttgttgttgctgtcgtgttgtgaggttcaatccccgagcttatcctttggtgctgttgagaggtcc

SEQ ID NO: 18896 - protein, 334 aa, Zea mays subsp. mays
  peptide (1)..(334): Ceres Seq. ID no. 12418819
  misc_feature (176)..(285): Pfam Name: 2OG-Fe(II) oxygenase superfamily Pfam Description: 2OG-Fe(II) oxygenase superfamily
  misc_feature (1)..(323): Homolog of NCBI NO: 37536200 NR Description: putative gibberellin 20-oxidase
  misc_feature (10)..(324): Homolog of NCBI NO: 7594580 NR Description: hypothetical protein [Arabidopsis thaliana]
  misc_feature (1)..(126): Homolog of NCBI NO: 15231443 NR Description: putative protein; protein id: At3g46500.1
  misc_feature (141)..(305): Homolog of NCBI NO: 15231443 NR Description: putative protein; protein id: At3g46500.1
  misc_feature (1)..(94): Homolog of NCBI NO: 15231441 NR Description: putative protein; protein id: At3g46480.1
  misc_feature (129)..(329): Homolog of NCBI NO: 15231441 NR Description: putative protein; protein id: At3g46480.1
  misc_feature (1)..(305): Homolog of NCBI NO: 15231442 NR Description: putative protein; protein id: At3g46490.1
  misc_feature (30)..(94): Homolog of NCBI NO: 34906368 NR Description: unnamed protein product [Oryza sativa (japonica
  misc_feature (128)..(334): Homolog of NCBI NO: 34906368 NR Description: unnamed protein product [Oryza sativa (japonica
  misc_feature (8)..(329): Homolog of NCBI NO: 15219523 NR Description: hyoscyamine 6-dioxygenase hydroxylase, putative
MESPISRTNLNCISLADPNVQKSVALLKQACLDSGFFYVVDHGISQEFMDEVFAQSKKFFDLPHSEKMKLLRDEKNRGYTPMLDEILDPENQVNGDYKEGYYIGVEVPADDPEANRPFYGPNQWPSKEVLPKWREVMEQYHREALIVAKSVARIIALALDLDVDFFDRPEMLGESIATLRLLHYEGGQETGKVSDPAKGVYGAGAHSDYGLITLLATDDVVGLQICKDKNAQPQLWEYVAPLKGGFIVNLGDMLERWSNGVFRSTLHRVVLDGRERYSIAYFVEPSHDCVVECLPTCKSESNPPKFPPITCSAYLSQRYKDTHADLKSYDDSKA

SEQ ID NO: 18897 - protein, 286 aa, Zea mays subsp. mays
  peptide (1)..(286): Ceres Seq. ID no. 12418820
  misc_feature (128)..(237): Pfam Name: 2OG-Fe(II) oxygenase superfamily Pfam Description: 2OG-Fe(II) oxygenase superfamily
  misc_feature (1)..(275): Homolog of NCBI NO: 37536200 NR Description: putative gibberellin 20-oxidase
  misc_feature (1)..(276): Homolog of NCBI NO: 7594580 NR Description: hypothetical protein [Arabidopsis thaliana]
  misc_feature (1)..(78): Homolog of NCBI NO: 15231443 NR Description: putative protein; protein id: At3g46500.1
  misc_feature (93)..(257): Homolog of NCBI NO: 15231443 NR Description: putative protein; protein id: At3g46500.1
  misc_feature (1)..(46): Homolog of NCBI NO: 15231441 NR Description: putative protein; protein id: At3g46480.1
  misc_feature (81)..(281): Homolog of NCBI NO: 15231441 NR Description: putative protein; protein id: At3g46480.1
  misc_feature (1)..(257): Homolog of NCBI NO: 15231442 NR Description: putative protein; protein id: At3g46490.1
  misc_feature (1)..(46): Homolog of NCBI NO: 34906368 NR Description: unnamed protein product [Oryza sativa (japonica
  misc_feature (80)..(286): Homolog of NCBI NO: 34906368 NR Description: unnamed protein product [Oryza sativa (japonica
  misc_feature (1)..(281): Homolog of NCBI NO: 15219523 NR Description: hyoscyamine 6-dioxygenase hydroxylase, putative
MDEVFAQSKKFFDLPHSEKMKLLRDEKNRGYTPMLDEILDPENQVNGDYKEGYYIGVEVPADDPEANRPFYGPNQWPSKEVLPKWREVMEQYHREALIVAKSVARIIALALDLDVDFFDRPEMLGESIATLRLLHYEGGQETGKVSDPAKGVYGAGAHSDYGLITLLATDDVVGLQICKDKNAQPQLWEYVAPLKGGFIVNLGDMLERWSNGVFRSTLHRVVLDGRERYSIAYFVEPSHDCVVECLPTCKSESNPPKFPPITCSAYLSQRYKDTHADLKSYDDSKA

SEQ ID NO: 18898 - protein, 267 aa, Zea mays subsp. mays
  peptide (1)..(267): Ceres Seq. ID no. 12418821
  misc_feature (109)..(218): Pfam Name: 2OG-Fe(II) oxygenase superfamily Pfam Description: 2OG-Fe(II) oxygenase superfamily
  misc_feature (1)..(256): Homolog of NCBI NO: 37536200 NR Description: putative gibberellin 20-oxidase
  misc_feature (1)..(257): Homolog of NCBI NO: 7594580 NR Description: hypothetical protein [Arabidopsis thaliana]
  misc_feature (1)..(59): Homolog of NCBI NO: 15231443 NR Description: putative protein; protein id: At3g46500.1
  misc_feature (74)..(238): Homolog of NCBI NO: 15231443 NR Description: putative protein; protein id: At3g46500.1
  misc_feature (1)..(27): Homolog of NCBI NO: 15231441 NR Description: putative protein; protein id: At3g46480.1
  misc_feature (62)..(262): Homolog of NCBI NO: 15231441 NR Description: putative protein; protein id: At3g46480.1
  misc_feature (1)..(238): Homolog of NCBI NO: 15231442 NR Description: putative protein; protein id: At3g46490.1
  misc_feature (1)..(27): Homolog of NCBI NO: 34906368 NR Description: unnamed protein product [Oryza sativa (japonica
  misc_feature (61)..(267): Homolog of NCBI NO: 34906368 NR Description: unnamed protein product [Oryza sativa (japonica
  misc_feature (1)..(262): Homolog of NCBI NO: 15219523 NR Description: hyoscyamine 6-dioxygenase hydroxylase, putative
MKLLRDEKNRGYTPMLDEILDPENQVNGDYKEGYYIGVEVPADDPEANRPFYGPNQWPSKEVLPKWREVMEQYHREALIVAKSVARIIALALDLDVDFFDRPEMLGESIATLRLLHYEGGQETGKVSDPAKGVYGAGAHSDYGLITLLATDDVVGLQICKDKNAQPQLWEYVAPLKGGFIVNLGDMLERWSNGVFRSTLHRVVLDGRERYSIAYFVEPSHDCVVECLPTCKSESNPPKFPPITCSAYLSQRYKDTHADLKSYDDSKA

SEQ ID NO: 18899 - DNA, 1593 bp, Zea mays subsp. mays
  misc_feature (1)..(1593): Ceres Seq. ID no. 12359106
  misc_feature: MA Experiment ID: 108504 Result: Up-regulated in Transcription
  misc_feature: MA Experiment 108504 PARAMETER Experiment Name: Zm_Drought_P Parameter: Age (day) Value: 8
  misc_feature: MA Experiment 108504 PARAMETER Experiment Name: Zm_Drought_P Parameter: Organism Value: Zea mays
  misc_feature: MA Experiment 108504 PARAMETER Experiment Name: Zm_Drought_P Parameter: Plant Line Value: 35A19
  misc_feature: MA Experiment 108504 PARAMETER Experiment Name: Zm_Drought_P Parameter: Timepoint (hr) Value: 12
  misc_feature: MA Experiment 108504 PARAMETER Experiment Name: Zm_Drought_P Parameter: Tissue Value: Aerial
  misc_feature: MA Experiment 108504 PARAMETER Experiment Name: Zm_Drought_P Parameter: Treatment Value: Drought vs. No Drought
  misc_feature: MA Experiment ID: 108528 Result: Down-regulated in Transcription
  misc_feature: MA Experiment 108528 PARAMETER Experiment Name: Zm_Imbibed_Seeds_P Parameter: Age (day) Value: 5 vs. 2
  misc_feature: MA Experiment 108528 PARAMETER Experiment Name: Zm_Imbibed_Seeds_P Parameter: Organism Value: Zea mays
  misc_feature: MA Experiment 108528 PARAMETER Experiment Name: Zm_Imbibed_Seeds_P Parameter: Plant Line Value: 35A19
  misc_feature: MA Experiment 108528 PARAMETER Experiment Name: Zm_Imbibed_Seeds_P Parameter: Tissue Value: Aerial vs. Embryo
  misc_feature: MA Experiment ID: 108530 Result: Down-regulated in Transcription
  misc_feature: MA Experiment 108530 PARAMETER Experiment Name: Zm_Imbibed_Seeds_P Parameter: Age (day) Value: 6 vs. 2
  misc_feature: MA Experiment 108530 PARAMETER Experiment Name: Zm_Imbibed_Seeds_P Parameter: Organism Value: Zea mays
  misc_feature: MA Experiment 108530 PARAMETER Experiment Name: Zm_Imbibed_Seeds_P Parameter: Plant Line Value: 35A19
  misc_feature: MA Experiment 108530 PARAMETER Experiment Name: Zm_Imbibed_Seeds_P Parameter: Tissue Value: Aerial vs. Embryo
  misc_feature: MA Experiment ID: 108540 Result: Up-regulated in Transcription
  misc_feature: MA Experiment 108540 PARAMETER Experiment Name: Zm_20percent_PEG_P Parameter: Age (day) Value: 8
  misc_feature: MA Experiment 108540 PARAMETER Experiment Name: Zm_20percent_PEG_P Parameter: Organism Value: Zea mays
  misc_feature: MA Experiment 108540 PARAMETER Experiment Name: Zm_20percent_PEG_P Parameter: Plant Line Value: 35A19
  misc_feature: MA Experiment 108540 PARAMETER Experiment Name: Zm_20percent_PEG_P Parameter: Timepoint (hr) Value: 6
  misc_feature: MA Experiment 108540 PARAMETER Experiment Name: Zm_20percent_PEG_P Parameter: Tissue Value: Aerial
  misc_feature: MA Experiment 108540 PARAMETER Experiment Name: Zm_20percent_PEG_P Parameter: Treatment Value: 20percent PEG vs. No Treatment
  misc_feature: MA Experiment ID: 108545 Result: Down-regulated in Transcription
  misc_feature: MA Experiment 108545 PARAMETER Experiment Name: Zm_Imbibed_Seeds_P Parameter: Age (day) Value: 3 vs. 2
  misc_feature: MA Experiment 108545 PARAMETER Experiment Name: Zm_Imbibed_Seeds_P Parameter: Organism Value: Zea mays
  misc_feature: MA Experiment 108545 PARAMETER Experiment Name: Zm_Imbibed_Seeds_P Parameter: Plant Line Value: 35A19
  misc_feature: MA Experiment 108545 PARAMETER Experiment Name: Zm_Imbibed_Seeds_P Parameter: Tissue Value: Aerial vs. Embryo
  misc_feature: MA Experiment ID: 108547 Result: Down-regulated in Transcription
  misc_feature: MA Experiment 108547 PARAMETER Experiment Name: Zm_Imbibed_Seeds_P Parameter: Age (day) Value: 4 vs. 2
  misc_feature: MA Experiment 108547 PARAMETER Experiment Name: Zm_Imbibed_Seeds_P Parameter: Organism Value: Zea mays
  misc_feature: MA Experiment 108547 PARAMETER Experiment Name: Zm_Imbibed_Seeds_P Parameter: Plant Line Value: 35A19
  misc_feature: MA Experiment 108547 PARAMETER Experiment Name: Zm_Imbibed_Seeds_P Parameter: Tissue Value: Aerial vs. Embryo
  misc_feature: MA Experiment ID: 108556 Result: Up-regulated in Transcription
  misc_feature: MA Experiment 108556 PARAMETER Experiment Name: Zm_Drought_P Parameter: Age (day) Value: 9
  misc_feature: MA Experiment 108556 PARAMETER Experiment Name: Zm_Drought_P Parameter: Organism Value: Zea mays
  misc_feature: MA Experiment 108556 PARAMETER Experiment Name: Zm_Drought_P Parameter: Plant Line Value: 35A19
  misc_feature: MA Experiment 108556 PARAMETER Experiment Name: Zm_Drought_P Parameter: Timepoint (hr) Value: 24
  misc_feature: MA Experiment 108556 PARAMETER Experiment Name: Zm_Drought_P Parameter: Tissue Value: Aerial
  misc_feature: MA Experiment 108556 PARAMETER Experiment Name: Zm_Drought_P Parameter: Treatment Value: Drought vs. No Drought
  misc_feature: MA Experiment ID: 20000535 Result: Down-regulated in Transcription
  misc_feature: MA Experiment 20000535 PARAMETER Experiment Name: Zm_Hybrid_Seed_Dev_P Parameter: DAP Value: 30 vs. 12
  misc_feature: MA Experiment 20000535 PARAMETER Experiment Name: Zm_Hybrid_Seed_Dev_P Parameter: Organism Value: Zea mays
  misc_feature: MA Experiment 20000535 PARAMETER Experiment Name: Zm_Hybrid_Seed_Dev_P Parameter: Plant Line Value: 35A19
  misc_feature: MA Experiment 20000535 PARAMETER Experiment Name: Zm_Hybrid_Seed_Dev_P Parameter: Tissue Value: Embryo vs. Unfert Floret
  misc_feature: MA Experiment ID: 20001612 Result: Up-regulated in Transcription
  misc_feature: MA Experiment 20001612 PARAMETER Experiment Name: Zm_50ppm_KNO3_L-to-H_P Parameter: Age (day) Value: 19
  misc_feature: MA Experiment 20001612 PARAMETER Experiment Name: Zm_50ppm_KNO3_L-to-H_P Parameter: Organism Value: Zea mays
  misc_feature: MA Experiment 20001612 PARAMETER Experiment Name: Zm_50ppm_KNO3_L-to-H_P Parameter: Plant Line Value: 35A19
  misc_feature: MA Experiment 20001612 PARAMETER Experiment Name: Zm_50ppm_KNO3_L-to-H_P Parameter: Timepoint (hr) Value: 8
  misc_feature: MA Experiment 20001612 PARAMETER Experiment Name: Zm_50ppm_KNO3_L-to-H_P Parameter: Tissue Value: Roots
  misc_feature: MA Experiment 20001612 PARAMETER Experiment Name: Zm_50ppm_KNO3_L-to-H_P Parameter: Treatment Value: 50ppm KNO3 vs. 50ppm KCl
cttccctccccctccctgctcggtgctcgcacacgctggcgcggcttgcccccacgctgcgctcccaccaccaccactatataatccccgatcgcctcacgcacacgcaccgacccaccggccgacgaggggcgaccgccgcaacacaaatccacacgcccgccgccaccgccgccatacggacccactcctccttgccctggtgcgagcaggcttcggcagcaaaccccgcaggctgctcccggacgagggagaacgcgcggggctgggctagccgctagtcaggggaccgggggcggaggcagcgaggaggtacgtatggacaagtatgaggcggtgcgggacatcgggtcggggaacttcggggtggcgcggctgatgcgcaaccgcgagactcgagagctcgtcgccgtcaagtgcatcgagcgtggccaccggattgacgagaatgtgtacagggagatcatcaaccaccgctcgctgcgccatcccaacattattcgcttcaaggaggtgatacttacaccaacacatcttatgattctgatggagtttgcagcaggtggagagctttttgatcggatctgtgatcgtgggcggtttagtgaggatgaggcccggtatttctttcagcagttgatctgtggagtgagctattgccattacatgcaaatatgccatagagatctgaagctggagaagttctcttggatggcagcccagctccacggcttaagatctgcgattttggctattccaagtcatcagtgttgcattcaagacccaaatcagcagtaggaacgccagcatatattgcacctgaggtgctatcccgtcgcgagtatgatggaaagcttgcagacgtatggtcctgtggggtgactctttacgtcatgcttgtgggagcatacccatttgaagacccagatgaccccaagaatatacgcaagaccattcagcaaataatgcaagtgcaatacaagataccagatcatgtccacatatctacggaatgccagcaacttattgcccgtatctttgttgccaatccaatgaggagaatcacaatgaaggaaataaagagccatccatggtttttgaagaacctaccacgggaactcacggagactgcacaaggcatgtactacaggagggataacagggtcccttcttattcagaccaaacgtcggaagaaatcatgaagatagttcaagatgcaaggaccatgccgaaatcatccagatcaggctatgggtggagcagtgagtattcggatgaagaagaagagaaggaagaggaacacagaccagaggagcatgaggaagaggaagatgaatacgataggagggtgaaggaggtccatgcaagcggagaactccgtatggacgctcttcacatatgaaagctagtggaagagaaagttgcatgtagataactgggttgttgcggatctgaaggatccagtgggatgtatgcagttttggcttgagaatttgcttctgtttgtcaattttcatgtaacataatttaatacaccgagacaacagactaccatgttcttatattggtaaatatgaagcatgtaccttctg

SEQ ID NO: 18900 - protein, 169 aa, Zea mays subsp. mays
  peptide (1)..(169): Ceres Seq. ID no. 12359107
  misc_feature (1)..(68): Pfam Name: Protein kinase domain Pfam Description: Protein kinase domain
  misc_feature (1)..(164): Homolog of NCBI NO: 19568098 NR Description: osmotic stress-activated protein kinase
MLVGAYPFEDPDDPKNIRKTIQQIMQVQYKIPDHVHISTECQQLIARIFVANPMRRITMKEIKSHPWFLKNLPRELTETAQGMYYRRDNRVPSYSDQTSEEIMKIVQDARTMPKSSRSGYGWSSEYSDEEEEKEEEHRPEEHEEEEDEYDRRVKEVHASGELRMDALHI

SEQ ID NO: 18901 - protein, 159 aa, Zea mays subsp. mays
  peptide (1)..(159): Ceres Seq. ID no. 12359108
  misc_feature (4)..(127): Pfam Name: Protein kinase domain Pfam Description: Protein kinase domain
  misc_feature (1)..(127): Homolog of NCBI NO: 19568098 NR Description: osmotic stress-activated protein kinase
MDKYEAVRDIGSGNFGVARLMRNRETRELVAVKCIERGHRIDENVYREIINHRSLRHPNIIRFKEVILTPTHLMILMEFAAGGELFDRICDRGRFSEDEARYFFQQLICGVSYCHYMQICHRDLKLEKFSWMAAQLHGLRSAILAIPSHQCCIQDPNQQ

SEQ ID NO: 18902 - protein, 145 aa, Zea mays subsp. mays
  peptide (1)..(145): Ceres Seq. ID no. 12359109
  misc_feature (1)..(140): Homolog of NCBI NO: 19568098 NR Description: osmotic stress-activated protein kinase
MQVQYKIPDHVHISTECQQLIARIFVANPMRRITMKEIKSHPWFLKNLPRELTETAQGMYYRRDNRVPSYSDQTSEEIMKIVQDARTMPKSSRSGYGWSSEYSDEEEEKEEEHRPEEHEEEEDEYDRRVKEVHASGELRMDALHI

SEQ ID NO: 18903 - DNA, 1526 bp, Zea mays subsp. mays
  misc_feature (1)..(1526): Ceres Seq. ID no. 13492010
  misc_feature: MA Experiment ID: 108515 Result: Down-regulated in Transcription
  misc_feature: MA Experiment 108515 PARAMETER Experiment Name: Zm_2mM_SA_P Parameter: Age (day) Value: 8
  misc_feature: MA Experiment 108515 PARAMETER Experiment Name: Zm_2mM_SA_P Parameter: Organism Value: Zea mays
  misc_feature: MA Experiment 108515 PARAMETER Experiment Name: Zm_2mM_SA_P Parameter: Plant Line Value: 35A19
  misc_feature: MA Experiment 108515 PARAMETER Experiment Name: Zm_2mM_SA_P Parameter: Timepoint (hr) Value: 12
  misc_feature: MA Experiment 108515 PARAMETER Experiment Name: Zm_2mM_SA_P Parameter: Tissue Value: Aerial
  misc_feature: MA Experiment 108515 PARAMETER Experiment Name: Zm_2mM_SA_P Parameter: Treatment Value: 2mM SA vs. No Treatment
  misc_feature: MA Experiment ID: 108523 Result: Down-regulated in Transcription
  misc_feature: MA Experiment 108523 PARAMETER Experiment Name: Zm_42deg_Heat_P Parameter: Age (day) Value: 8
  misc_feature: MA Experiment 108523 PARAMETER Experiment Name: Zm_42deg_Heat_P Parameter: Organism Value: Zea mays
  misc_feature: MA Experiment 108523 PARAMETER Experiment Name: Zm_42deg_Heat_P Parameter: Plant Line Value: 35A19
  misc_feature: MA Experiment 108523 PARAMETER Experiment Name: Zm_42deg_Heat_P Parameter: Temperature (deg C) Value: 42 vs. 22
  misc_feature: MA Experiment 108523 PARAMETER Experiment Name: Zm_42deg_Heat_P Parameter: Timepoint (hr) Value: 6
  misc_feature: MA Experiment 108523 PARAMETER Experiment Name: Zm_42deg_Heat_P Parameter: Tissue Value: Aerial
  misc_feature: MA Experiment ID: 108527 Result: Down-regulated in Transcription
  misc_feature: MA Experiment 108527 PARAMETER Experiment Name: Zm_5mM_NO_P Parameter: Age (day) Value: 8
  misc_feature: MA Experiment 108527 PARAMETER Experiment Name: Zm_5mM_NO_P Parameter: Organism Value: Zea mays
  misc_feature: MA Experiment 108527 PARAMETER Experiment Name: Zm_5mM_NO_P Parameter: Plant Line Value: 35A19
  misc_feature: MA Experiment 108527 PARAMETER Experiment Name: Zm_5mM_NO_P Parameter: Timepoint (hr) Value: 6
  misc_feature: MA Experiment 108527 PARAMETER Experiment Name: Zm_5mM_NO_P Parameter: Tissue Value: Aerial
  misc_feature: MA Experiment 108527 PARAMETER Experiment Name: Zm_5mM_NO_P Parameter: Treatment Value: 5mM NO vs. No Treatment
  misc_feature: MA Experiment ID: 108528 Result: Up-regulated in Transcription
  misc_feature: MA Experiment 108528 PARAMETER Experiment Name: Zm_Imbibed_Seeds_P Parameter: Age (day) Value: 5 vs. 2
  misc_feature: MA Experiment 108528 PARAMETER Experiment Name: Zm_Imbibed_Seeds_P Parameter: Organism Value: Zea mays
  misc_feature: MA Experiment 108528 PARAMETER Experiment Name: Zm_Imbibed_Seeds_P Parameter: Plant Line Value: 35A19
  misc_feature: MA Experiment 108528 PARAMETER Experiment Name: Zm_Imbibed_Seeds_P Parameter: Tissue Value: Aerial vs. Embryo
  misc_feature: MA Experiment ID: 108529 Result: Down-regulated in Transcription
  misc_feature: MA Experiment 108529 PARAMETER Experiment Name: Zm_Imbibed_Seeds_P Parameter: Age (day) Value: 5 vs. 2
  misc_feature: MA Experiment 108529 PARAMETER Experiment Name: Zm_Imbibed_Seeds_P Parameter: Organism Value: Zea mays
  misc_feature: MA Experiment 108529 PARAMETER Experiment Name: Zm_Imbibed_Seeds_P Parameter: Plant Line Value: 35A19
  misc_feature: MA Experiment 108529 PARAMETER Experiment Name: Zm_Imbibed_Seeds_P Parameter: Tissue Value: Roots vs. Embryo
  misc_feature: MA Experiment ID: 108530 Result: Up-regulated in Transcription
  misc_feature: MA Experiment 108530 PARAMETER Experiment Name: Zm_Imbibed_Seeds_P Parameter: Age (day) Value: 6 vs. 2
  misc_feature: MA Experiment 108530 PARAMETER Experiment Name: Zm_Imbibed_Seeds_P Parameter: Organism Value: Zea mays
  misc_feature: MA Experiment 108530 PARAMETER Experiment Name: Zm_Imbibed_Seeds_P Parameter: Plant Line Value: 35A19
  misc_feature: MA Experiment 108530 PARAMETER Experiment Name: Zm_Imbibed_Seeds_P Parameter: Tissue Value: Aerial vs. Embryo
  misc_feature: MA Experiment ID: 108545 Result: Up-regulated in Transcription
  misc_feature: MA Experiment 108545 PARAMETER Experiment Name: Zm_Imbibed_Seeds_P Parameter: Age (day) Value: 3 vs. 2
  misc_feature: MA Experiment 108545 PARAMETER Experiment Name: Zm_Imbibed_Seeds_P Parameter: Organism Value: Zea mays
  misc_feature: MA Experiment 108545 PARAMETER Experiment Name: Zm_Imbibed_Seeds_P Parameter: Plant Line Value: 35A19
  misc_feature: MA Experiment 108545 PARAMETER Experiment Name: Zm_Imbibed_Seeds_P Parameter: Tissue Value: Aerial vs. Embryo
  misc_feature: MA Experiment ID: 108546 Result: Down-regulated in Transcription
  misc_feature: MA Experiment 108546 PARAMETER Experiment Name: Zm_Imbibed_Seeds_P Parameter: Age (day) Value: 3 vs. 2
  misc_feature: MA Experiment 108546 PARAMETER Experiment Name: Zm_Imbibed_Seeds_P Parameter: Organism Value: Zea mays
  misc_feature: MA Experiment 108546 PARAMETER Experiment Name: Zm_Imbibed_Seeds_P Parameter: Plant Line Value: 35A19
  misc_feature: MA Experiment 108546 PARAMETER Experiment Name: Zm_Imbibed_Seeds_P Parameter: Tissue Value: Roots vs. Embryo
  misc_feature: MA Experiment ID: 108547 Result: Up-regulated in Transcription
  misc_feature: MA Experiment 108547 PARAMETER Experiment Name: Zm_Imbibed_Seeds_P Parameter: Age (day) Value: 4 vs. 2
  misc_feature: MA Experiment 108547 PARAMETER Experiment Name: Zm_Imbibed_Seeds_P Parameter: Organism Value: Zea mays
  misc_feature: MA Experiment 108547 PARAMETER Experiment Name: Zm_Imbibed_Seeds_P Parameter: Plant Line Value: 35A19
  misc_feature: MA Experiment 108547 PARAMETER Experiment Name: Zm_Imbibed_Seeds_P Parameter: Tissue Value: Aerial vs. Embryo
  misc_feature: MA Experiment ID: 108556 Result: Down-regulated in Transcription
  misc_feature: MA Experiment 108556 PARAMETER Experiment Name: Zm_Drought_P Parameter: Age (day) Value: 9
  misc_feature: MA Experiment 108556 PARAMETER Experiment Name: Zm_Drought_P Parameter: Organism Value: Zea mays
  misc_feature: MA Experiment 108556 PARAMETER Experiment Name: Zm_Drought_P Parameter: Plant Line Value: 35A19
  misc_feature: MA Experiment 108556 PARAMETER Experiment Name: Zm_Drought_P Parameter: Timepoint (hr) Value: 24
  misc_feature: MA Experiment 108556 PARAMETER Experiment Name: Zm_Drought_P Parameter: Tissue Value: Aerial
  misc_feature: MA Experiment 108556 PARAMETER Experiment Name: Zm_Drought_P Parameter: Treatment Value: Drought vs. No Drought
  misc_feature: MA Experiment ID: 108687 Result: Down-regulated in Transcription
  misc_feature: MA Experiment 108687 PARAMETER Experiment Name: Zm_Embryos-Flowers__P Parameter: Tissue Value: Embryo vs. Aerial+
  misc_feature: MA Experiment ID: 20000479 Result: Down-regulated in Transcription
  misc_feature: MA Experiment 20000479 PARAMETER Experiment Name: Zm_Drought_P Parameter: Age (day) Value: 10
  misc_feature: MA Experiment 20000479 PARAMETER Experiment Name: Zm_Drought_P Parameter: Organism Value: Zea mays
  misc_feature: MA Experiment 20000479 PARAMETER Experiment Name: Zm_Drought_P Parameter: Plant Line Value: 35A19
  misc_feature: MA Experiment 20000479 PARAMETER Experiment Name: Zm_Drought_P Parameter: Timepoint (hr) Value: 48
  misc_feature: MA Experiment 20000479 PARAMETER Experiment Name: Zm_Drought_P Parameter: Tissue Value: Aerial
  misc_feature: MA Experiment 20000479 PARAMETER Experiment Name: Zm_Drought_P Parameter: Treatment Value: Drought vs. No Drought
  misc_feature: MA Experiment ID: 20000480 Result: Down-regulated in Transcription
  misc_feature: MA Experiment 20000480 PARAMETER Experiment Name: Zm_Drought_P Parameter: Age (day) Value: 11
  misc_feature: MA Experiment 20000480 PARAMETER Experiment Name: Zm_Drought_P Parameter: Organism Value: Zea mays
  misc_feature: MA Experiment 20000480 PARAMETER Experiment Name: Zm_Drought_P Parameter: Plant Line Value: 35A19
  misc_feature: MA Experiment 20000480 PARAMETER Experiment Name: Zm_Drought_P Parameter: Timepoint (hr) Value: 72
  misc_feature: MA Experiment 20000480 PARAMETER Experiment Name: Zm_Drought_P Parameter: Tissue Value: Aerial
  misc_feature: MA Experiment 20000480 PARAMETER Experiment Name: Zm_Drought_P Parameter: Treatment Value: Drought vs. No Drought
atccaaatggggcttatcgccaccatccaatcgaagctctggaacctcctccactcccagcttccgccgacgctcgcttcagctgctgctttccttcccatccttcaacaggtgcaatttgcatttcccatggagctcactgattaataacgtgtgagctgaacttgcttttctgtggacaatttggaacttcagtactagtttccgataggattcagggagaaatgatctcttttaacaatttattttggagctcccttcagccttctttcaagttttacagaaagtgcctgacaaactgcccatattttgcactgaccatgcattcaactacaaagcccttgggttcatctatgccggtaaagagggcgcatttgaagccacatgccgcagacatcaagaggaacccccatgtacatgagctttacaaattggtttaccgacttccggagaaccttagctggctgttggcaccaccagaaattcctaaaagacctgcctcaaagaagaaaaaacaaaaagacgaaatagtggccggtaacagctttggtgtgatcttggagtgggagggagttgttgtggatgatgatgatccagacttggagccccgggtttggtatgttctatcactagaagaggggaagtctttccctccagatgcattgctgaagaaaatcgagggaatgagaactgaccaggctattgcagaagtcttatgttggtcagaagatccagcagaaatccaaaggttggcaacacacaaggaggttatatatcaaaaacttcaaggtggatactaccagctgcgaccacatgtgcttgatttcttgaacacccttgtgggttttgacattccaatagcaattgcagctcctcgctcaaggaagagccttgaagaagggatcaaaactgttggtctgcaaggctacttcgatgctatagttgcattggaggacttctgcttagggaaacctgatggtgagatgtttgaagtcgcagcggagcaacttggtctggaaccagatgcctgtgttgtgtttggtaactcaaacttgacgacggaatctgcacataacgctgggatgaggtgtgtggcagttgcaggccgacaccctgcctatgagctccaatcagcaaaccatgttgtgagatggcttgatcagctctctattgttgacttgcagaggcttgctaatggtgaagttattggtcgcaggggtagagaatctgacatggatatggaaattgtgattgaggaatgatgatgtttctgcaaaaatgacgcactaatatattgttgtgcttataatctgatacacctaagtaatgcattacattttgtaaacaggccaagcagtgcaagttccggactaaggatactccggagtttgcattaccttcctggtttgcttgtgatgaattggaattcgcctaaaactcttttagtcattagagttggaagtgaagaaactcccacccgtaacttgtgtatgtacagtatatatatgtattacctattcttccct

SEQ ID NO: 18904 - protein, 345 aa, Zea mays subsp. mays
  peptide (1)..(345): Ceres Seq. ID no. 13492011
  misc_feature (193)..(295): Pfam Name: haloacid dehalogenase-like hydrolase Pfam Description: haloacid dehalogenase-like hydrolase
  misc_feature (148)..(322): Homolog of NCBI NO: 22297853 NR Description: ORF_ID:tlr0310~hypothetical protein
  misc_feature (111)..(312): Homolog of NCBI NO: 21672855 NR Description: hydrolase, haloacid dehalogenase-like family
  misc_feature (157)..(324): Homolog of NCBI NO: 6016697 NR Description: unknown protein [Arabidopsis thaliana]
  misc_feature (107)..(324): Homolog of NCBI NO: 14532506 NR Description: AT3g10970/F9F8_21 [Arabidopsis thaliana]
  misc_feature (107)..(324): Homolog of NCBI NO: 21592870 NR Description: unknown [Arabidopsis thaliana]
  misc_feature (107)..(324): Homolog of NCBI NO: 18399067 NR Description: haloacid dehalogenase-like hydrolase family
  misc_feature (82)..(340): Homolog of NCBI NO: 15234236 NR Description: haloacid dehalogenase-like hydrolase family
  misc_feature (1)..(345): Homolog of NCBI NO: 38345597 NR Description: OSJNBb0012E24.15 [Oryza sativa (japonica
  misc_feature (1)..(345): Homolog of NCBI NO: 10444400 NR Description: genetic modifier [Zea mays]
  misc_feature (11)..(345): Homolog of NCBI NO: 18542168 NR Description: putative genetic modifier [Zea mays]
MISFNNLFWSSLQPSFKFYRKCLTNCPYFALTMHSTTKPLGSSMPVKRAHLKPHAADIKRNPHVHELYKLVYRLPENLSWLLAPPEIPKRPASKKKKQKDEIVAGNSFGVILEWEGVVVDDDDPDLEPRVWYVLSLEEGKSFPPDALLKKIEGMRTDQAIAEVLCWSEDPAEIQRLATHKEVIYQKLQGGYYQLRPHVLDFLNTLVGFDIPIAIAAPRSRKSLEEGIKTVGLQGYFDAIVALEDFCLGKPDGEMFEVAAEQLGLEPDACVVFGNSNLTTESAHNAGMRCVAVAGRHPAYELQSANHVVRWLDQLSIVDLQRLANGEVIGRRGRESDMDMEIVIEE

SEQ ID NO: 18905 - protein, 313 aa, Zea mays subsp. mays
  peptide (1)..(313): Ceres Seq. ID no. 13492012
  misc_feature (161)..(263): Pfam Name: haloacid dehalogenase-like hydrolase Pfam Description: haloacid dehalogenase-like hydrolase
  misc_feature (125)..(292): Homolog of NCBI NO: 6016697 NR Description: unknown protein [Arabidopsis thaliana]
  misc_feature (75)..(292): Homolog of NCBI NO: 14532506 NR Description: AT3g10970/F9F8_21 [Arabidopsis thaliana]
  misc_feature (75)..(292): Homolog of NCBI NO: 21592870 NR Description: unknown [Arabidopsis thaliana]
  misc_feature (75)..(292): Homolog of NCBI NO: 18399067 NR Description: haloacid dehalogenase-like hydrolase family
  misc_feature (116)..(290): Homolog of NCBI NO: 22297853 NR Description: ORF_ID:tlr0310~hypothetical protein
  misc_feature (79)..(280): Homolog of NCBI NO: 21672855 NR Description: hydrolase, haloacid dehalogenase-like family
  misc_feature (50)..(308): Homolog of NCBI NO: 15234236 NR Description: haloacid dehalogenase-like hydrolase family
  misc_feature (1)..(313): Homolog of NCBI NO: 38345597 NR Description: OSJNBb0012E24.15 [Oryza sativa (japonica
  misc_feature (1)..(313): Homolog of NCBI NO: 10444400 NR Description: genetic modifier [Zea mays]
  misc_feature (1)..(313): Homolog of NCBI NO: 18542168 NR Description: putative genetic modifier [Zea mays]
MHSTTKPLGSSMPVKRAHLKPHAADIKRNPHVHELYKLVYRLPENLSWLLAPPEIPKRPASKKKKQKDEIVAGNSFGVILEWEGVVVDDDDPDLEPRVWYVLSLEEGKSFPPDALLKKIEGMRTDQAIAEVLCWSEDPAEIQRLATHKEVIYQKLQGGYYQLRPHVLDFLNTLVGFDIPIAIAAPRSRKSLEEGIKTVGLQGYFDAIVALEDFCLGKPDGEMFEVAAEQLGLEPDACVVFGNSNLTTESAHNAGMRCVAVAGRHPAYELQSANHVVRWLDQLSIVDLQRLANGEVIGRRGRESDMDMEIVIEE

SEQ ID NO: 18906 - protein, 302 aa, Zea mays subsp. mays
  peptide (1)..(302): Ceres Seq. ID no. 13492013
  misc_feature (150)..(252): Pfam Name: haloacid dehalogenase-like hydrolase Pfam Description: haloacid dehalogenase-like hydrolase
  misc_feature (105)..(279): Homolog of NCBI NO: 22297853 NR Description: ORF_ID:tlr0310~hypothetical protein
  misc_feature (68)..(269): Homolog of NCBI NO: 21672855 NR Description: hydrolase, haloacid dehalogenase-like family
  misc_feature (114)..(281): Homolog of NCBI NO: 6016697 NR Description: unknown protein [Arabidopsis thaliana]
  misc_feature (64)..(281): Homolog of NCBI NO: 14532506 NR Description: AT3g10970/F9F8_21 [Arabidopsis thaliana]
  misc_feature (64)..(281): Homolog of NCBI NO: 21592870 NR Description: unknown [Arabidopsis thaliana]
  misc_feature (64)..(281): Homolog of NCBI NO: 18399067 NR Description: haloacid dehalogenase-like hydrolase family
  misc_feature (39)..(297): Homolog of NCBI NO: 15234236 NR Description: haloacid dehalogenase-like hydrolase family
  misc_feature (1)..(302): Homolog of NCBI NO: 38345597 NR Description: OSJNBb0012E24.15 [Oryza sativa (japonica
  misc_feature (1)..(302): Homolog of NCBI NO: 10444400 NR Description: genetic modifier [Zea mays]
  misc_feature (1)..(302): Homolog of NCBI NO: 18542168 NR Description: putative genetic modifier [Zea mays]
MPVKRAHLKPHAADIKRNPHVHELYKLVYRLPENLSWLLAPPEIPKRPASKKKKQKDEIVAGNSFGVILEWEGVVVDDDDPDLEPRVWYVLSLEEGKSFPPDALLKKIEGMRTDQAIAEVLCWSEDPAEIQRLATHKEVIYQKLQGGYYQLRPHVLDFLNTLVGFDIPIAIAAPRSRKSLEEGIKTVGLQGYFDAIVALEDFCLGKPDGEMFEVAAEQLGLEPDACVVFGNSNLTTESAHNAGMRCVAVAGRHPAYELQSANHVVRWLDQLSIVDLQRLANGEVIGRRGRESDMDMEIVIEE

SEQ ID NO: 18907 - DNA, 1058 bp, Zea mays subsp. mays
  misc_feature (1)..(1058): Ceres Seq. ID no. 12360632
  misc_feature: MA Experiment ID: 108504 Result: Up-regulated in Transcription
  misc_feature: MA Experiment 108504 PARAMETER Experiment Name: Zm_Drought_P Parameter: Age (day) Value: 8
  misc_feature: MA Experiment 108504 PARAMETER Experiment Name: Zm_Drought_P Parameter: Organism Value: Zea mays
  misc_feature: MA Experiment 108504 PARAMETER Experiment Name: Zm_Drought_P Parameter: Plant Line Value: 35A19
  misc_feature: MA Experiment 108504 PARAMETER Experiment Name: Zm_Drought_P Parameter: Timepoint (hr) Value: 12
  misc_feature: MA Experiment 108504 PARAMETER Experiment Name: Zm_Drought_P Parameter: Tissue Value: Aerial
  misc_feature: MA Experiment 108504 PARAMETER Experiment Name: Zm_Drought_P Parameter: Treatment Value: Drought vs. No Drought
  misc_feature: MA Experiment ID: 108528 Result: Up-regulated in Transcription
  misc_feature: MA Experiment 108528 PARAMETER Experiment Name: Zm_Imbibed_Seeds_P Parameter: Age (day) Value: 5 vs. 2
  misc_feature: MA Experiment 108528 PARAMETER Experiment Name: Zm_Imbibed_Seeds_P Parameter: Organism Value: Zea mays
  misc_feature: MA Experiment 108528 PARAMETER Experiment Name: Zm_Imbibed_Seeds_P Parameter: Plant Line Value: 35A19
  misc_feature: MA Experiment 108528 PARAMETER Experiment Name: Zm_Imbibed_Seeds_P Parameter: Tissue Value: Aerial vs. Embryo
  misc_feature: MA Experiment ID: 108530 Result: Up-regulated in Transcription
  misc_feature: MA Experiment 108530 PARAMETER Experiment Name: Zm_Imbibed_Seeds_P Parameter: Age (day) Value: 6 vs. 2
  misc_feature: MA Experiment 108530 PARAMETER Experiment Name: Zm_Imbibed_Seeds_P Parameter: Organism Value: Zea mays
  misc_feature: MA Experiment 108530 PARAMETER Experiment Name: Zm_Imbibed_Seeds_P Parameter: Plant Line Value: 35A19
  misc_feature: MA Experiment 108530 PARAMETER Experiment Name: Zm_Imbibed_Seeds_P Parameter: Tissue Value: Aerial vs. Embryo
  misc_feature: MA Experiment ID: 108532 Result: Down-regulated in Transcription
  misc_feature: MA Experiment 108532 PARAMETER Experiment Name: Zm_20uM_KNO3_H-to-L_P Parameter: Age (day) Value: 11
  misc_feature: MA Experiment 108532 PARAMETER Experiment Name: Zm_20uM_KNO3_H-to-L_P Parameter: Organism Value: Zea mays
  misc_feature: MA Experiment 108532 PARAMETER Experiment Name: Zm_20uM_KNO3_H-to-L_P Parameter: Plant Line Value: 35A19
  misc_feature: MA Experiment 108532 PARAMETER Experiment Name: Zm_20uM_KNO3_H-to-L_P Parameter: Timepoint (hr) Value: 16
  misc_feature: MA Experiment 108532 PARAMETER Experiment Name: Zm_20uM_KNO3_H-to-L_P Parameter: Tissue Value: Roots
  misc_feature: MA Experiment 108532 PARAMETER Experiment Name: Zm_20uM_KNO3_H-to-L_P Parameter: Treatment Value: 20uM KNO3 vs. 60mM KNO3
  misc_feature: MA Experiment ID: 108533 Result: Down-regulated in Transcription
  misc_feature: MA Experiment 108533 PARAMETER Experiment Name: Zm_4deg_Cold_P Parameter: Age (hr) Value: 8
  misc_feature: MA Experiment 108533 PARAMETER Experiment Name: Zm_4deg_Cold_P Parameter: Organism Value: Zea mays
  misc_feature: MA Experiment 108533 PARAMETER Experiment Name: Zm_4deg_Cold_P Parameter: Plant Line Value: 35A19
  misc_feature: MA Experiment 108533 PARAMETER Experiment Name: Zm_4deg_Cold_P Parameter: Temperature (deg C) Value: 4 vs. 22
  misc_feature: MA Experiment 108533 PARAMETER Experiment Name: Zm_4deg_Cold_P Parameter: Timepoint (hr) Value: 1
  misc_feature: MA Experiment 108533 PARAMETER Experiment Name: Zm_4deg_Cold_P Parameter: Tissue Value: Aerial
  misc_feature: MA Experiment ID: 108534 Result: Down-regulated in Transcription
  misc_feature: MA Experiment 108534 PARAMETER Experiment Name: Zm_4deg_Cold_P Parameter: Age (hr) Value: 8
  misc_feature: MA Experiment 108534 PARAMETER Experiment Name: Zm_4deg_Cold_P Parameter: Organism Value: Zea mays
  misc_feature: MA Experiment 108534 PARAMETER Experiment Name: Zm_4deg_Cold_P Parameter: Plant Line Value: 35A19
  misc_feature: MA Experiment 108534 PARAMETER Experiment Name: Zm_4deg_Cold_P Parameter: Temperature (deg C) Value: 4 vs. 22
  misc_feature: MA Experiment 108534 PARAMETER Experiment Name: Zm_4deg_Cold_P Parameter: Timepoint (hr) Value: 6
  misc_feature: MA Experiment 108534 PARAMETER Experiment Name: Zm_4deg_Cold_P Parameter: Tissue Value: Aerial
  misc_feature: MA Experiment ID: 108540 Result: Up-regulated in Transcription
  misc_feature: MA Experiment 108540 PARAMETER Experiment Name: Zm_20percent_PEG_P Parameter: Age (day) Value: 8
  misc_feature: MA Experiment 108540 PARAMETER Experiment Name: Zm_20percent_PEG_P Parameter: Organism Value: Zea mays
  misc_feature: MA Experiment 108540 PARAMETER Experiment Name: Zm_20percent_PEG_P Parameter: Plant Line Value: 35A19
  misc_feature: MA Experiment 108540 PARAMETER Experiment Name: Zm_20percent_PEG_P Parameter: Timepoint (hr) Value: 6
  misc_feature: MA Experiment 108540 PARAMETER Experiment Name: Zm_20percent_PEG_P Parameter: Tissue Value: Aerial
  misc_feature: MA Experiment 108540 PARAMETER Experiment Name: Zm_20percent_PEG_P Parameter: Treatment Value: 20percent PEG vs. No Treatment
  misc_feature: MA Experiment ID: 108544 Result: Up-regulated in Transcription
  misc_feature: MA Experiment ID: 108547 Result: Up-regulated in Transcription
  misc_feature: MA Experiment 108547 PARAMETER Experiment Name: Zm_Imbibed_Seeds_P Parameter: Age (day) Value: 4 vs. 2
  misc_feature: MA Experiment 108547 PARAMETER Experiment Name: Zm_Imbibed_Seeds_P Parameter: Organism Value: Zea mays
  misc_feature: MA Experiment 108547 PARAMETER Experiment Name: Zm_Imbibed_Seeds_P Parameter: Plant Line Value: 35A19
  misc_feature: MA Experiment 108547 PARAMETER Experiment Name: Zm_Imbibed_Seeds_P Parameter: Tissue Value: Aerial vs. Embryo
  misc_feature: MA Experiment ID: 108559 Result: Up-regulated in Transcription
  misc_feature: MA Experiment 108559 PARAMETER Experiment Name: Zm_5mM_NO_P Parameter: Age (day) Value: 8
  misc_feature: MA Experiment 108559 PARAMETER Experiment Name: Zm_5mM_NO_P Parameter: Organism Value: Zea mays
  misc_feature: MA Experiment 108559 PARAMETER Experiment Name: Zm_5mM_NO_P Parameter: Plant Line Value: 35A19
  misc_feature: MA Experiment 108559 PARAMETER Experiment Name: Zm_5mM_NO_P Parameter: Timepoint (hr) Value: 12
  misc_feature: MA Experiment 108559 PARAMETER Experiment Name: Zm_5mM_NO_P Parameter: Tissue Value: Aerial
  misc_feature: MA Experiment 108559 PARAMETER Experiment Name: Zm_5mM_NO_P Parameter: Treatment Value: 5mM NO vs. No Treatment
  misc_feature: MA Experiment ID: 108597 Result: Up-regulated in Transcription
  misc_feature: MA Experiment 108597 PARAMETER Experiment Name: Zm_100uM_ABA_P Parameter: Age (day) Value: 9
  misc_feature: MA Experiment 108597 PARAMETER Experiment Name: Zm_100uM_ABA_P Parameter: Organism Value: Zea mays
  misc_feature: MA Experiment 108597 PARAMETER Experiment Name: Zm_100uM_ABA_P Parameter: Plant Line Value: 35A19
  misc_feature: MA Experiment 108597 PARAMETER Experiment Name: Zm_100uM_ABA_P Parameter: Timepoint (hr) Value: 24
  misc_feature: MA Experiment 108597 PARAMETER Experiment Name: Zm_100uM_ABA_P Parameter: Tissue Value: Aerial
  misc_feature: MA Experiment 108597 PARAMETER Experiment Name: Zm_100uM_ABA_P Parameter: Treatment Value: 100uM ABA vs. No Treatment
  misc_feature: MA Experiment ID: 108689 Result: Up-regulated in Transcription
  misc_feature: MA Experiment 108689 PARAMETER Experiment Name: Zm_Drought_Roots_P Parameter: Age (day) Value: 9
  misc_feature: MA Experiment 108689 PARAMETER Experiment Name: Zm_Drought_Roots_P Parameter: Organism Value: Zea mays
  misc_feature: MA Experiment 108689 PARAMETER Experiment Name: Zm_Drought_Roots_P Parameter: Plant Line Value: 35A19
  misc_feature: MA Experiment 108689 PARAMETER Experiment Name: Zm_Drought_Roots_P Parameter: Timepoint (hr) Value: 24
  misc_feature: MA Experiment 108689 PARAMETER Experiment Name: Zm_Drought_Roots_P Parameter: Tissue Value: Roots
  misc_feature: MA Experiment 108689 PARAMETER Experiment Name: Zm_Drought_Roots_P Parameter: Treatment Value: Drought vs. No Drought
  misc_feature: MA Experiment ID: 20000478 Result: Up-regulated in Transcription
  misc_feature: MA Experiment 20000478 PARAMETER Experiment Name: Zm_5mM_SA_P Parameter: Age (day) Value: 11
  misc_feature: MA Experiment 20000478 PARAMETER Experiment Name: Zm_5mM_SA_P Parameter: Organism Value: Zea mays
  misc_feature: MA Experiment 20000478 PARAMETER Experiment Name: Zm_5mM_SA_P Parameter: Plant Line Value: 35A19
  misc_feature: MA Experiment 20000478 PARAMETER Experiment Name: Zm_5mM_SA_P Parameter: Timepoint (hr) Value: 72
  misc_feature: MA Experiment 20000478 PARAMETER Experiment Name: Zm_5mM_SA_P Parameter: Tissue Value: Aerial
  misc_feature: MA Experiment 20000478 PARAMETER Experiment Name: Zm_5mM_SA_P Parameter: Treatment Value: 5mM SA vs. No Treatment
  misc_feature: MA Experiment ID: 20000480 Result: Up-regulated in Transcription
  misc_feature: MA Experiment 20000480 PARAMETER Experiment Name: Zm_Drought_P Parameter: Age (day) Value: 11
  misc_feature: MA Experiment 20000480 PARAMETER Experiment Name: Zm_Drought_P Parameter: Organism Value: Zea mays
  misc_feature: MA Experiment 20000480 PARAMETER Experiment Name: Zm_Drought_P Parameter: Plant Line Value: 35A19
  misc_feature: MA Experiment 20000480 PARAMETER Experiment Name: Zm_Drought_P Parameter: Timepoint (hr) Value: 72
  misc_feature: MA Experiment 20000480 PARAMETER Experiment Name: Zm_Drought_P Parameter: Tissue Value: Aerial
  misc_feature: MA Experiment 20000480 PARAMETER Experiment Name: Zm_Drought_P Parameter: Treatment Value: Drought vs. No Drought
  misc_feature: MA Experiment ID: 20000492 Result: Down-regulated in Transcription
  misc_feature: MA Experiment 20000492 PARAMETER Experiment Name: Zm_Hybrid_Seed_Dev_P Parameter: DAP Value: 12
  misc_feature: MA Experiment 20000492 PARAMETER Experiment Name: Zm_Hybrid_Seed_Dev_P Parameter: Organism Value: Zea mays
  misc_feature: MA Experiment 20000492 PARAMETER Experiment Name: Zm_Hybrid_Seed_Dev_P Parameter: Plant Line Value: 35A19
  misc_feature: MA Experiment 20000492 PARAMETER Experiment Name: Zm_Hybrid_Seed_Dev_P Parameter: Tissue Value: Fert Kernel vs. Unfert Floret
aaaccctcacatacagatacagtacagttcacacactctcctgtctcctatccagccaccgaacgaagctagccaagatgtctcagttgctgcacctgccggacctcgcggcgccgcggaccaggatgggctcggcgctgccggcgggggcccgcgtcaagcagggggaggcggggacggcgagggggaggcgggtgctcaggctcgccgaccccgtgcggcgggagtgccgggtgccggtcccgctgccgccgccgccgctcctcgccgcggggaggcgcggagacgacgacgacgacgacggcgtcgacgaggataggcagaggtactacctcaacctgggctacgcgatccggacgctcagggaggagctccccgacgtgctctgcaaggaccacagcttcgacatctacagagaagacattgtcttcagagaccctctgaacacattcaagggcctgggaaactacaagaggctcttctgggcgctgcgcctcaccggccgggtcttcttcagggcgtcgtgggttgaagtggtcagcatatggcagcccgccgagaacagcatcctgcttcgctggaccgcccacggcgtccctcgggtgccctggggctggtgggacgccgcccacgcccgcttcgacggcgcgtccgtgtacaagctcgacaggaacggcaagatctacgagcacacggtgcacaacgtcgctacgaacccgccggccaagtccaaggtcctgccggtccacgagctggtcaggtcactcggttgcccctccactgccgaacccacctgttctgacttctgaagctttcgtcgtcgcagtgccatcttattattcgagaattaattatctgggagaaggataggcgtgggtttaacatggtacctccgaattttgcgttttttcagtgtgatttgatagcacacaaagttactgagtactcttggagttcagtgtgatttgatagcacacaaagttactgagtactcttggagttgtatatatgtatgtacagtgatagtttataaaataaaggcctgtcatttaaggtgt

SEQ ID NO: 18908 - protein, 268 aa, Zea mays subsp. mays
  peptide (1)..(268): Ceres Seq. ID no. 12360633
  misc_feature (111)..(230): Homolog of NCBI NO: 17228448 NR Description: hypothetical protein [Nostoc sp. PCC 7120]
  misc_feature (117)..(230): Homolog of NCBI NO: 23040676 NR Description: hypothetical protein [Trichodesmium erythraeum
  misc_feature (111)..(230): Homolog of NCBI NO: 23126421 NR Description: hypothetical protein [Nostoc punctiforme]
  misc_feature (103)..(264): Homolog of NCBI NO: 15219209 NR Description: unknown protein
  misc_feature (84)..(264): Homolog of NCBI NO: 18412399 NR Description: expressed protein
  misc_feature (30)..(267): Homolog of NCBI NO: 38347356 NR Description: OSJNBa0070C17.17 [Oryza sativa (japonica
  misc_feature (97)..(230): Homolog of NCBI NO: 25408977 NR Description: hypothetical protein At2g46220 [imported] -
  misc_feature (97)..(268): Homolog of NCBI NO: 18407008 NR Description: Expressed protein
  misc_feature (26)..(238): Homolog of NCBI NO: 34904098 NR Description: unnamed protein product [Oryza sativa (japonica
TLTYRYSTVHTLSCLLSSHRTKLAKMSQLLHLPDLAAPRTRMGSALPAGARVKQGEAGTARGRRVLRLADPVRRECRVPVPLPPPPLLAAGRRGDDDDDDGVDEDRQRYYLNLGYAIRTLREELPDVLCKDHSFDIYREDIVFRDPLNTFKGLGNYKRLFWALRLTGRVFFRASWVEVVSIWQPAENSILLRWTAHGVPRVPWGWWDAAHARFDGASVYKLDRNGKIYEHTVHNVATNPPAKSKVLPVHELVRSLGCPSTAEPTCSDF

SEQ ID NO: 18909 - protein, 243 aa, Zea mays subsp. mays
  peptide (1)..(243): Ceres Seq. ID no. 12360634
  misc_feature (86)..(205): Homolog of NCBI NO: 17228448 NR Description: hypothetical protein [Nostoc sp. PCC 7120]
  misc_feature (92)..(205): Homolog of NCBI NO: 23040676 NR Description: hypothetical protein [Trichodesmium erythraeum
  misc_feature (86)..(205): Homolog of NCBI NO: 23126421 NR Description: hypothetical protein [Nostoc punctiforme]
  misc_feature (78)..(239): Homolog of NCBI NO: 15219209 NR Description: unknown protein
  misc_feature (59)..(239): Homolog of NCBI NO: 18412399 NR Description: expressed protein
  misc_feature (5)..(242): Homolog of NCBI NO: 38347356 NR Description: OSJNBa0070C17.17 [Oryza sativa (japonica
  misc_feature (72)..(205): Homolog of NCBI NO: 25408977 NR Description: hypothetical protein At2g46220 [imported] -
  misc_feature (72)..(243): Homolog of NCBI NO: 18407008 NR Description: Expressed protein
  misc_feature (1)..(213): Homolog of NCBI NO: 34904098 NR Description: unnamed protein product [Oryza sativa (japonica
MSQLLHLPDLAAPRTRMGSALPAGARVKQGEAGTARGRRVLRLADPVRRECRVPVPLPPPPLLAAGRRGDDDDDDGVDEDRQRYYLNLGYAIRTLREELPDVLCKDHSFDIYREDIVFRDPLNTFKGLGNYKRLFWALRLTGRVFFRASWVEVVSIWQPAENSILLRWTAHGVPRVPWGWWDAAHARFDGASVYKLDRNGKIYEHTVHNVATNPPAKSKVLPVHELVRSLGCPSTAEPTCSDF

SEQ ID NO: 18910 - protein, 227 aa, Zea mays subsp. mays
  peptide (1)..(227): Ceres Seq. ID no. 12360635
  misc_feature (70)..(189): Homolog of NCBI NO: 17228448 NR Description: hypothetical protein [Nostoc sp. PCC 7120]
  misc_feature (76)..(189): Homolog of NCBI NO: 23040676 NR Description: hypothetical protein [Trichodesmium erythraeum
  misc_feature (70)..(189): Homolog of NCBI NO: 23126421 NR Description: hypothetical protein [Nostoc punctiforme]
  misc_feature (62)..(223): Homolog of NCBI NO: 15219209 NR Description: unknown protein
  misc_feature (43)..(223): Homolog of NCBI NO: 18412399 NR Description: expressed protein
  misc_feature (1)..(226): Homolog of NCBI NO: 38347356 NR Description: OSJNBa0070C17.17 [Oryza sativa (japonica
  misc_feature (56)..(189): Homolog of NCBI NO: 25408977 NR Description: hypothetical protein At2g46220 [imported] -
  misc_feature (56)..(227): Homolog of NCBI NO: 18407008 NR Description: Expressed protein
  misc_feature (1)..(197): Homolog of NCBI NO: 34904098 NR Description: unnamed protein product [Oryza sativa (japonica
MGSALPAGARVKQGEAGTARGRRVLRLADPVRRECRVPVPLPPPPLLAAGRRGDDDDDDGVDEDRQRYYLNLGYAIRTLREELPDVLCKDHSFDIYREDIVFRDPLNTFKGLGNYKRLFWALRLTGRVFFRASWVEVVSIWQPAENSILLRWTAHGVPRVPWGWWDAAHARFDGASVYKLDRNGKIYEHTVHNVATNPPAKSKVLPVHELVRSLGCPSTAEPTCSDF

SEQ ID NO: 18911 - DNA, 1737 bp, Zea mays subsp. mays
  misc_feature (1)..(1737): Ceres Seq. ID no. 12435333
  misc_feature: MA Experiment ID: 20000535 Result: Up-regulated in Transcription
  misc_feature: MA Experiment 20000535 PARAMETER Experiment Name: Zm_Hybrid_Seed_Dev_P Parameter: DAP Value: 30 vs. 12
  misc_feature: MA Experiment 20000535 PARAMETER Experiment Name: Zm_Hybrid_Seed_Dev_P Parameter: Organism Value: Zea mays
  misc_feature: MA Experiment 20000535 PARAMETER Experiment Name: Zm_Hybrid_Seed_Dev_P Parameter: Plant Line Value: 35A19
  misc_feature: MA Experiment 20000535 PARAMETER Experiment Name: Zm_Hybrid_Seed_Dev_P Parameter: Tissue Value: Embryo vs. Unfert Floret
gcaaaagcgcacagttcccgttccccctccgacccgttcattccgcttggttttctcctcctccgtcctcttcgctccccgtcagaccatccctgtgaggctgtgacgcaaccgggcgccggcggtctctcctgcaccacagggcacgccgcctcccgcgcacgtgttctcctcttccggggattcagatctggggattgctattctgtccgtctgactccgtccgtcccgaggcgcggcgaggggagcgagatgggttacattggccaccacggcgtcgccacgctgcggcgctacaagtacagcggcgtcgaccactcgctcgtcgccaagtacatcctccagcccttctggtcccgattcgtcaacatcttcccgctatggttcccaccgaacatgattacactgacaggtttcatgtttctactgacatcagcattccttggctttttatattcaccccatctagatacagcaccccccagatgggttcaccttgctcatggactgcttctctttctttatcagacttttgatgctgtggatggaaaacaagcaaggcgtaccaactcatcaagtcctctaggcgagctttttgaccacggatgtgatgcgcttgcgtgtgcttttgaatccttggcttttggaagcacggcgatgtgtggaaaggctaccttctggttttggttcatttcagctgtcccattttacttcgcaacctgggaacacttttttacaaatacacttattcttcctatagtcaacggaccaactgaaggccttatgctgatctacttgtgccattttttcacctttttcacaggagccgagtggtgggcacaggattttcagaagtcaatgcccctgctgggttgggttcctcttatctctgaaatcccggtgtatgacattgtgctatgtcttatgattgcttttgctgtaatcccaacaattggatctaacatccacaatgtatataaagtcgttgaagcaagaaaaggaagcatgcttctggcactagccatgctctttccttttggtttgctcttggctggagttcttgtctggtcctacctttctccttcagatataatgagaacccaaccacatttgctaattattggaactggttttgcatttggatttcttgtgggaagaatgattctggctcacttgtgtgatgaacccaagggtttgaaaacagggatgtgcatgtcccttgcgtattttccatttgcaattgcaaacgcgttgactgcccggcttgatgatggaaatccactcgttgatgagcagctagtgctcctgatgtactgcctatttacagtggctctgtacatgcattttgctacatcagttattcatgagatcaccaatgcactcgggatccactgcttcaggatcactaggaaaaaggcatagttcctccgtccacgggcatcagcgttgccctggattgtgtaatcaatcacaactcacaaggtggtgcctgacagacaagcaatttttcatatttaatggatgctgcttcctgaatactcacatggatgacgcccccccgccccttaaaattcacatcggcatgaacgtgcggatgagaaagcagtgtttttttttgaaacaattagcaacatcatgctgtatcttaccaattttttgtggaattcgttgaatttgctgatagtgatgtattgcaaattaagaattgtttggattttgttaaaggaatgccccccc

SEQ ID NO: 18912 - protein, 473 aa, Zea mays subsp. mays
  peptide (1)..(473): Ceres Seq. ID no. 12435334
  misc_feature (170)..(310): Pfam Name: CDP-alcohol phosphatidyltransferase Pfam Description: CDP-alcohol phosphatidyltransferase
  misc_feature (98)..(471): Homolog of NCBI NO: 2425056 NR Description: LipB [Dictyostelium discoideum]
  misc_feature (85)..(473): Homolog of NCBI NO: 27762264 NR Description: aminoalcoholphosphotransferase [Brassica napus]
  misc_feature (85)..(405): Homolog of NCBI NO: 18390098 NR Description: aminoalcoholphosphotransferase [Sorghum bicolor]
  misc_feature (85)..(473): Homolog of NCBI NO: 5917787 NR Description: aminoalcoholphosphotransferase [Brassica rapa]
  misc_feature (85)..(471): Homolog of NCBI NO: 30313359 NR Description: aminoalcoholphosphotransferase [Brassica rapa
  misc_feature (85)..(473): Homolog of NCBI NO: 15229490 NR Description: hypothetical protein
  misc_feature (85)..(473): Homolog of NCBI NO: 15222885 NR Description: aminoalcoholphosphotransferase
  misc_feature (85)..(473): Homolog of NCBI NO: 7488522 NR Description: ethanolaminephosphotransferase homolog - turnip
  misc_feature (85)..(473): Homolog of NCBI NO: 3927806 NR Description: aminoalcoholphosphotransferase [Pimpinella
  misc_feature (85)..(473): Homolog of NCBI NO: 7488701 NR Description: probable ethanolaminephosphotransferase (EC
AKAHSSRSPSDPFIPLGFLLLRPLRSPSDHPCEAVTQPGAGGLSCTTGHAASRARVLLFRGFRSGDCYSVRLTPSVPRRGEGSEMGYIGHHGVATLRRYKYSGVDHSLVAKYILQPFWSRFVNIFPLWFPPNMITLTGFMFLLTSAFLGFLYSPHLDTAPPRWVHLAHGLLLFLYQTFDAVDGKQARRTNSSSPLGELFDHGCDALACAFESLAFGSTAMCGKATFWFWFISAVPFYFATWEHFFTNTLILPIVNGPTEGLMLIYLCHFFTFFTGAEWWAQDFQKSMPLLGWVPLISEIPVYDIVLCLMIAFAVIPTIGSNIHNVYKVVEARKGSMLLALAMLFPFGLLLAGVLVWSYLSPSDIMRTQPHLLIIGTGFAFGFLVGRMILAHLCDEPKGLKTGMCMSLAYFPFAIANALTARLDDGNPLVDEQLVLLMYCLFTVALYMHFATSVIHEITNALGIHCFRITRKKA

SEQ ID NO: 18913 - protein, 389 aa, Zea mays subsp. mays
  peptide (1)..(389): Ceres Seq. ID no. 12435335
  misc_feature (86)..(226): Pfam Name: CDP-alcohol phosphatidyltransferase Pfam Description: CDP-alcohol phosphatidyltransferase
  misc_feature (14)..(387): Homolog of NCBI NO: 2425056 NR Description: LipB [Dictyostelium discoideum]
  misc_feature (1)..(389): Homolog of NCBI NO: 27762264 NR Description: aminoalcoholphosphotransferase [Brassica napus]
  misc_feature (1)..(321): Homolog of NCBI NO: 18390098 NR Description: aminoalcoholphosphotransferase [Sorghum bicolor]
  misc_feature (1)..(389): Homolog of NCBI NO: 5917787 NR Description: aminoalcoholphosphotransferase [Brassica rapa]
  misc_feature (1)..(387): Homolog of NCBI NO: 30313359 NR Description: aminoalcoholphosphotransferase [Brassica rapa
  misc_feature (1)..(389): Homolog of NCBI NO: 15229490 NR Description: hypothetical protein
  misc_feature (1)..(389): Homolog of NCBI NO: 15222885 NR Description: aminoalcoholphosphotransferase
  misc_feature (1)..(389): Homolog of NCBI NO: 7488522 NR Description: ethanolaminephosphotransferase homolog - turnip
  misc_feature (1)..(389): Homolog of NCBI NO: 3927806 NR Description: aminoalcoholphosphotransferase [Pimpinella
  misc_feature (1)..(389): Homolog of NCBI NO: 7488701 NR Description: probable ethanolaminephosphotransferase (EC
MGYIGHHGVATLRRYKYSGVDHSLVAKYILQPFWSRFVNIFPLWFPPNMITLTGFMFLLTSAFLGFLYSPHLDTAPPRWVHLAHGLLLFLYQTFDAVDGKQARRTNSSSPLGELFDHGCDALACAFESLAFGSTAMCGKATFWFWFISAVPFYFATWEHFFTNTLILPIVNGPTEGLMLIYLCHFFTFFTGAEWWAQDFQKSMPLLGWVPLISEIPVYDIVLCLMIAFAVIPTIGSNIHNVYKVVEARKGSMLLALAMLFPFGLLLAGVLVWSYLSPSDIMRTQPHLLIIGTGFAFGFLVGRMILAHLCDEPKGLKTGMCMSLAYFPFAIANALTARLDDGNPLVDEQLVLLMYCLFTVALYMHFATSVIHEITNALGIHCFRITRKKA

SEQ ID NO: 18914 - protein, 341 aa, Zea mays subsp. mays
  peptide (1)..(341): Ceres Seq. ID no. 12435336
  misc_feature (38)..(178): Pfam Name: CDP-alcohol phosphatidyltransferase Pfam Description: CDP-alcohol phosphatidyltransferase
  misc_feature (1)..(339): Homolog of NCBI NO: 2425056 NR Description: LipB [Dictyostelium discoideum]
  misc_feature (1)..(341): Homolog of NCBI NO: 27762264 NR Description: aminoalcoholphosphotransferase [Brassica napus]
  misc_feature (1)..(273): Homolog of NCBI NO: 18390098 NR Description: aminoalcoholphosphotransferase [Sorghum bicolor]
  misc_feature (1)..(341): Homolog of NCBI NO: 5917787 NR Description: aminoalcoholphosphotransferase [Brassica rapa]
  misc_feature (1)..(339): Homolog of NCBI NO: 30313359 NR Description: aminoalcoholphosphotransferase [Brassica rapa
  misc_feature (1)..(341): Homolog of NCBI NO: 15229490 NR Description: hypothetical protein
  misc_feature (1)..(341): Homolog of NCBI NO: 15222885 NR Description: aminoalcoholphosphotransferase
  misc_feature (1)..(341): Homolog of NCBI NO: 7488522 NR Description: ethanolaminephosphotransferase homolog - turnip
  misc_feature (1)..(341): Homolog of NCBI NO: 3927806 NR Description: aminoalcoholphosphotransferase [Pimpinella
  misc_feature (1)..(341): Homolog of NCBI NO: 7488701 NR Description: probable ethanolaminephosphotransferase (EC
MITLTGFMFLLTSAFLGFLYSPHLDTAPPRWVHLAHGLLLFLYQTFDAVDGKQARRTNSSSPLGELFDHGCDALACAFESLAFGSTAMCGKATFWFWFISAVPFYFATWEHFFTNTLILPIVNGPTEGLMLIYLCHFFTFFTGAEWWAQDFQKSMPLLGWVPLISEIPVYDIVLCLMIAFAVIPTIGSNIHNVYKVVEARKGSMLLALAMLFPFGLLLAGVLVWSYLSPSDIMRTQPHLLIIGTGFAFGFLVGRMILAHLCDEPKGLKTGMCMSLAYFPFAIANALTARLDDGNPLVDEQLVLLMYCLFTVALYMHFATSVIHEITNALGIHCFRITRKKA

SEQ ID NO: 18915 - DNA, 883 bp, Zea mays subsp. mays
  misc_feature (1)..(883): Ceres Seq. ID no. 12382302
  misc_feature: MA Experiment ID: 108543 Result: Up-regulated in Transcription
  misc_feature: MA Experiment ID: 20000627 Result: Up-regulated in Transcription
  misc_feature: MA Experiment 20000627 PARAMETER Experiment Name: Zm_Herbicide-Treatments_P Parameter: Timepoint (hr) Value: 12
  misc_feature: MA Experiment 20000627 PARAMETER Experiment Name: Zm_Herbicide-Treatments_P Parameter: Tissue Value: Aerial
  misc_feature: MA Experiment 20000627 PARAMETER Experiment Name: Zm_Herbicide-Treatments_P Parameter: Treatment Value: Finale vs. No Treatment
gctccaaccatattcaactgcgtaaggccaccctgtcatgcttgactggtcctcttgtgatatgttcatgttaatagcatgatgtcttttgttctattggaaaataaaaagtctccctggactctaaaatcaatgcctgtgaacacatgaactgtttgtgtcacccatgttcctctgctccttggcactttctgatgcatgctcaaatgcttaagaaagactcatagaagcgactcctattcctatgccaggtcattgagataccaaggggcagcaaggttaaatatgaacttgacaagaaaactggactgatcaaggtggaccgtgtgctgtattcatcagttgtttaccctcacaactatggattcattcctcgcacgctttgtgaagacagtgatcctttggatgtactggttataatgcaggagcctgttatcccaggctgtttcctacgtgcgaaggccatcggccttatgccgatgattgatcagggagaggcagatgacaagatcattgcagtgtgcgctgatgatcccgagtacaggcattacaatgatatcaaggagctcccacctcaccgcttggctgaaatcaggcgcttcttcgaggactacaagaagaatgagaacaaggaggttgctgtgaatgactttctaccagcgagcgccgcttatgaagccatacagcactctatggacctgtatgctacatacatcgttgagggcctgaggaggtaggattctgatggctaggaaaggtggggaggatgttgacgaaaaactgggagaccatttaccgcatggaacgagtaccgttattattttatttgtgtcgtgtatactgcagccagtaatagtaatctgcaactgtgcgttaaatggtc

SEQ ID NO: 18916 - protein, 105 aa, Zea mays subsp. mays
  peptide (1)..(105): Ceres Seq. ID no. 12382303
  misc_feature (1)..(96): Pfam Name: Inorganic pyrophosphatase Pfam Description: Inorganic pyrophosphatase
  misc_feature (1)..(105): Homolog of NCBI NO: 7436031 NR Description: probable inorganic diphosphatase (EC 3.6.1.1),
  misc_feature (1)..(105): Homolog of NCBI NO: 26451240 NR Description: putative inorganic pyrophosphatase [Arabidopsis
  misc_feature (1)..(105): Homolog of NCBI NO: 2500047 NR Description: Soluble inorganic pyrophosphatase (Pyrophosphate
  misc_feature (1)..(105): Homolog of NCBI NO: 15226453 NR Description: putative inorganic pyrophosphatase; protein id:
  misc_feature (1)..(105): Homolog of NCBI NO: 40642617 NR Description: soluble pyrophosphatase [Beta vulgaris]
  misc_feature (1)..(105): Homolog of NCBI NO: 5669924 NR Description: soluble inorganic pyrophosphatase
  misc_feature (1)..(105): Homolog of NCBI NO: 15223288 NR Description: soluble inorganic pyrophosphatase, putative
  misc_feature (1)..(105): Homolog of NCBI NO: 6752884 NR Description: soluble inorganic pyrophosphatase [Malus x
  misc_feature (1)..(105): Homolog of NCBI NO: 21593570 NR Description: inorganic pyrophosphatase-like protein
  misc_feature (1)..(105): Homolog of NCBI NO: 15231849 NR Description: inorganic pyrophosphatase -like protein
MQEPVIPGCFLRAKAIGLMPMIDQGEADDKIIAVCADDPEYRHYNDIKELPPHRLAEIRRFFEDYKKNENKEVAVNDFLPASAAYEAIQHSMDLYATYIVEGLRR

SEQ ID NO: 18917 - protein, 87 aa, Zea mays subsp. mays
  peptide (1)..(87): Ceres Seq. ID no. 12382304
  misc_feature (1)..(78): Pfam Name: Inorganic pyrophosphatase Pfam Description: Inorganic pyrophosphatase
  misc_feature (1)..(87): Homolog of NCBI NO: 15226453 NR Description: putative inorganic pyrophosphatase; protein id:
  misc_feature (1)..(87): Homolog of NCBI NO: 40642617 NR Description: soluble pyrophosphatase [Beta vulgaris]
  misc_feature (1)..(87): Homolog of NCBI NO: 5669924 NR Description: soluble inorganic pyrophosphatase
  misc_feature (1)..(87): Homolog of NCBI NO: 15223288 NR Description: soluble inorganic pyrophosphatase, putative
  misc_feature (1)..(87): Homolog of NCBI NO: 26451240 NR Description: putative inorganic pyrophosphatase [Arabidopsis
  misc_feature (1)..(87): Homolog of NCBI NO: 2500047 NR Description: Soluble inorganic pyrophosphatase (Pyrophosphate
  misc_feature (1)..(87): Homolog of NCBI NO: 7436031 NR Description: probable inorganic diphosphatase (EC 3.6.1.1),
  misc_feature (1)..(87): Homolog of NCBI NO: 6752884 NR Description: soluble inorganic pyrophosphatase [Malus x
  misc_feature (1)..(87): Homolog of NCBI NO: 21593570 NR Description: inorganic pyrophosphatase-like protein
  misc_feature (1)..(87): Homolog of NCBI NO: 15231849 NR Description: inorganic pyrophosphatase -like protein
MPMIDQGEADDKIIAVCADDPEYRHYNDIKELPPHRLAEIRRFFEDYKKNENKEVAVNDFLPASAAYEAIQHSMDLYATYIVEGLRR

SEQ ID NO: 18918 - protein, 85 aa, Zea mays subsp. mays
  peptide (1)..(85): Ceres Seq. ID no. 12382305
  misc_feature (1)..(76): Pfam Name: Inorganic pyrophosphatase Pfam Description: Inorganic pyrophosphatase
  misc_feature (1)..(85): Homolog of NCBI NO: 7436031 NR Description: probable inorganic diphosphatase (EC 3.6.1.1),
  misc_feature (1)..(85): Homolog of NCBI NO: 26451240 NR Description: putative inorganic pyrophosphatase [Arabidopsis
  misc_feature (1)..(85): Homolog of NCBI NO: 2500047 NR Description: Soluble inorganic pyrophosphatase (Pyrophosphate
  misc_feature (1)..(85): Homolog of NCBI NO: 15226453 NR Description: putative inorganic pyrophosphatase; protein id:
  misc_feature (1)..(85): Homolog of NCBI NO: 40642617 NR Description: soluble pyrophosphatase [Beta vulgaris]
  misc_feature (1)..(85): Homolog of NCBI NO: 5669924 NR Description: soluble inorganic pyrophosphatase
  misc_feature (1)..(85): Homolog of NCBI NO: 15223288 NR Description: soluble inorganic pyrophosphatase, putative
  misc_feature (1)..(85): Homolog of NCBI NO: 6752884 NR Description: soluble inorganic pyrophosphatase [Malus x
  misc_feature (1)..(85): Homolog of NCBI NO: 21593570 NR Description: inorganic pyrophosphatase-like protein
  misc_feature (1)..(85): Homolog of NCBI NO: 15231849 NR Description: inorganic pyrophosphatase -like protein
MIDQGEADDKIIAVCADDPEYRHYNDIKELPPHRLAEIRRFFEDYKKNENKEVAVNDFLPASAAYEAIQHSMDLYATYIVEGLRR

SEQ ID NO: 18919 - DNA, 1521 bp, Zea mays subsp. mays
  misc_feature (1)..(1521): Ceres Seq. ID no. 12375686
  misc_feature: MA Experiment ID: 20000492 Result: Down-regulated in Transcription
  misc_feature: MA Experiment 20000492 PARAMETER Experiment Name: Zm_Hybrid_Seed_Dev_P Parameter: DAP Value: 12
  misc_feature: MA Experiment 20000492 PARAMETER Experiment Name: Zm_Hybrid_Seed_Dev_P Parameter: Organism Value: Zea mays
  misc_feature: MA Experiment 20000492 PARAMETER Experiment Name: Zm_Hybrid_Seed_Dev_P Parameter: Plant Line Value: 35A19
  misc_feature: MA Experiment 20000492 PARAMETER Experiment Name: Zm_Hybrid_Seed_Dev_P Parameter: Tissue Value: Fert Kernel vs. Unfert Floret
gcacgagaccattacctagaacatcctaatcgaaaaacaaacaatggctttccaccaaagatcagtgagcctgccgtccaagagcctcaccaaggaggccgaagtcgaggccgaactgcaaagcctggaggacgccgcctctcccccctcctcctcctcctcctcctcaaccgtcgcggcggtgcgcgacggtctgacgaggctcggagacgtgtacggacacatcgaggagatcgtccacctccccagtaaccaagcctgcaccgtccagcagcagcggaaggagctggacgcggagatggagcgctctctggacctcatcgacctctgcaacgcgacgcaggagagcctcgccgagctgaaggccgccgtccaggacctgctggcgggtctcaggaggagggacgacgcgagcgtccaggccaaggtccagtcgtacgtccgcctggccaagaacgcgcggaagcagctcaggaaggccggcaggagggccgctgccgcctctggcagggaggagcgcgagtgcagtctcgtcatcaggctgctgctcagggccaggctggtcgctgcctccctcctcggctcggcgctgcagtgcctcgcgggcgtggcgaagcaggtggtgactctgacgcccaggaggtcccttgtctccaaggcgttgcagaggagaagcaaggcggtcgtctgcgaggagggccagccggccaggtgctggcgctggagcgcgtcgtcgttggagagcttgagcgtggagcggagcttctgttcaggaggatggtccagaccagagtcgccctcctcaacgtccttagctcgtagatcctcctcgtcttcatgtgtagcgcgcgtcctgcgattggcctccgcgttttagaggatcctccaatctacatatgtgtacagtttttgtagatagatgtgcagtatgtagattgtatgatcaatgccctgcagaggatcttgaactggcgaagctgttggtaagacccggcttccagttcatggacgacccaacgatgaaggacgagacgctgctgacggacggcaactacgggtccgtgaagagggtgtttgtcgtcgccaaagccgacagaagcagcaccgaggagatgcagcgccggatggtggagctgagccccggcgcggacgtcgaggaggtcgccggagccgatcacatggccatgctctccaagccaacggaggtctgcgaagttctggtcaggattgccggcaggtacgactgagaagaagacgggcaatgggtgcttcagtctgctacgtacctttcagttcaagtgtgctggattgctagcaatgactgttatgcaagcgatccacaagtataatcgtgtaagcgagcttcctgatccgttagttcatgatccaagactgctagggggtgttgttttctttgcaagttcacagtcgctgacgcatgtgccatgtggagttgcgctgcagggattcaaactgattttaagaagcgtcatggctaaacgaataatgctacactttctt

SEQ ID NO: 18920 - protein, 277 aa, Zea mays subsp. mays
  peptide (1)..(277): Ceres Seq. ID no. 12375687
  misc_feature (50)..(209): Pfam Name: Arabidopsis protein of unknown function Pfam Description: Arabidopsis protein of unknown function
  misc_feature (1)..(187): Homolog of NCBI NO: 15237103 NR Description: putative protein; protein id: At4g35710.1
  misc_feature (1)..(217): Homolog of NCBI NO: 15227363 NR Description: hypothetical protein; protein id: At2g17070.1
  misc_feature (1)..(217): Homolog of NCBI NO: 15227365 NR Description: hypothetical protein; protein id: At2g17080.1
MAFHQRSVSLPSKSLTKEAEVEAELQSLEDAASPPSSSSSSSTVAAVRDGLTRLGDVYGHIEEIVHLPSNQACTVQQQRKELDAEMERSLDLIDLCNATQESLAELKAAVQDLLAGLRRRDDASVQAKVQSYVRLAKNARKQLRKAGRRAAAASGREERECSLVIRLLLRARLVAASLLGSALQCLAGVAKQVVTLTPRRSLVSKALQRRSKAVVCEEGQPARCWRWSASSLESLSVERSFCSGGWSRPESPSSTSLARRSSSSSCVARVLRLASAF

SEQ ID NO: 18921 - protein, 192 aa, Zea mays subsp. mays
  peptide (1)..(192): Ceres Seq. ID no. 12375688
  misc_feature (1)..(124): Pfam Name: Arabidopsis protein of unknown function Pfam Description: Arabidopsis protein of unknown function
  misc_feature (1)..(102): Homolog of NCBI NO: 15237103 NR Description: putative protein; protein id: At4g35710.1
  misc_feature (1)..(132): Homolog of NCBI NO: 15227363 NR Description: hypothetical protein; protein id: At2g17070.1
  misc_feature (1)..(132): Homolog of NCBI NO: 15227365 NR Description: hypothetical protein; protein id: At2g17080.1
MERSLDLIDLCNATQESLAELKAAVQDLLAGLRRRDDASVQAKVQSYVRLAKNARKQLRKAGRRAAAASGREERECSLVIRLLLRARLVAASLLGSALQCLAGVAKQVVTLTPRRSLVSKALQRRSKAVVCEEGQPARCWRWSASSLESLSVERSFCSGGWSRPESPSSTSLARRSSSSSCVARVLRLASAF

SEQ ID NO: 18922 - DNA, 1192 bp, Zea mays subsp. mays
  misc_feature (1)..(1192): Ceres Seq. ID no. 12420040
  misc_feature: MA Experiment ID: 108504 Result: Up-regulated in Transcription
  misc_feature: MA Experiment 108504 PARAMETER Experiment Name: Zm_Drought_P Parameter: Age (day) Value: 8
  misc_feature: MA Experiment 108504 PARAMETER Experiment Name: Zm_Drought_P Parameter: Organism Value: Zea mays
  misc_feature: MA Experiment 108504 PARAMETER Experiment Name: Zm_Drought_P Parameter: Plant Line Value: 35A19
  misc_feature: MA Experiment 108504 PARAMETER Experiment Name: Zm_Drought_P Parameter: Timepoint (hr) Value: 12
  misc_feature: MA Experiment 108504 PARAMETER Experiment Name: Zm_Drought_P Parameter: Tissue Value: Aerial
  misc_feature: MA Experiment 108504 PARAMETER Experiment Name: Zm_Drought_P Parameter: Treatment Value: Drought vs. No Drought
  misc_feature: MA Experiment ID: 108513 Result: Up-regulated in Transcription
  misc_feature: MA Experiment 108513 PARAMETER Experiment Name: Zm_100uM_ABA_P Parameter: Age (day) Value: 8
  misc_feature: MA Experiment 108513 PARAMETER Experiment Name: Zm_100uM_ABA_P Parameter: Organism Value: Zea mays
  misc_feature: MA Experiment 108513 PARAMETER Experiment Name: Zm_100uM_ABA_P Parameter: Plant Line Value: 35A19
  misc_feature: MA Experiment 108513 PARAMETER Experiment Name: Zm_100uM_ABA_P Parameter: Timepoint (hr) Value: 6
  misc_feature: MA Experiment 108513 PARAMETER Experiment Name: Zm_100uM_ABA_P Parameter: Tissue Value: Aerial
  misc_feature: MA Experiment 108513 PARAMETER Experiment Name: Zm_100uM_ABA_P Parameter: Treatment Value: 100uM ABA vs. No Treatment
  misc_feature: MA Experiment ID: 108527 Result: Up-regulated in Transcription
  misc_feature: MA Experiment 108527 PARAMETER Experiment Name: Zm_5mM_NO_P Parameter: Age (day) Value: 8
  misc_feature: MA Experiment 108527 PARAMETER Experiment Name: Zm_5mM_NO_P Parameter: Organism Value: Zea mays
  misc_feature: MA Experiment 108527 PARAMETER Experiment Name: Zm_5mM_NO_P Parameter: Plant Line Value: 35A19
  misc_feature: MA Experiment 108527 PARAMETER Experiment Name: Zm_5mM_NO_P Parameter: Timepoint (hr) Value: 6
  misc_feature: MA Experiment 108527 PARAMETER Experiment Name: Zm_5mM_NO_P Parameter: Tissue Value: Aerial
  misc_feature: MA Experiment 108527 PARAMETER Experiment Name: Zm_5mM_NO_P Parameter: Treatment Value: 5mM NO vs. No Treatment
  misc_feature: MA Experiment ID: 108528 Result: Down-regulated in Transcription
  misc_feature: MA Experiment 108528 PARAMETER Experiment Name: Zm_Imbibed_Seeds_P Parameter: Age (day) Value: 5 vs. 2
  misc_feature: MA Experiment 108528 PARAMETER Experiment Name: Zm_Imbibed_Seeds_P Parameter: Organism Value: Zea mays
  misc_feature: MA Experiment 108528 PARAMETER Experiment Name: Zm_Imbibed_Seeds_P Parameter: Plant Line Value: 35A19
  misc_feature: MA Experiment 108528 PARAMETER Experiment Name: Zm_Imbibed_Seeds_P Parameter: Tissue Value: Aerial vs. Embryo
  misc_feature: MA Experiment ID: 108529 Result: Down-regulated in Transcription
  misc_feature: MA Experiment 108529 PARAMETER Experiment Name: Zm_Imbibed_Seeds_P Parameter: Age (day) Value: 5 vs. 2
  misc_feature: MA Experiment 108529 PARAMETER Experiment Name: Zm_Imbibed_Seeds_P Parameter: Organism Value: Zea mays
  misc_feature: MA Experiment 108529 PARAMETER Experiment Name: Zm_Imbibed_Seeds_P Parameter: Plant Line Value: 35A19
  misc_feature: MA Experiment 108529 PARAMETER Experiment Name: Zm_Imbibed_Seeds_P Parameter: Tissue Value: Roots vs. Embryo
  misc_feature: MA Experiment ID: 108530 Result: Down-regulated in Transcription
  misc_feature: MA Experiment 108530 PARAMETER Experiment Name: Zm_Imbibed_Seeds_P Parameter: Age (day) Value: 6 vs. 2
  misc_feature: MA Experiment 108530 PARAMETER Experiment Name: Zm_Imbibed_Seeds_P Parameter: Organism Value: Zea mays
  misc_feature: MA Experiment 108530 PARAMETER Experiment Name: Zm_Imbibed_Seeds_P Parameter: Plant Line Value: 35A19
  misc_feature: MA Experiment 108530 PARAMETER Experiment Name: Zm_Imbibed_Seeds_P Parameter: Tissue Value: Aerial vs. Embryo
  misc_feature: MA Experiment ID: 108536 Result: Up-regulated in Transcription
  misc_feature: MA Experiment 108536 PARAMETER Experiment Name: Zm_Meristem_P Parameter: Age (day) Value: 8
  misc_feature: MA Experiment 108536 PARAMETER Experiment Name: Zm_Meristem_P Parameter: Organism Value: Zea mays
  misc_feature: MA Experiment 108536 PARAMETER Experiment Name: Zm_Meristem_P Parameter: Plant Line Value: 35A19
  misc_feature: MA Experiment 108536 PARAMETER Experiment Name: Zm_Meristem_P Parameter: Tissue Value: Shoot Meristem vs. Above Shoot Meristem
  misc_feature: MA Experiment ID: 108540 Result: Up-regulated in Transcription
  misc_feature: MA Experiment 108540 PARAMETER Experiment Name: Zm_20percent_PEG_P Parameter: Age (day) Value: 8
  misc_feature: MA Experiment 108540 PARAMETER Experiment Name: Zm_20percent_PEG_P Parameter: Organism Value: Zea mays
  misc_feature: MA Experiment 108540 PARAMETER Experiment Name: Zm_20percent_PEG_P Parameter: Plant Line Value: 35A19
  misc_feature: MA Experiment 108540 PARAMETER Experiment Name: Zm_20percent_PEG_P Parameter: Timepoint (hr) Value: 6
  misc_feature: MA Experiment 108540 PARAMETER Experiment Name: Zm_20percent_PEG_P Parameter: Tissue Value: Aerial
  misc_feature: MA Experiment 108540 PARAMETER Experiment Name: Zm_20percent_PEG_P Parameter: Treatment Value: 20percent PEG vs. No Treatment
  misc_feature: MA Experiment ID: 108542 Result: Up-regulated in Transcription
  misc_feature: MA Experiment 108542 PARAMETER Experiment Name: Zm_150mM_NaCl_P Parameter: Age (day) Value: 8
  misc_feature: MA Experiment 108542 PARAMETER Experiment Name: Zm_150mM_NaCl_P Parameter: Organism Value: Zea mays
  misc_feature: MA Experiment 108542 PARAMETER Experiment Name: Zm_150mM_NaCl_P Parameter: Plant Line Value: 35A19
  misc_feature: MA Experiment 108542 PARAMETER Experiment Name: Zm_150mM_NaCl_P Parameter: Timepoint (hr) Value: 6
  misc_feature: MA Experiment 108542 PARAMETER Experiment Name: Zm_150mM_NaCl_P Parameter: Tissue Value: Aerial
  misc_feature: MA Experiment 108542 PARAMETER Experiment Name: Zm_150mM_NaCl_P Parameter: Treatment Value: 150mM NaCl vs. No Treatment
  misc_feature: MA Experiment ID: 108556 Result: Up-regulated in Transcription
  misc_feature: MA Experiment 108556 PARAMETER Experiment Name: Zm_Drought_P Parameter: Age (day) Value: 9
  misc_feature: MA Experiment 108556 PARAMETER Experiment Name: Zm_Drought_P Parameter: Organism Value: Zea mays
  misc_feature: MA Experiment 108556 PARAMETER Experiment Name: Zm_Drought_P Parameter: Plant Line Value: 35A19
  misc_feature: MA Experiment 108556 PARAMETER Experiment Name: Zm_Drought_P Parameter: Timepoint (hr) Value: 24
  misc_feature: MA Experiment 108556 PARAMETER Experiment Name: Zm_Drought_P Parameter: Tissue Value: Aerial
  misc_feature: MA Experiment 108556 PARAMETER Experiment Name: Zm_Drought_P Parameter: Treatment Value: Drought vs. No Drought
  misc_feature: MA Experiment ID: 108559 Result: Up-regulated in Transcription
  misc_feature: MA Experiment 108559 PARAMETER Experiment Name: Zm_5mM_NO_P Parameter: Age (day) Value: 8
  misc_feature: MA Experiment 108559 PARAMETER Experiment Name: Zm_5mM_NO_P Parameter: Organism Value: Zea mays
  misc_feature: MA Experiment 108559 PARAMETER Experiment Name: Zm_5mM_NO_P Parameter: Plant Line Value: 35A19
  misc_feature: MA Experiment 108559 PARAMETER Experiment Name: Zm_5mM_NO_P Parameter: Timepoint (hr) Value: 12
  misc_feature: MA Experiment 108559 PARAMETER Experiment Name: Zm_5mM_NO_P Parameter: Tissue Value: Aerial
  misc_feature: MA Experiment 108559 PARAMETER Experiment Name: Zm_5mM_NO_P Parameter: Treatment Value: 5mM NO vs. No Treatment
  misc_feature: MA Experiment ID: 20000477 Result: Up-regulated in Transcription
  misc_feature: MA Experiment 20000477 PARAMETER Experiment Name: Zm_5mM_SA_P Parameter: Age (day) Value: 10
  misc_feature: MA Experiment 20000477 PARAMETER Experiment Name: Zm_5mM_SA_P Parameter: Organism Value: Zea mays
  misc_feature: MA Experiment 20000477 PARAMETER Experiment Name: Zm_5mM_SA_P Parameter: Plant Line Value: 35A19
  misc_feature: MA Experiment 20000477 PARAMETER Experiment Name: Zm_5mM_SA_P Parameter: Timepoint (hr) Value: 48
  misc_feature: MA Experiment 20000477 PARAMETER Experiment Name: Zm_5mM_SA_P Parameter: Tissue Value: Aerial
  misc_feature: MA Experiment 20000477 PARAMETER Experiment Name: Zm_5mM_SA_P Parameter: Treatment Value: 5mM SA vs. No Treatment
  misc_feature: MA Experiment ID: 20000532 Result: Up-regulated in Transcription
  misc_feature: MA Experiment 20000532 PARAMETER Experiment Name: Zm_0.001percent_MeJA_P Parameter: Age (day) Value: 10
  misc_feature: MA Experiment 20000532 PARAMETER Experiment Name: Zm_0.001percent_MeJA_P Parameter: Organism Value: Zea mays
  misc_feature: MA Experiment 20000532 PARAMETER Experiment Name: Zm_0.001percent_MeJA_P Parameter: Plant Line Value: 35A19
  misc_feature: MA Experiment 20000532 PARAMETER Experiment Name: Zm_0.001percent_MeJA_P Parameter: Timepoint (hr) Value: 48
  misc_feature: MA Experiment 20000532 PARAMETER Experiment Name: Zm_0.001percent_MeJA_P Parameter: Tissue Value: Aerial
  misc_feature: MA Experiment 20000532 PARAMETER Experiment Name: Zm_0.001percent_MeJA_P Parameter: Treatment Value: 0.001percent MeJA vs. No Treatment
  misc_feature: MA Experiment ID: 20000533 Result: Up-regulated in Transcription
  misc_feature: MA Experiment 20000533 PARAMETER Experiment Name: Zm_0.001percent_MeJA_P Parameter: Age (day) Value: 11
  misc_feature: MA Experiment 20000533 PARAMETER Experiment Name: Zm_0.001percent_MeJA_P Parameter: Organism Value: Zea mays
  misc_feature: MA Experiment 20000533 PARAMETER Experiment Name: Zm_0.001percent_MeJA_P Parameter: Plant Line Value: 35A19
  misc_feature: MA Experiment 20000533 PARAMETER Experiment Name: Zm_0.001percent_MeJA_P Parameter: Timepoint (hr) Value: 72
  misc_feature: MA Experiment 20000533 PARAMETER Experiment Name: Zm_0.001percent_MeJA_P Parameter: Tissue Value: Aerial
  misc_feature: MA Experiment 20000533 PARAMETER Experiment Name: Zm_0.001percent_MeJA_P Parameter: Treatment Value: 0.001percent MeJA vs. No Treatment
  misc_feature: MA Experiment ID: 20000626 Result: Up-regulated in Transcription
  misc_feature: MA Experiment 20000626 PARAMETER Experiment Name: Zm_Herbicide-Treatments_P Parameter: Timepoint (hr) Value: 12
  misc_feature: MA Experiment 20000626 PARAMETER Experiment Name: Zm_Herbicide-Treatments_P Parameter: Tissue Value: Aerial
  misc_feature: MA Experiment 20000626 PARAMETER Experiment Name: Zm_Herbicide-Treatments_P Parameter: Treatment Value: Roundup vs. No Treatment
acaccactgatcaagcaacaggacgatcgagcaagaagcaagcagcagtaacaagaaaccatcatcgatccatgtatccaccaatggcggcgctcggaggacggcggaggagggcgtcgtcagcggccctcctgctagccttgttggcggtggccctggtctccctggccggcccagccacggccgcggggaacaagaccgggcaggtgaccgtgttctggggccggaacaaggccgagggcacgctgcgcgaggcctgcgactcgggcctctacaccatggtgatcatgtccttcctcgacgtctacggcccgcagcgcggcggctaccagtaccacctggacctgtcgggccacccgacggccggcatcggggacgacatcaagcactgccagttcgtgggcgtgccggtgacgctctccgtcggcggcttcggctccgggctactcgctcccgtcgacgcaggcggcgctggacctgttcgactacctctggaacgccttcctcggcgggtcgaagccgggcgtgcgccgccccttcggcgacgcgtggctcgacggcgtcgacctgttcctggagcgcggctcgcccgccgaccgctacgacgtgctggcgctcgagctcgccaagcacaacatccgcggcgggcccggcaagccgctgcacctgacggccacgccgcgctgcgggttcccgcccgccggctacctgcgccgcgcgctcgacacgggcatcttcgagcgcgtccacgtccggatctacgacgacgccgactgcgaggccaggtggcacctcgcgtgggacgagtggacggcggcgtacccggccaccaggttctacgtcggcctcacggcgtcggagatgacgcacggctgggtgcaccccaagaacgtctactacgacgtcgcgccgtccggcgcagaaggcggacaactacggcggcttcatgatctgggaccgctactacgacaaactctccaactacaccagcatggtcaaggactacgcttgattggatttctcgactcagttcagagcagacatgcatgctagctgcgtcagccgcttcgatctagctcaccgacctatataagccgaagtactgtgtagtgtgtttgcattttattgtaagaaactaagaaggaataaattggcgaataaacaagagtaaaatacaccgggttgttgagtg

SEQ ID NO: 18923 - protein, 315 aa, Zea mays subsp. mays
  peptide (1)..(315): Ceres Seq. ID no. 12420041
  misc_feature (67)..(151): Pfam Name: Glycosyl hydrolases family 18 Pfam Description: Glycosyl hydrolases family 18
  misc_feature (42)..(147): Homolog of NCBI NO: 38346492 NR Description: OSJNBa0020I02.6 [Oryza sativa (japonica
  misc_feature (34)..(145): Homolog of NCBI NO: 4884516 NR Description: class III chitinase homologue (OsChib3H-b) [Oryza
  misc_feature (31)..(145): Homolog of NCBI NO: 7451380 NR Description: chitinase (EC 3.2.1.14) III C10923 - rice
  misc_feature (42)..(157): Homolog of NCBI NO: 7451377 NR Description: chitinase (EC 3.2.1.14) III C00481 - rice
  misc_feature (46)..(157): Homolog of NCBI NO: 7451381 NR Description: chitinase (EC 3.2.1.14) III C10150 - rice
  misc_feature (42)..(154): Homolog of NCBI NO: 18693099 NR Description: putative xylanase inhibitor protein
  misc_feature (28)..(157): Homolog of NCBI NO: 7451378 NR Description: chitinase (EC 3.2.1.14) III C10701 - rice
  misc_feature (40)..(143): Homolog of NCBI NO: 34913272 NR Description: putative xylanase inhibitor protein
  misc_feature (62)..(151): Homolog of NCBI NO: 31615809 NR Description: Chain A, Crystal Structure Of Xylanase Inhibitor
  misc_feature (28)..(151): Homolog of NCBI NO: 20804336 NR Description: xylanase inhibitor protein I [Triticum aestivum]
TTDQATGRSSKKQAAVTRNHHRSMYPPMAALGGRRRRASSAALLLALLAVALVSLAGPATAAGNKTGQVTVFWGRNKAEGTLREACDSGLYTMVIMSFLDVYGPQRGGYQYHLDLSGHPTAGIGDDIKHCQFVGVPVTLSVGGFGSGLLAPVDAGGAGPVRLPLERLPRRVEAGRAPPLRRRVARRRRPVPGARLARRPLRRAGARARQAQHPRRARQAAAPDGHAALRVPARRLPAPRARHGHLRARPRPDLRRRRLRGQVAPRVGRVDGGVPGHQVLRRPHGVGDDARLGAPQERLLRRRAVRRRRRTTTAAS

SEQ ID NO: 18924 - protein, 292 aa, Zea mays subsp. mays
  peptide (1)..(292): Ceres Seq. ID no. 12420042
  misc_feature (44)..(128): Pfam Name: Glycosyl hydrolases family 18 Pfam Description: Glycosyl hydrolases family 18
  misc_feature (19)..(124): Homolog of NCBI NO: 38346492 NR Description: OSJNBa0020I02.6 [Oryza sativa (japonica
  misc_feature (11)..(122): Homolog of NCBI NO: 4884516 NR Description: class III chitinase homologue (OsChib3H-b) [Oryza
  misc_feature (8)..(122): Homolog of NCBI NO: 7451380 NR Description: chitinase (EC 3.2.1.14) III C10923 - rice
  misc_feature (19)..(134): Homolog of NCBI NO: 7451377 NR Description: chitinase (EC 3.2.1.14) III C00481 - rice
  misc_feature (23)..(134): Homolog of NCBI NO: 7451381 NR Description: chitinase (EC 3.2.1.14) III C10150 - rice
  misc_feature (19)..(131): Homolog of NCBI NO: 18693099 NR Description: putative xylanase inhibitor protein
  misc_feature (5)..(134): Homolog of NCBI NO: 7451378 NR Description: chitinase (EC 3.2.1.14) III C10701 - rice
  misc_feature (17)..(120): Homolog of NCBI NO: 34913272 NR Description: putative xylanase inhibitor protein
  misc_feature (39)..(128): Homolog of NCBI NO: 31615809 NR Description: Chain A, Crystal Structure Of Xylanase Inhibitor
  misc_feature (5)..(128): Homolog of NCBI NO: 20804336 NR Description: xylanase inhibitor protein I [Triticum aestivum]
MYPPMAALGGRRRRASSAALLLALLAVALVSLAGPATAAGNKTGQVTVFWGRNKAEGTLREACDSGLYTMVIMSFLDVYGPQRGGYQYHLDLSGHPTAGIGDDIKHCQFVGVPVTLSVGGFGSGLLAPVDAGGAGPVRLPLERLPRRVEAGRAPPLRRRVARRRRPVPGARLARRPLRRAGARARQAQHPRRARQAAAPDGHAALRVPARRLPAPRARHGHLRARPRPDLRRRRLRGQVAPRVGRVDGGVPGHQVLRRPHGVGDDARLGAPQERLLRRRAVRRRRRTTTAAS

SEQ ID NO: 18925 - protein, 288 aa, Zea mays subsp. mays
  peptide (1)..(288): Ceres Seq. ID no. 12420043
  misc_feature (40)..(124): Pfam Name: Glycosyl hydrolases family 18 Pfam Description: Glycosyl hydrolases family 18
  misc_feature (15)..(120): Homolog of NCBI NO: 38346492 NR Description: OSJNBa0020I02.6 [Oryza sativa (japonica
  misc_feature (7)..(118): Homolog of NCBI NO: 4884516 NR Description: class III chitinase homologue (OsChib3H-b) [Oryza
  misc_feature (4)..(118): Homolog of NCBI NO: 7451380 NR Description: chitinase (EC 3.2.1.14) III C10923 - rice
  misc_feature (15)..(130): Homolog of NCBI NO: 7451377 NR Description: chitinase (EC 3.2.1.14) III C00481 - rice
  misc_feature (19)..(130): Homolog of NCBI NO: 7451381 NR Description: chitinase (EC 3.2.1.14) III C10150 - rice
  misc_feature (15)..(127): Homolog of NCBI NO: 18693099 NR Description: putative xylanase inhibitor protein
  misc_feature (1)..(130): Homolog of NCBI NO: 7451378 NR Description: chitinase (EC 3.2.1.14) III C10701 - rice
  misc_feature (13)..(116): Homolog of NCBI NO: 34913272 NR Description: putative xylanase inhibitor protein
  misc_feature (35)..(124): Homolog of NCBI NO: 31615809 NR Description: Chain A, Crystal Structure Of Xylanase Inhibitor
  misc_feature (1)..(124): Homolog of NCBI NO: 20804336 NR Description: xylanase inhibitor protein I [Triticum aestivum]
MAALGGRRRRASSAALLLALLAVALVSLAGPATAAGNKTGQVTVFWGRNKAEGTLREACDSGLYTMVIMSFLDVYGPQRGGYQYHLDLSGHPTAGIGDDIKHCQFVGVPVTLSVGGFGSGLLAPVDAGGAGPVRLPLERLPRRVEAGRAPPLRRRVARRRRPVPGARLARRPLRRAGARARQAQHPRRARQAAAPDGHAALRVPARRLPAPRARHGHLRARPRPDLRRRRLRGQVAPRVGRVDGGVPGHQVLRRPHGVGDDARLGAPQERLLRRRAVRRRRRTTTAAS

SEQ ID NO: 18926 - DNA, 1508 bp, Zea mays subsp. mays
  misc_feature (1)..(1508): Ceres Seq. ID no. 12359110
  misc_feature: MA Experiment ID: 108687 Result: Up-regulated in Transcription
  misc_feature: MA Experiment 108687 PARAMETER Experiment Name: Zm_Embryos-Flowers__P Parameter: Tissue Value: Embryo vs. Aerial+
  misc_feature: MA Experiment ID: 20000479 Result: Up-regulated in Transcription
  misc_feature: MA Experiment 20000479 PARAMETER Experiment Name: Zm_Drought_P Parameter: Age (day) Value: 10
  misc_feature: MA Experiment 20000479 PARAMETER Experiment Name: Zm_Drought_P Parameter: Organism Value: Zea mays
  misc_feature: MA Experiment 20000479 PARAMETER Experiment Name: Zm_Drought_P Parameter: Plant Line Value: 35A19
  misc_feature: MA Experiment 20000479 PARAMETER Experiment Name: Zm_Drought_P Parameter: Timepoint (hr) Value: 48
  misc_feature: MA Experiment 20000479 PARAMETER Experiment Name: Zm_Drought_P Parameter: Tissue Value: Aerial
  misc_feature: MA Experiment 20000479 PARAMETER Experiment Name: Zm_Drought_P Parameter: Treatment Value: Drought vs. No Drought
  misc_feature: MA Experiment ID: 20000535 Result: Up-regulated in Transcription
  misc_feature: MA Experiment 20000535 PARAMETER Experiment Name: Zm_Hybrid_Seed_Dev_P Parameter: DAP Value: 30 vs. 12
  misc_feature: MA Experiment 20000535 PARAMETER Experiment Name: Zm_Hybrid_Seed_Dev_P Parameter: Organism Value: Zea mays
  misc_feature: MA Experiment 20000535 PARAMETER Experiment Name: Zm_Hybrid_Seed_Dev_P Parameter: Plant Line Value: 35A19
  misc_feature: MA Experiment 20000535 PARAMETER Experiment Name: Zm_Hybrid_Seed_Dev_P Parameter: Tissue Value: Embryo vs. Unfert Floret
atcttctctttgtgaaagctgaaacattgacaaatgctggcattccagtccgatcagtcctcaccagctactacaagagccctcagttcttgcagcgcaagcacgacctctacaacagctacaccagtcccgacgaggtcattctttgccccgacagccagcagagcatgtactgccagctactctgcggcctggtggaacgccagaacgtcgtccgtctcggagcagtcttcgcctcagcattcctccggtccatcagcttcctcgagaagcactggcatgacctagtcaccgacatccgaaccggccggatcaatcccagcatcaccaacgccgcatgccgggtggccacggagagctttctcgcgcagcccaaccccgagctagctgacgaagtcgaggcgatatgcagctcggagtcatggaagggcgttcttggcaggctctggcctaacgtcaagtacatcgaggccgtcctgacggggacgatggcgcagtacgtccccatgctcgagttctacagcgacggcaggatccccctggtctgcaccatgtacgcttcctcggagagctacttcggcgtcaacctgcggccgctgtgcagcccgaaggacgtgtcctacaccatcctccccaacatggcctacttcgagttcgtgccgttggacgacggcctcaggctggcggaggatggtgaggctgtggagaaggagaagcttgtcggcctcgtggacgtcaaggtcggatgctactacgagctcgtggttaccacatttgccggtctttacaggtacagggtaggcgatgtactccaggtgacaggcttctacaaccgcgcaccccagttcaaattcatctgccggaggaacgtgatcctgagcgtggacgcagacaagacgaacgaggaagacctccacggcagcgtctcccgggccaagaagatcctggaggaccgaggccacatcctactggagtacaccagcttcaccgacacgtcgacggtgccgggccactacgtcctgttctgggaggtgaaggccacgcccacctccggctccgggggcgcgcggctggacgcgcaggtcctggagagctgctgcgtcgccgtggaggagtcgctggactgcgtgtacaggcggtgcagggcgcacgacaggtccgtggggccgctggagatacggctggtggaagccggcgccttcgacgcgctcatggacctgttggtcagccagggcggctccatcaaccagtacaagacgccacggtgcatccgagccgggcggcgccgcgctggagctgctcgactccaaggccaccgcctcgttcttcagcccccgggatcctgaagctactggtgtctgaggttgttctgctactctgaaactaatcctctgctggatctaaataatctgagaattttcgtctgggttatccccgtttacattgcacttttgtcaggctttgctactatgcaaagaagccttttttctttatttgagattgtgatc

SEQ ID NO: 18927 - protein, 447 aa, Zea mays subsp. mays
  peptide (1)..(447): Ceres Seq. ID no. 12359111
  misc_feature (1)..(425): Pfam Name: GH3 auxin-responsive promoter Pfam Description: GH3 auxin-responsive promoter
  misc_feature (2)..(423): Homolog of NCBI NO: 15227787 NR Description: unknown protein
  misc_feature (2)..(427): Homolog of NCBI NO: 15240601 NR Description: auxin-responsive - like protein; protein id:
  misc_feature (2)..(423): Homolog of NCBI NO: 15235538 NR Description: auxin-responsive GH3 - like protein
  misc_feature (1)..(426): Homolog of NCBI NO: 34910142 NR Description: putative auxin-responsive GH3
  misc_feature (2)..(424): Homolog of NCBI NO: 15237038 NR Description: GH3 like protein
  misc_feature (2)..(424): Homolog of NCBI NO: 17978966 NR Description: AT5g54510/F24B18_13 [Arabidopsis thaliana]
  misc_feature (2)..(424): Homolog of NCBI NO: 15239653 NR Description: auxin-responsive-like protein
  misc_feature (1)..(441): Homolog of NCBI NO: 30690222 NR Description: auxin-regulated GH3 protein -related [Arabidopsis
  misc_feature (1)..(441): Homolog of NCBI NO: 15217844 NR Description: auxin-regulated GH3 protein, putative
  misc_feature (1)..(438): Homolog of NCBI NO: 15227128 NR Description: putative auxin-responsive protein
LLFVKAETLTNAGIPVRSVLTSYYKSPQFLQRKHDLYNSYTSPDEVILCPDSQQSMYCQLLCGLVERQNVVRLGAVFASAFLRSISFLEKHWHDLVTDIRTGRINPSITNAACRVATESFLAQPNPELADEVEAICSSESWKGVLGRLWPNVKYIEAVLTGTMAQYVPMLEFYSDGRIPLVCTMYASSESYFGVNLRPLCSPKDVSYTILPNMAYFEFVPLDDGLRLAEDGEAVEKEKLVGLVDVKVGCYYELVVTTFAGLYRYRVGDVLQVTGFYNRAPQFKFICRRNVILSVDADKTNEEDLHGSVSRAKKILEDRGHILLEYTSFTDTSTVPGHYVLFWEVKATPTSGSGGARLDAQVLESCCVAVEESLDCVYRRCRAHDRSVGPLEIRLVEAGAFDALMDLLVSQGGSINQYKTPRCIRAGRRRAGAARLQGHRLVLQPPGS

SEQ ID NO: 18928 - protein, 392 aa, Zea mays subsp. mays
  peptide (1)..(392): Ceres Seq. ID no. 12359112
  misc_feature (1)..(370): Pfam Name: GH3 auxin-responsive promoter Pfam Description: GH3 auxin-responsive promoter
  misc_feature (1)..(368): Homolog of NCBI NO: 15227787 NR Description: unknown protein
  misc_feature (1)..(372): Homolog of NCBI NO: 15240601 NR Description: auxin-responsive - like protein; protein id:
  misc_feature (1)..(368): Homolog of NCBI NO: 15235538 NR Description: auxin-responsive GH3 - like protein
  misc_feature (1)..(371): Homolog of NCBI NO: 34910142 NR Description: putative auxin-responsive GH3
  misc_feature (1)..(369): Homolog of NCBI NO: 15237038 NR Description: GH3 like protein
  misc_feature (1)..(369): Homolog of NCBI NO: 17978966 NR Description: AT5g54510/F24B18_13 [Arabidopsis thaliana]
  misc_feature (1)..(369): Homolog of NCBI NO: 15239653 NR Description: auxin-responsive-like protein
  misc_feature (1)..(386): Homolog of NCBI NO: 30690222 NR Description: auxin-regulated GH3 protein -related [Arabidopsis
  misc_feature (1)..(386): Homolog of NCBI NO: 15217844 NR Description: auxin-regulated GH3 protein, putative
  misc_feature (1)..(383): Homolog of NCBI NO: 15227128 NR Description: putative auxin-responsive protein
MYCQLLCGLVERQNVVRLGAVFASAFLRSISFLEKHWHDLVTDIRTGRINPSITNAACRVATESFLAQPNPELADEVEAICSSESWKGVLGRLWPNVKYIEAVLTGTMAQYVPMLEFYSDGRIPLVCTMYASSESYFGVNLRPLCSPKDVSYTILPNMAYFEFVPLDDGLRLAEDGEAVEKEKLVGLVDVKVGCYYELVVTTFAGLYRYRVGDVLQVTGFYNRAPQFKFICRRNVILSVDADKTNEEDLHGSVSRAKKILEDRGHILLEYTSFTDTSTVPGHYVLFWEVKATPTSGSGGARLDAQVLESCCVAVEESLDCVYRRCRAHDRSVGPLEIRLVEAGAFDALMDLLVSQGGSINQYKTPRCIRAGRRRAGAARLQGHRLVLQPPGS

SEQ ID NO: 18929 - protein, 285 aa, Zea mays subsp. mays
  peptide (1)..(285): Ceres Seq. ID no. 12359113
  misc_feature (1)..(263): Pfam Name: GH3 auxin-responsive promoter Pfam Description: GH3 auxin-responsive promoter
  misc_feature (1)..(262): Homolog of NCBI NO: 17978966 NR Description: AT5g54510/F24B18_13 [Arabidopsis thaliana]
  misc_feature (1)..(262): Homolog of NCBI NO: 15239653 NR Description: auxin-responsive-like protein
  misc_feature (1)..(279): Homolog of NCBI NO: 30690222 NR Description: auxin-regulated GH3 protein -related [Arabidopsis
  misc_feature (1)..(265): Homolog of NCBI NO: 15240601 NR Description: auxin-responsive - like protein; protein id:
  misc_feature (1)..(264): Homolog of NCBI NO: 34910142 NR Description: putative auxin-responsive GH3
  misc_feature (1)..(262): Homolog of NCBI NO: 15237038 NR Description: GH3 like protein
  misc_feature (1)..(261): Homolog of NCBI NO: 15235538 NR Description: auxin-responsive GH3 - like protein
  misc_feature (1)..(261): Homolog of NCBI NO: 15227787 NR Description: unknown protein
  misc_feature (1)..(279): Homolog of NCBI NO: 15217844 NR Description: auxin-regulated GH3 protein, putative
  misc_feature (1)..(276): Homolog of NCBI NO: 15227128 NR Description: putative auxin-responsive protein
MAQYVPMLEFYSDGRIPLVCTMYASSESYFGVNLRPLCSPKDVSYTILPNMAYFEFVPLDDGLRLAEDGEAVEKEKLVGLVDVKVGCYYELVVTTFAGLYRYRVGDVLQVTGFYNRAPQFKFICRRNVILSVDADKTNEEDLHGSVSRAKKILEDRGHILLEYTSFTDTSTVPGHYVLFWEVKATPTSGSGGARLDAQVLESCCVAVEESLDCVYRRCRAHDRSVGPLEIRLVEAGAFDALMDLLVSQGGSINQYKTPRCIRAGRRRAGAARLQGHRLVLQPPGS

SEQ ID NO: 18930 - DNA, 938 bp, Zea mays subsp. mays
  misc_feature (1)..(938): Ceres Seq. ID no. 12367866
  misc_feature: MA Experiment ID: 108504 Result: Down-regulated in Transcription
  misc_feature: MA Experiment 108504 PARAMETER Experiment Name: Zm_Drought_P Parameter: Age (day) Value: 8
  misc_feature: MA Experiment 108504 PARAMETER Experiment Name: Zm_Drought_P Parameter: Organism Value: Zea mays
  misc_feature: MA Experiment 108504 PARAMETER Experiment Name: Zm_Drought_P Parameter: Plant Line Value: 35A19
  misc_feature: MA Experiment 108504 PARAMETER Experiment Name: Zm_Drought_P Parameter: Timepoint (hr) Value: 12
  misc_feature: MA Experiment 108504 PARAMETER Experiment Name: Zm_Drought_P Parameter: Tissue Value: Aerial
  misc_feature: MA Experiment 108504 PARAMETER Experiment Name: Zm_Drought_P Parameter: Treatment Value: Drought vs. No Drought
  misc_feature: MA Experiment ID: 108522 Result: Down-regulated in Transcription
  misc_feature: MA Experiment 108522 PARAMETER Experiment Name: Zm_42deg_Heat_P Parameter: Age (day) Value: 8
  misc_feature: MA Experiment 108522 PARAMETER Experiment Name: Zm_42deg_Heat_P Parameter: Organism Value: Zea mays
  misc_feature: MA Experiment 108522 PARAMETER Experiment Name: Zm_42deg_Heat_P Parameter: Plant Line Value: 35A19
  misc_feature: MA Experiment 108522 PARAMETER Experiment Name: Zm_42deg_Heat_P Parameter: Temperature (deg C) Value: 42 vs. 22
  misc_feature: MA Experiment 108522 PARAMETER Experiment Name: Zm_42deg_Heat_P Parameter: Timepoint (hr) Value: 1
  misc_feature: MA Experiment 108522 PARAMETER Experiment Name: Zm_42deg_Heat_P Parameter: Tissue Value: Aerial
  misc_feature: MA Experiment ID: 108529 Result: Up-regulated in Transcription
  misc_feature: MA Experiment 108529 PARAMETER Experiment Name: Zm_Imbibed_Seeds_P Parameter: Age (day) Value: 5 vs. 2
  misc_feature: MA Experiment 108529 PARAMETER Experiment Name: Zm_Imbibed_Seeds_P Parameter: Organism Value: Zea mays
  misc_feature: MA Experiment 108529 PARAMETER Experiment Name: Zm_Imbibed_Seeds_P Parameter: Plant Line Value: 35A19
  misc_feature: MA Experiment 108529 PARAMETER Experiment Name: Zm_Imbibed_Seeds_P Parameter: Tissue Value: Roots vs. Embryo
  misc_feature: MA Experiment ID: 108543 Result: Down-regulated in Transcription
  misc_feature: MA Experiment ID: 108689 Result: Down-regulated in Transcription
  misc_feature: MA Experiment 108689 PARAMETER Experiment Name: Zm_Drought_Roots_P Parameter: Age (day) Value: 9
  misc_feature: MA Experiment 108689 PARAMETER Experiment Name: Zm_Drought_Roots_P Parameter: Organism Value: Zea mays
  misc_feature: MA Experiment 108689 PARAMETER Experiment Name: Zm_Drought_Roots_P Parameter: Plant Line Value: 35A19
  misc_feature: MA Experiment 108689 PARAMETER Experiment Name: Zm_Drought_Roots_P Parameter: Timepoint (hr) Value: 24
  misc_feature: MA Experiment 108689 PARAMETER Experiment Name: Zm_Drought_Roots_P Parameter: Tissue Value: Roots
  misc_feature: MA Experiment 108689 PARAMETER Experiment Name: Zm_Drought_Roots_P Parameter: Treatment Value: Drought vs. No Drought
  misc_feature: MA Experiment ID: 20000477 Result: Up-regulated in Transcription
  misc_feature: MA Experiment 20000477 PARAMETER Experiment Name: Zm_5mM_SA_P Parameter: Age (day) Value: 10
  misc_feature: MA Experiment 20000477 PARAMETER Experiment Name: Zm_5mM_SA_P Parameter: Organism Value: Zea mays
  misc_feature: MA Experiment 20000477 PARAMETER Experiment Name: Zm_5mM_SA_P Parameter: Plant Line Value: 35A19
  misc_feature: MA Experiment 20000477 PARAMETER Experiment Name: Zm_5mM_SA_P Parameter: Timepoint (hr) Value: 48
  misc_feature: MA Experiment 20000477 PARAMETER Experiment Name: Zm_5mM_SA_P Parameter: Tissue Value: Aerial
  misc_feature: MA Experiment 20000477 PARAMETER Experiment Name: Zm_5mM_SA_P Parameter: Treatment Value: 5mM SA vs. No Treatment
  misc_feature: MA Experiment ID: 20000478 Result: Up-regulated in Transcription
  misc_feature: MA Experiment 20000478 PARAMETER Experiment Name: Zm_5mM_SA_P Parameter: Age (day) Value: 11
  misc_feature: MA Experiment 20000478 PARAMETER Experiment Name: Zm_5mM_SA_P Parameter: Organism Value: Zea mays
  misc_feature: MA Experiment 20000478 PARAMETER Experiment Name: Zm_5mM_SA_P Parameter: Plant Line Value: 35A19
  misc_feature: MA Experiment 20000478 PARAMETER Experiment Name: Zm_5mM_SA_P Parameter: Timepoint (hr) Value: 72
  misc_feature: MA Experiment 20000478 PARAMETER Experiment Name: Zm_5mM_SA_P Parameter: Tissue Value: Aerial
  misc_feature: MA Experiment 20000478 PARAMETER Experiment Name: Zm_5mM_SA_P Parameter: Treatment Value: 5mM SA vs. No Treatment
  misc_feature: MA Experiment ID: 20001608 Result: Down-regulated in Transcription
  misc_feature: MA Experiment 20001608 PARAMETER Experiment Name: Zm_50ppm_KNO3_L-to-H_P Parameter: Age (day) Value: 21
  misc_feature: MA Experiment 20001608 PARAMETER Experiment Name: Zm_50ppm_KNO3_L-to-H_P Parameter: Organism Value: Zea mays
  misc_feature: MA Experiment 20001608 PARAMETER Experiment Name: Zm_50ppm_KNO3_L-to-H_P Parameter: Plant Line Value: 35A19
  misc_feature: MA Experiment 20001608 PARAMETER Experiment Name: Zm_50ppm_KNO3_L-to-H_P Parameter: Timepoint (hr) Value: 48
  misc_feature: MA Experiment 20001608 PARAMETER Experiment Name: Zm_50ppm_KNO3_L-to-H_P Parameter: Tissue Value: Shoots
  misc_feature: MA Experiment 20001608 PARAMETER Experiment Name: Zm_50ppm_KNO3_L-to-H_P Parameter: Treatment Value: 50ppm KNO3 vs. 50ppm KCl
tcctgtatcaacatattcgctcatttgcgctagtcagctggccttcaatgctgtcttctcatatgtcctaaatgctcaaaagttcaccccattcattttcaactcagtaatcctccttacgttttccgctgcgcttcttggagtcgacgaagattctcagggtaccaatggtttatcgcgtgggaagtacatattgggtttcgcattgaccctaggagcctcggccacatactcactaattctctctctaatcaagtcgcattcgagaaggttattaagaaggaaactttctcagtcgtgttgaatatgcagatatatacagcactagtggcaacagtagcttctcttatcggtttatttgcaagcggcgagtggaagactttagagggagagatgcatgccttcagctcagggagagtgtcctatgtgatgacacttctatggactgctgtatcttggcagatagcttccgtaggagtggtgggtttgatctttgttgtgtcatcactcttttcaaatgtgataagcacactggctctacccatcattccgatttttgctgtgattttcttccacgacaagatggatggagtgaagattattgctatgttgatggccatctggggattcgtttcatatggatatcaattatatgtcagtgacaagaaggctaggaagacttcagtcagtgtggaggagaattcctaagcgcttgttggcctgttacattggtctttgtggctcctataccactttaagttgctggtattgaggaggtactagttattgacttattgtatccaaaaggagctcagttgagaatctcaggtttacacaattcataggtatatacttctgttagtattgtcatatcatcatatgtaccgatgtatggttgtgttgtcctttaaaataaaaagattagcatttccagaggc

SEQ ID NO: 18931 - protein, 133 aa, Zea mays subsp. mays
  peptide (1)..(133): Ceres Seq. ID no. 12367867
  misc_feature (1)..(124): Pfam Name: Domain of unknown function, DUF250 Pfam Description: Domain of unknown function, DUF250
  misc_feature (1)..(133): Homolog of NCBI NO: 18491221 NR Description: unknown protein [Arabidopsis thaliana]
  misc_feature (1)..(130): Homolog of NCBI NO: 38344291 NR Description: OSJNBa0013K16.23 [Oryza sativa (japonica
  misc_feature (1)..(133): Homolog of NCBI NO: 15236794 NR Description: putative protein; protein id: At4g18190.1
  misc_feature (1)..(130): Homolog of NCBI NO: 38605752 NR Description: OSJNBb0016D16.5 [Oryza sativa (japonica
  misc_feature (1)..(124): Homolog of NCBI NO: 30684325 NR Description: purine permease family [Arabidopsis thaliana]
  misc_feature (1)..(124): Homolog of NCBI NO: 7487849 NR Description: hypothetical protein T9A21.60 - Arabidopsis
  misc_feature (1)..(126): Homolog of NCBI NO: 15236799 NR Description: putative protein; protein id: At4g18220.1
  misc_feature (1)..(124): Homolog of NCBI NO: 15219436 NR Description: hypothetical protein
  misc_feature (1)..(126): Homolog of NCBI NO: 38344290 NR Description: OSJNBa0013K16.22 [Oryza sativa (japonica
  misc_feature (1)..(126): Homolog of NCBI NO: 38605752 NR Description: OSJNBb0016D16.5 [Oryza sativa (japonica
MQIYTALVATVASLIGLFASGEWKTLEGEMHAFSSGRVSYVMTLLWTAVSWQIASVGVVGLIFVVSSLFSNVISTLALPIIPIFAVIFFHDKMDGVKIIAMLMAIWGFVSYGYQLYVSDKKARKTSVSVEENS

SEQ ID NO: 18932 - protein, 104 aa, Zea mays subsp. mays
  peptide (1)..(104): Ceres Seq. ID no. 12367868
  misc_feature (1)..(95): Pfam Name: Domain of unknown function, DUF250 Pfam Description: Domain of unknown function, DUF250
  misc_feature (1)..(104): Homolog of NCBI NO: 18491221 NR Description: unknown protein [Arabidopsis thaliana]
  misc_feature (1)..(101): Homolog of NCBI NO: 38344291 NR Description: OSJNBa0013K16.23 [Oryza sativa (japonica
  misc_feature (1)..(104): Homolog of NCBI NO: 15236794 NR Description: putative protein; protein id: At4g18190.1
  misc_feature (1)..(101): Homolog of NCBI NO: 38605752 NR Description: OSJNBb0016D16.5 [Oryza sativa (japonica
  misc_feature (1)..(95): Homolog of NCBI NO: 30684325 NR Description: purine permease family [Arabidopsis thaliana]
  misc_feature (1)..(95): Homolog of NCBI NO: 7487849 NR Description: hypothetical protein T9A21.60 - Arabidopsis
  misc_feature (1)..(97): Homolog of NCBI NO: 15236799 NR Description: putative protein; protein id: At4g18220.1
  misc_feature (1)..(95): Homolog of NCBI NO: 15219436 NR Description: hypothetical protein
  misc_feature (1)..(97): Homolog of NCBI NO: 38344290 NR Description: OSJNBa0013K16.22 [Oryza sativa (japonica
  misc_feature (1)..(97): Homolog of NCBI NO: 38605752 NR Description: OSJNBb0016D16.5 [Oryza sativa (japonica
MHAFSSGRVSYVMTLLWTAVSWQIASVGVVGLIFVVSSLFSNVISTLALPIIPIFAVIFFHDKMDGVKIIAMLMAIWGFVSYGYQLYVSDKKARKTSVSVEENS

SEQ ID NO: 18933 - protein, 100 aa, Zea mays subsp. mays
  peptide (1)..(100): Ceres Seq. ID no. 12367869
  misc_feature (1)..(93): Homolog of NCBI NO: 38605752 NR Description: OSJNBb0016D16.5 [Oryza sativa (japonica
  misc_feature (1)..(99): Homolog of NCBI NO: 18491221 NR Description: unknown protein [Arabidopsis thaliana]
  misc_feature (1)..(93): Homolog of NCBI NO: 38344291 NR Description: OSJNBa0013K16.23 [Oryza sativa (japonica
  misc_feature (1)..(94): Homolog of NCBI NO: 15236794 NR Description: putative protein; protein id: At4g18190.1
  misc_feature (1)..(95): Homolog of NCBI NO: 30684325 NR Description: purine permease family [Arabidopsis thaliana]
  misc_feature (1)..(95): Homolog of NCBI NO: 7487849 NR Description: hypothetical protein T9A21.60 - Arabidopsis
  misc_feature (1)..(95): Homolog of NCBI NO: 15236799 NR Description: putative protein; protein id: At4g18220.1
  misc_feature (3)..(95): Homolog of NCBI NO: 15219436 NR Description: hypothetical protein
  misc_feature (1)..(94): Homolog of NCBI NO: 38344290 NR Description: OSJNBa0013K16.22 [Oryza sativa (japonica
  misc_feature (1)..(94): Homolog of NCBI NO: 38605752 NR Description: OSJNBb0016D16.5 [Oryza sativa (japonica
PVSTYSLICASQLAFNAVFSYVLNAQKFTPFIFNSVILLTFSAALLGVDEDSQGTNGLSRGKYILGFALTLGASATYSLILSLIKSHSRRLLRRKLSQSC

SEQ ID NO: 18934 - DNA, 1841 bp, Zea mays subsp. mays
  misc_feature (1)..(1841): Ceres Seq. ID no. 12419338
  misc_feature: MA Experiment ID: 108543 Result: Up-regulated in Transcription
  misc_feature: MA Experiment ID: 108544 Result: Up-regulated in Transcription
  misc_feature: MA Experiment ID: 20000492 Result: Down-regulated in Transcription
  misc_feature: MA Experiment 20000492 PARAMETER Experiment Name: Zm_Hybrid_Seed_Dev_P Parameter: DAP Value: 12
  misc_feature: MA Experiment 20000492 PARAMETER Experiment Name: Zm_Hybrid_Seed_Dev_P Parameter: Organism Value: Zea mays
  misc_feature: MA Experiment 20000492 PARAMETER Experiment Name: Zm_Hybrid_Seed_Dev_P Parameter: Plant Line Value: 35A19
  misc_feature: MA Experiment 20000492 PARAMETER Experiment Name: Zm_Hybrid_Seed_Dev_P Parameter: Tissue Value: Fert Kernel vs. Unfert Floret
  misc_feature: MA Experiment ID: 20000535 Result: Down-regulated in Transcription
  misc_feature: MA Experiment 20000535 PARAMETER Experiment Name: Zm_Hybrid_Seed_Dev_P Parameter: DAP Value: 30 vs. 12
  misc_feature: MA Experiment 20000535 PARAMETER Experiment Name: Zm_Hybrid_Seed_Dev_P Parameter: Organism Value: Zea mays
  misc_feature: MA Experiment 20000535 PARAMETER Experiment Name: Zm_Hybrid_Seed_Dev_P Parameter: Plant Line Value: 35A19
  misc_feature: MA Experiment 20000535 PARAMETER Experiment Name: Zm_Hybrid_Seed_Dev_P Parameter: Tissue Value: Embryo vs. Unfert Floret
  misc_feature: MA Experiment ID: 20000629 Result: Up-regulated in Transcription
  misc_feature: MA Experiment 20000629 PARAMETER Experiment Name: Zm_Herbicide-Treatments_P Parameter: Timepoint (hr) Value: 12
  misc_feature: MA Experiment 20000629 PARAMETER Experiment Name: Zm_Herbicide-Treatments_P Parameter: Tissue Value: Aerial
  misc_feature: MA Experiment 20000629 PARAMETER Experiment Name: Zm_Herbicide-Treatments_P Parameter: Treatment Value: Trimec vs. No Treatment
gcacgagaccattacctagaacatcctaatcgaaaaacttgcgcatcggatcgcatcagctgctgcttttgtccaccaagcaacgattccctttccttccgccgcccaaatgccagtggccaccttcctcctcgtcgcgcttctctcgtgcggcgcacgagccatccggacgcacggcggctatgtctccgcggtcggggaccccggcatgcggcgcgacggcctccgcgtggcatgggaggcgtggaacttctgcaacgaggtcggccaggaggcccccggcatgggcagcccccgcggtgccgattgcttcgatcttctcggtccgtccattccatctctttctctcctctttcgccggggtggttgagtgggttgccaccaagattaggtttttgaggaagcgtggatctctgttccgttccgcagagacgagctccgacgaggagggggcggccggtgtactcggtggcgcacctggtgagcgacgccgacaaccgcctgggcgcgggcgacccgttcccggggtccccgccgggcgcggcccgcgtcacggacgccgacctctacgcgccggccaaggagctgtacctcggcgaccgctgccaggtggccgacaccccggcgccgtggcagttctggatggtcatgctcaagaacggcaacctcgacacaaccgccgccgcctgcccggagaacggccgccccgcgcgcccgttcccgcagacgtcccgcttcccgtgccccgccggcgccgggtgcatgaaccagccgctgctgttccacaaccgcaccgcgctggacgacgccggccgccggctccgcggcggcctgttcgggacctacgacctcgacgccgccgcgggtctcggcgctggcgacgtctccttctactccgggacgtgggagaaggaggtggcggcgagcggtcgcggcggcgggtgggcattccaccacaagctgcgcacgtccaccaagtacccgtggctgatgctgtacctacggtccgacgccacgaggggcttctccggcggttaccactacgacagcagaggcatgaccaagacagtgccggagtctccggacttcaaggtgcggctgaccctggacgtgaagcagggcggcgggcgcaacagccagttctacctgatggacatggtcagctgctggaagaacgacgggcgcgcctgcgacggcgacacggcgacggacgtgacgcggtacagcgagatgatcatcaacccggccacgccggcgtggtgctcgccgtcgcggatcgaccagtgcccgccatggcacaccttccggaacggcagccgcgtgcaccgccgcgacggagcccgcttcccctacggcgcctaccacgtgtactgctcccccgggaacgcggcgcgcgcggagcagcccaccacctactgcgacgcctacagcaacccgcaggcgcaggagatcctgcagctgctgccgcaccccgtgtggggagagttcggctacccgacggccaggggacaggggtgggtcggcgaccccagggcgtgggacctcgacgtcggcgccatgtcccaggcgctctacttctaccaggaccccggcacgccgccggccaggaggcggtggacgtcgctcgacgtcggcacggagatatacgtcagcgacagggccgaggaggcggagtggacgctcagtggcttcgacatccttgtgccggacaagtgtatcaagtcacagcaacgggccagcaacagctgctggtagacagacactttaatgtcactgtacgttacgctgagtagcatagcaggccaaagtgttcttcgtactagaagaggtggtgtaggatg

SEQ ID NO: 18935 - protein, 536 aa, Zea mays subsp. mays
  peptide (1)..(536): Ceres Seq. ID no. 12419339
  misc_feature (110)..(358): Homolog of NCBI NO: 23106243 NR Description: hypothetical protein [Azotobacter vinelandii]
  misc_feature (88)..(496): Homolog of NCBI NO: 29247944 NR Description: GLP_26_54603_52153 [Giardia lamblia ATCC 50803]
MSPRSGTPACGATASAWHGRRGTSATRSARRPPAWAAPAVPIASIFSVRPFHLFLSSFAGVVEWVATKIRFLRKRGSLFRSAETSSDEEGAAGVLGGAPGERRRQPPGRGRPVPGVPAGRGPRHGRRPLRAGQGAVPRRPLPGGRHPGAVAVLDGHAQERQPRHNRRRLPGERPPRAPVPADVPLPVPRRRRVHEPAAAVPQPHRAGRRRPPAPRRPVRDLRPRRRRGSRRWRRLLLLRDVGEGGGGERSRRRVGIPPQAAHVHQVPVADAVPTVRRHEGLLRRLPLRQQRHDQDSAGVSGLQGAADPGREAGRRAQQPVLPDGHGQLLEERRARLRRRHGDGRDAVQRDDHQPGHAGVVLAVADRPVPAMAHLPERQPRAPPRRSPLPLRRLPRVLLPRERGARGAAHHLLRRLQQPAGAGDPAAAAAPRVGRVRLPDGQGTGVGRRPQGVGPRRRRHVPGALLLPGPRHAAGQEAVDVARRRHGDIRQRQGRGGGVDAQWLRHPCAGQVYQVTATGQQQLLVDRHFNVTVRYAE

SEQ ID NO: 18936 - protein, 370 aa, Zea mays subsp. mays
  peptide (1)..(370): Ceres Seq. ID no. 12419340
  misc_feature (288)..(361): Homolog of NCBI NO: 22328547 NR Description: hypothetical protein; protein id: At4g09965.1
  misc_feature (1)..(356): Homolog of NCBI NO: 25335639 NR Description: F20D23.27 protein - Arabidopsis thaliana
  misc_feature (1)..(312): Homolog of NCBI NO: 18407231 NR Description: expressed protein
  misc_feature (315)..(354): Homolog of NCBI NO: 7459476 NR Description: hypothetical protein At2g47010 [imported] -
  misc_feature (1)..(304): Homolog of NCBI NO: 7459476 NR Description: hypothetical protein At2g47010 [imported] -
  misc_feature (1)..(356): Homolog of NCBI NO: 30685122 NR Description: expressed protein [Arabidopsis thaliana]
  misc_feature (1)..(354): Homolog of NCBI NO: 16612271 NR Description: At2g47010/F14M4.16 [Arabidopsis thaliana]
MVMLKNGNLDTTAAACPENGRPARPFPQTSRFPCPAGAGCMNQPLLFHNRTALDDAGRRLRGGLFGTYDLDAAAGLGAGDVSFYSGTWEKEVAASGRGGGWAFHHKLRTSTKYPWLMLYLRSDATRGFSGGYHYDSRGMTKTVPESPDFKVRLTLDVKQGGGRNSQFYLMDMVSCWKNDGRACDGDTATDVTRYSEMIINPATPAWCSPSRIDQCPPWHTFRNGSRVHRRDGARFPYGAYHVYCSPGNAARAEQPTTYCDAYSNPQAQEILQLLPHPVWGEFGYPTARGQGWVGDPRAWDLDVGAMSQALYFYQDPGTPPARRRWTSLDVGTEIYVSDRAEEAEWTLSGFDILVPDKCIKSQQRASNSCW

SEQ ID NO: 18937 - protein, 368 aa, Zea mays subsp. mays
  peptide (1)..(368): Ceres Seq. ID no. 12419341
  misc_feature (286)..(359): Homolog of NCBI NO: 22328547 NR Description: hypothetical protein; protein id: At4g09965.1
  misc_feature (1)..(354): Homolog of NCBI NO: 25335639 NR Description: F20D23.27 protein - Arabidopsis thaliana
  misc_feature (1)..(310): Homolog of NCBI NO: 18407231 NR Description: expressed protein
  misc_feature (313)..(352): Homolog of NCBI NO: 7459476 NR Description: hypothetical protein At2g47010 [imported] -
  misc_feature (1)..(302): Homolog of NCBI NO: 7459476 NR Description: hypothetical protein At2g47010 [imported] -
  misc_feature (1)..(354): Homolog of NCBI NO: 30685122 NR Description: expressed protein [Arabidopsis thaliana]
  misc_feature (1)..(352): Homolog of NCBI NO: 16612271 NR Description: At2g47010/F14M4.16 [Arabidopsis thaliana]
MLKNGNLDTTAAACPENGRPARPFPQTSRFPCPAGAGCMNQPLLFHNRTALDDAGRRLRGGLFGTYDLDAAAGLGAGDVSFYSGTWEKEVAASGRGGGWAFHHKLRTSTKYPWLMLYLRSDATRGFSGGYHYDSRGMTKTVPESPDFKVRLTLDVKQGGGRNSQFYLMDMVSCWKNDGRACDGDTATDVTRYSEMIINPATPAWCSPSRIDQCPPWHTFRNGSRVHRRDGARFPYGAYHVYCSPGNAARAEQPTTYCDAYSNPQAQEILQLLPHPVWGEFGYPTARGQGWVGDPRAWDLDVGAMSQALYFYQDPGTPPARRRWTSLDVGTEIYVSDRAEEAEWTLSGFDILVPDKCIKSQQRASNSCW

SEQ ID NO: 18938 - DNA, 2076 bp, Zea mays subsp. mays
  misc_feature (1)..(2076): Ceres Seq. ID no. 12381770
  misc_feature: MA Experiment ID: 108528 Result: Up-regulated in Transcription
  misc_feature: MA Experiment 108528 PARAMETER Experiment Name: Zm_Imbibed_Seeds_P Parameter: Age (day) Value: 5 vs. 2
  misc_feature: MA Experiment 108528 PARAMETER Experiment Name: Zm_Imbibed_Seeds_P Parameter: Organism Value: Zea mays
  misc_feature: MA Experiment 108528 PARAMETER Experiment Name: Zm_Imbibed_Seeds_P Parameter: Plant Line Value: 35A19
  misc_feature: MA Experiment 108528 PARAMETER Experiment Name: Zm_Imbibed_Seeds_P Parameter: Tissue Value: Aerial vs. Embryo
  misc_feature: MA Experiment ID: 108530 Result: Up-regulated in Transcription
  misc_feature: MA Experiment 108530 PARAMETER Experiment Name: Zm_Imbibed_Seeds_P Parameter: Age (day) Value: 6 vs. 2
  misc_feature: MA Experiment 108530 PARAMETER Experiment Name: Zm_Imbibed_Seeds_P Parameter: Organism Value: Zea mays
  misc_feature: MA Experiment 108530 PARAMETER Experiment Name: Zm_Imbibed_Seeds_P Parameter: Plant Line Value: 35A19
  misc_feature: MA Experiment 108530 PARAMETER Experiment Name: Zm_Imbibed_Seeds_P Parameter: Tissue Value: Aerial vs. Embryo
  misc_feature: MA Experiment ID: 108543 Result: Up-regulated in Transcription
  misc_feature: MA Experiment ID: 108556 Result: Down-regulated in Transcription
  misc_feature: MA Experiment 108556 PARAMETER Experiment Name: Zm_Drought_P Parameter: Age (day) Value: 9
  misc_feature: MA Experiment 108556 PARAMETER Experiment Name: Zm_Drought_P Parameter: Organism Value: Zea mays
  misc_feature: MA Experiment 108556 PARAMETER Experiment Name: Zm_Drought_P Parameter: Plant Line Value: 35A19
  misc_feature: MA Experiment 108556 PARAMETER Experiment Name: Zm_Drought_P Parameter: Timepoint (hr) Value: 24
  misc_feature: MA Experiment 108556 PARAMETER Experiment Name: Zm_Drought_P Parameter: Tissue Value: Aerial
  misc_feature: MA Experiment 108556 PARAMETER Experiment Name: Zm_Drought_P Parameter: Treatment Value: Drought vs. No Drought
  misc_feature: MA Experiment ID: 20000477 Result: Down-regulated in Transcription
  misc_feature: MA Experiment 20000477 PARAMETER Experiment Name: Zm_5mM_SA_P Parameter: Age (day) Value: 10
  misc_feature: MA Experiment 20000477 PARAMETER Experiment Name: Zm_5mM_SA_P Parameter: Organism Value: Zea mays
  misc_feature: MA Experiment 20000477 PARAMETER Experiment Name: Zm_5mM_SA_P Parameter: Plant Line Value: 35A19
  misc_feature: MA Experiment 20000477 PARAMETER Experiment Name: Zm_5mM_SA_P Parameter: Timepoint (hr) Value: 48
  misc_feature: MA Experiment 20000477 PARAMETER Experiment Name: Zm_5mM_SA_P Parameter: Tissue Value: Aerial
  misc_feature: MA Experiment 20000477 PARAMETER Experiment Name: Zm_5mM_SA_P Parameter: Treatment Value: 5mM SA vs. No Treatment
  misc_feature: MA Experiment ID: 20000478 Result: Down-regulated in Transcription
  misc_feature: MA Experiment 20000478 PARAMETER Experiment Name: Zm_5mM_SA_P Parameter: Age (day) Value: 11
  misc_feature: MA Experiment 20000478 PARAMETER Experiment Name: Zm_5mM_SA_P Parameter: Organism Value: Zea mays
  misc_feature: MA Experiment 20000478 PARAMETER Experiment Name: Zm_5mM_SA_P Parameter: Plant Line Value: 35A19
  misc_feature: MA Experiment 20000478 PARAMETER Experiment Name: Zm_5mM_SA_P Parameter: Timepoint (hr) Value: 72
  misc_feature: MA Experiment 20000478 PARAMETER Experiment Name: Zm_5mM_SA_P Parameter: Tissue Value: Aerial
  misc_feature: MA Experiment 20000478 PARAMETER Experiment Name: Zm_5mM_SA_P Parameter: Treatment Value: 5mM SA vs. No Treatment
  misc_feature: MA Experiment ID: 20000479 Result: Down-regulated in Transcription
  misc_feature: MA Experiment 20000479 PARAMETER Experiment Name: Zm_Drought_P Parameter: Age (day) Value: 10
  misc_feature: MA Experiment 20000479 PARAMETER Experiment Name: Zm_Drought_P Parameter: Organism Value: Zea mays
  misc_feature: MA Experiment 20000479 PARAMETER Experiment Name: Zm_Drought_P Parameter: Plant Line Value: 35A19
  misc_feature: MA Experiment 20000479 PARAMETER Experiment Name: Zm_Drought_P Parameter: Timepoint (hr) Value: 48
  misc_feature: MA Experiment 20000479 PARAMETER Experiment Name: Zm_Drought_P Parameter: Tissue Value: Aerial
  misc_feature: MA Experiment 20000479 PARAMETER Experiment Name: Zm_Drought_P Parameter: Treatment Value: Drought vs. No Drought
  misc_feature: MA Experiment ID: 20000480 Result: Down-regulated in Transcription
  misc_feature: MA Experiment 20000480 PARAMETER Experiment Name: Zm_Drought_P Parameter: Age (day) Value: 11
  misc_feature: MA Experiment 20000480 PARAMETER Experiment Name: Zm_Drought_P Parameter: Organism Value: Zea mays
  misc_feature: MA Experiment 20000480 PARAMETER Experiment Name: Zm_Drought_P Parameter: Plant Line Value: 35A19
  misc_feature: MA Experiment 20000480 PARAMETER Experiment Name: Zm_Drought_P Parameter: Timepoint (hr) Value: 72
  misc_feature: MA Experiment 20000480 PARAMETER Experiment Name: Zm_Drought_P Parameter: Tissue Value: Aerial
  misc_feature: MA Experiment 20000480 PARAMETER Experiment Name: Zm_Drought_P Parameter: Treatment Value: Drought vs. No Drought
  misc_feature: MA Experiment ID: 20000492 Result: Up-regulated in Transcription
  misc_feature: MA Experiment 20000492 PARAMETER Experiment Name: Zm_Hybrid_Seed_Dev_P Parameter: DAP Value: 12
  misc_feature: MA Experiment 20000492 PARAMETER Experiment Name: Zm_Hybrid_Seed_Dev_P Parameter: Organism Value: Zea mays
  misc_feature: MA Experiment 20000492 PARAMETER Experiment Name: Zm_Hybrid_Seed_Dev_P Parameter: Plant Line Value: 35A19
  misc_feature: MA Experiment 20000492 PARAMETER Experiment Name: Zm_Hybrid_Seed_Dev_P Parameter: Tissue Value: Fert Kernel vs. Unfert Floret
  misc_feature: MA Experiment ID: 20000535 Result: Up-regulated in Transcription
  misc_feature: MA Experiment 20000535 PARAMETER Experiment Name: Zm_Hybrid_Seed_Dev_P Parameter: DAP Value: 30 vs. 12
  misc_feature: MA Experiment 20000535 PARAMETER Experiment Name: Zm_Hybrid_Seed_Dev_P Parameter: Organism Value: Zea mays
  misc_feature: MA Experiment 20000535 PARAMETER Experiment Name: Zm_Hybrid_Seed_Dev_P Parameter: Plant Line Value: 35A19
  misc_feature: MA Experiment 20000535 PARAMETER Experiment Name: Zm_Hybrid_Seed_Dev_P Parameter: Tissue Value: Embryo vs. Unfert Floret
gcacgagaccattacctagaacatcctaatcgaaaaatcaaaccgctctcctctccttccctgcccccccctcgcaaccccgaagaagcccccacacgcaaggccgcaaacgcgccgcgcaccgcaaggtcccagggagcgacacgaggcggcctcattgcagcatggctgctatggccgccgccgccgccgccgccgctggcggcgtcgggctccatctcattggcgctgccacggccacgctcatcgcggcggtccttgttgcggccgtgctggggcgccgccgccgggcccgggcccgggcccaggcgcctccggtggaagggaaacccgcgccggaggcaggctgcgcggtcggtgacggcgcgggtcccgacggcgggacggacgtcatcatcgtcggcgccggagtggctggatctgcgctggcgttacacgctcggaaaggatggccgccgggtgcatgtcatcgagagggatctgacagaacctgacagaattgtgggcgagctgttgcaacctggaggttacttgaaattaattgagttaggcctccaagattgtgtggaagaaattgatgcccaacgggtgcttggttacgcattattcaaagatggaagaaacacaaagcttgcttatcccttagagaagttccattctgatgttgctggtaggagctttcacaatgggaggtttatacagaggatgcgtcagaaagctgcgtctttgcccaatgttcaattagaacaaggaactgttacatcacttcttgaagaaaatggtactgttaaaggtgttcaatacaaaaccaagtcaggtgaagaactaaaagcttatgcgcccttgacgattgtatgtgatggctgcttttcaaatctacggcgtgccctttgctctccaaaagttgatgttccatcatgttttgttgggctggtattggagaattgccaacttccacatccaaaccatggccatgttatcttggccaatccttcgccaatactattttacccaattagcagcacagaggtgcgctgtttggttgatgtccctggtcagaaggtgccttccatagctagcggtgaaatggcaaattatctcaaaaccgtcgttgcaccccagattcctccagaaatctatgactctttcatagcggccattgataagggaagcataagaacaatgccaaacaggagcatgccagcggctccacttcctacccctggcgcacttctgatgggggatgctttcaatatgagacaccctttaactggtggaggaatgaccgttgcattatccgacatcgttgtcctacgcaatcttctcaagcctctccgcaatctccacgacgcatcttccctgtgcaagtacctcgaatcgttctatacgctgcggaagccggttgcctccaccataaacacgttgtccggtgctctgtacaaggtcttcagcgcctcgcctgatgaagctaggaacgagatgcgccaggcctgttttgattacttgagcctcggaggcgtcttctcgaatgggcctattgccttactctcgggtcttaatcctcggccactgagtttagttgcacacttcttcgctgtcgctatctacggtgtcggtcgcttgatgctccctcttccttcacctaaacggatgtggattggagccaggctgatttctggtgcatgcggcatcatcctcccgatcatcaaagctgaaggcgtgagacagatgttcttccctgccactgtacccgcatattaccgggctgcgcctacgggagaataagtaaagcgcgcgagaaccgattccggggctgctgctcatcccaccatgatctgatggcaactgatgtgtcatggatggcaatttttttccctgtgttagtggttgttaggtggttggttgtgcttctgtcattggaatgaggaacctgtatagtgtgcccctggatagtggtcaaagttgggtcctacccatgtcgattactgccaagttgtatatgattctgttgaactagtgaaacctgcccccatctataacgcgtatcaatcttggttgctcccctgccccccgagc

SEQ ID NO: 18939 - protein, 594 aa, Zea mays subsp. mays
  peptide (1)..(594): Ceres Seq. ID no. 12381771
  misc_feature (279)..(477): Pfam Name: Monooxygenase Pfam Description: Monooxygenase
  misc_feature (145)..(591): Homolog of NCBI NO: 15227757 NR Description: squalene monooxygenase (squalene epoxidase)(SE),
  misc_feature (145)..(592): Homolog of NCBI NO: 21537043 NR Description: squalene epoxidase-like protein [Arabidopsis
  misc_feature (145)..(592): Homolog of NCBI NO: 18420113 NR Description: squalene monooxygenase (squalene epoxidase)(SE),
  misc_feature (145)..(594): Homolog of NCBI NO: 25404216 NR Description: probable squalene monooxygenase F9K23.3
  misc_feature (145)..(594): Homolog of NCBI NO: 18406296 NR Description: squalene monooxygenase, putative; protein id:
  misc_feature (145)..(591): Homolog of NCBI NO: 27475610 NR Description: squalene monooxygenase 2 [Medicago truncatula]
  misc_feature (145)..(591): Homolog of NCBI NO: 6685403 NR Description: Squalene monooxygenase (Squalene epoxidase) (SE)
  misc_feature (145)..(591): Homolog of NCBI NO: 27475612 NR Description: squalene monooxygenase 1 [Medicago truncatula]
  misc_feature (145)..(594): Homolog of NCBI NO: 27311240 NR Description: Putative Squalene monooxygenase
  misc_feature (145)..(589): Homolog of NCBI NO: 27311241 NR Description: Putative Squalene monooxygenase
ARDHYLEHPNRKIKPLSSPSLPPPRNPEEAPTRKAANAPRTARSQGATRGGLIAAWLLWPPPPPPPLAASGSISLALPRPRSSRRSLLRPCWGAAAGPGPGPRRLRWKGNPRRRQAARSVTARVPTAGRTSSSSAPEWLDLRWRYTLGKDGRRVHVIERDLTEPDRIVGELLQPGGYLKLIELGLQDCVEEIDAQRVLGYALFKDGRNTKLAYPLEKFHSDVAGRSFHNGRFIQRMRQKAASLPNVQLEQGTVTSLLEENGTVKGVQYKTKSGEELKAYAPLTIVCDGCFSNLRRALCSPKVDVPSCFVGLVLENCQLPHPNHGHVILANPSPILFYPISSTEVRCLVDVPGQKVPSIASGEMANYLKTVVAPQIPPEIYDSFIAAIDKGSIRTMPNRSMPAAPLPTPGALLMGDAFNMRHPLTGGGMTVALSDIVVLRNLLKPLRNLHDASSLCKYLESFYTLRKPVASTINTLSGALYKVFSASPDEARNEMRQACFDYLSLGGVFSNGPIALLSGLNPRPLSLVAHFFAVAIYGVGRLMLPLPSPKRMWIGARLISGACGIILPIIKAEGVRQMFFPATVPAYYRAAPTGE

SEQ ID NO: 18940 - protein, 359 aa, Zea mays subsp. mays
  peptide (1)..(359): Ceres Seq. ID no. 12381772
  misc_feature (44)..(242): Pfam Name: Monooxygenase Pfam Description: Monooxygenase
  misc_feature (1)..(356): Homolog of NCBI NO: 15227757 NR Description: squalene monooxygenase (squalene epoxidase)(SE),
  misc_feature (1)..(357): Homolog of NCBI NO: 21537043 NR Description: squalene epoxidase-like protein [Arabidopsis
  misc_feature (1)..(357): Homolog of NCBI NO: 18420113 NR Description: squalene monooxygenase (squalene epoxidase)(SE),
  misc_feature (1)..(359): Homolog of NCBI NO: 25404216 NR Description: probable squalene monooxygenase F9K23.3
  misc_feature (1)..(359): Homolog of NCBI NO: 18406296 NR Description: squalene monooxygenase, putative; protein id:
  misc_feature (1)..(356): Homolog of NCBI NO: 27475610 NR Description: squalene monooxygenase 2 [Medicago truncatula]
  misc_feature (1)..(356): Homolog of NCBI NO: 6685403 NR Description: Squalene monooxygenase (Squalene epoxidase) (SE)
  misc_feature (1)..(356): Homolog of NCBI NO: 27475612 NR Description: squalene monooxygenase 1 [Medicago truncatula]
  misc_feature (1)..(359): Homolog of NCBI NO: 27311240 NR Description: Putative Squalene monooxygenase
  misc_feature (1)..(354): Homolog of NCBI NO: 27311241 NR Description: Putative Squalene monooxygenase
MRQKAASLPNVQLEQGTVTSLLEENGTVKGVQYKTKSGEELKAYAPLTIVCDGCFSNLRRALCSPKVDVPSCFVGLVLENCQLPHPNHGHVILANPSPILFYPISSTEVRCLVDVPGQKVPSIASGEMANYLKTVVAPQIPPEIYDSFIAAIDKGSIRTMPNRSMPAAPLPTPGALLMGDAFNMRHPLTGGGMTVALSDIVVLRNLLKPLRNLHDASSLCKYLESFYTLRKPVASTINTLSGALYKVFSASPDEARNEMRQACFDYLSLGGVFSNGPIALLSGLNPRPLSLVAHFFAVAIYGVGRLMLPLPSPKRMWIGARLISGACGIILPIIKAEGVRQMFFPATVPAYYRAAPTGE

SEQ ID NO: 18941 - DNA, 399 bp, Zea mays subsp. mays
  misc_feature (1)..(399): Ceres Seq. ID no. 12419441
  misc_feature: MA Experiment ID: 108534 Result: Up-regulated in Transcription
  misc_feature: MA Experiment 108534 PARAMETER Experiment Name: Zm_4deg_Cold_P Parameter: Age (hr) Value: 8
  misc_feature: MA Experiment 108534 PARAMETER Experiment Name: Zm_4deg_Cold_P Parameter: Organism Value: Zea mays
  misc_feature: MA Experiment 108534 PARAMETER Experiment Name: Zm_4deg_Cold_P Parameter: Plant Line Value: 35A19
  misc_feature: MA Experiment 108534 PARAMETER Experiment Name: Zm_4deg_Cold_P Parameter: Temperature (deg C) Value: 4 vs. 22
  misc_feature: MA Experiment 108534 PARAMETER Experiment Name: Zm_4deg_Cold_P Parameter: Timepoint (hr) Value: 6
  misc_feature: MA Experiment 108534 PARAMETER Experiment Name: Zm_4deg_Cold_P Parameter: Tissue Value: Aerial
  misc_feature: MA Experiment ID: 108544 Result: Down-regulated in Transcription
atccatcgagctgcccgcgcgcggcagttaagctcacacatcagctagctcaccttggacggccgaccaggtacgttccgcgagatggaggtggacgagggcgaggaggagacggcccggaccggcaggtccgtcgaggagcagatctcgtcgtgggagaagatcgcgggtgacatctccaggatccccgcgatggtggagctggacctggcgcggtccgcgcggcagtggcgggagccgaggctggaggccagggaggtcggcgccaggatagagaccctcatcttcgatgacatcaggagggagaccgtgtgcgacatgctcgcctcgcattgtagatcggcggcggcggcggcggcagcagcaacgtcttgttgatcgaggtagtaggaggagggg

SEQ ID NO: 18942 - protein, 97 aa, Zea mays subsp. mays
  peptide (1)..(97): Ceres Seq. ID no. 12419442
  misc_feature (1)..(97): Homolog of NCBI NO: 12039271 NR Description: hypothetical protein [Oryza sativa]
MEVDEGEEETARTGRSVEEQISSWEKIAGDISRIPAMVELDLARSARQWREPRLEAREVGARIETLIFDDIRRETVCDMLASHCRSAAAAAAAATSC

SEQ ID NO: 18943 - protein, 61 aa, Zea mays subsp. mays
  peptide (1)..(61): Ceres Seq. ID no. 12419443
  misc_feature (1)..(61): Homolog of NCBI NO: 12039271 NR Description: hypothetical protein [Oryza sativa]
MVELDLARSARQWREPRLEAREVGARIETLIFDDIRRETVCDMLASHCRSAAAAAAAATSC

SEQ ID NO: 18944 - protein, 56 aa, Zea mays subsp. mays
  peptide (1)..(56): Ceres Seq. ID no. 12419444
PSSCPRAAVKLTHQLAHLGRPTRYVPRDGGGRGRGGDGPDRQVRRGADLVVGEDRG

SEQ ID NO: 18945 - DNA, 454 bp, Zea mays subsp. mays
  misc_feature (1)..(454): Ceres Seq. ID no. 4614316
  misc_feature: MA Experiment ID: 108527 Result: Up-regulated in Transcription
  misc_feature: MA Experiment 108527 PARAMETER Experiment Name: Zm_5mM_NO_P Parameter: Age (day) Value: 8
  misc_feature: MA Experiment 108527 PARAMETER Experiment Name: Zm_5mM_NO_P Parameter: Organism Value: Zea mays
  misc_feature: MA Experiment 108527 PARAMETER Experiment Name: Zm_5mM_NO_P Parameter: Plant Line Value: 35A19
  misc_feature: MA Experiment 108527 PARAMETER Experiment Name: Zm_5mM_NO_P Parameter: Timepoint (hr) Value: 6
  misc_feature: MA Experiment 108527 PARAMETER Experiment Name: Zm_5mM_NO_P Parameter: Tissue Value: Aerial
  misc_feature: MA Experiment 108527 PARAMETER Experiment Name: Zm_5mM_NO_P Parameter: Treatment Value: 5mM NO vs. No Treatment
  misc_feature: MA Experiment ID: 20000487 Result: Up-regulated in Transcription
  misc_feature: MA Experiment 20000487 PARAMETER Experiment Name: Zm_50mM_NH4NO3_L_to_H_P Parameter: Organism Value: Zea mays
  misc_feature: MA Experiment 20000487 PARAMETER Experiment Name: Zm_50mM_NH4NO3_L_to_H_P Parameter: Timepoint (hr) Value: 4
  misc_feature: MA Experiment 20000487 PARAMETER Experiment Name: Zm_50mM_NH4NO3_L_to_H_P Parameter: Tissue Value: Leaves
  misc_feature: MA Experiment 20000487 PARAMETER Experiment Name: Zm_50mM_NH4NO3_L_to_H_P Parameter: Treatment Value: 50mM NH4NO3 vs. 100mM Mannitol
caggtgcctctattttcttcgaaagcatgtcgtacaaggtgaacccacaaactgggtatattgattacgacaagctcgaggagagagcaatggatttccacccgaaaattctcatatgtggtgggagctcttaccccagagagtgggactttgctcggatgagattgattgctgataagtgtggtgcagtgcttctttgcgatatggcacatatcagtgggcttgttgcagcaaaggaatgtcgtagccctttcgactactgtgatgttgttacgtcaactactcacaagaatcttaggggccctagaggtggtataatattcttcaggaaagggaaaaatttaaggaaacgagctggatctttttctcaaggagatgagaatgaatacgacttcgaggataggataaattttggtgtttttccttcaatgcaaggggggcccataataatcat

SEQ ID NO: 18946 - protein, 150 aa, Zea mays subsp. mays
  peptide (1)..(150): Ceres Seq. ID no. 4614317
  misc_feature (1)..(147): Pfam Name: Serine hydroxymethyltransferase Pfam Description: Serine hydroxymethyltransferase
  misc_feature (3)..(147): Homolog of NCBI NO: 1346156 NR Description: Serine hydroxymethyltransferase 2, mitochondrial
  misc_feature (3)..(147): Homolog of NCBI NO: 15236371 NR Description: glycine hydroxymethyltransferase - like protein
  misc_feature (3)..(147): Homolog of NCBI NO: 21592544 NR Description: hydroxymethyltransferase [Arabidopsis thaliana]
  misc_feature (3)..(147): Homolog of NCBI NO: 15236375 NR Description: hydroxymethyltransferase
  misc_feature (3)..(147): Homolog of NCBI NO: 11762130 NR Description: AT4g13930 [Arabidopsis thaliana]
  misc_feature (1)..(147): Homolog of NCBI NO: 15219182 NR Description: glycine hydroxymethyltransferase, putative
  misc_feature (2)..(147): Homolog of NCBI NO: 21537165 NR Description: putative hydroxymethyltransferase [Arabidopsis
  misc_feature (2)..(147): Homolog of NCBI NO: 25286207 NR Description: probable hydroxymethyltransferase, 49598-47322
  misc_feature (2)..(147): Homolog of NCBI NO: 18400090 NR Description: putative hydroxymethyltransferase
  misc_feature (1)..(147): Homolog of NCBI NO: 34907298 NR Description: putative hydroxymethyltransferase
GASIFFESMSYKVNPQTGYIDYDKLEERAMDFHPKILICGGSSYPREWDFARMRLIADKCGAVLLCDMAHISGLVAAKECRSPFDYCDVVTSTTHKNLRGPRGGIIFFRKGKNLRKRAGSFSQGDENEYDFEDRINFGVFPSMQGGPIII

SEQ ID NO: 18947 - protein, 142 aa, Zea mays subsp. mays
  peptide (1)..(142): Ceres Seq. ID no. 4614318
  misc_feature (1)..(139): Pfam Name: Serine hydroxymethyltransferase Pfam Description: Serine hydroxymethyltransferase
  misc_feature (1)..(139): Homolog of NCBI NO: 1346156 NR Description: Serine hydroxymethyltransferase 2, mitochondrial
  misc_feature (1)..(139): Homolog of NCBI NO: 15236371 NR Description: glycine hydroxymethyltransferase - like protein
  misc_feature (1)..(139): Homolog of NCBI NO: 15236375 NR Description: hydroxymethyltransferase
  misc_feature (1)..(139): Homolog of NCBI NO: 21592544 NR Description: hydroxymethyltransferase [Arabidopsis thaliana]
  misc_feature (1)..(139): Homolog of NCBI NO: 11762130 NR Description: AT4g13930 [Arabidopsis thaliana]
  misc_feature (1)..(139): Homolog of NCBI NO: 15219182 NR Description: glycine hydroxymethyltransferase, putative
  misc_feature (1)..(139): Homolog of NCBI NO: 21537165 NR Description: putative hydroxymethyltransferase [Arabidopsis
  misc_feature (1)..(139): Homolog of NCBI NO: 25286207 NR Description: probable hydroxymethyltransferase, 49598-47322
  misc_feature (1)..(139): Homolog of NCBI NO: 18400090 NR Description: putative hydroxymethyltransferase
  misc_feature (1)..(139): Homolog of NCBI NO: 34907298 NR Description: putative hydroxymethyltransferase
MSYKVNPQTGYIDYDKLEERAMDFHPKILICGGSSYPREWDFARMRLIADKCGAVLLCDMAHISGLVAAKECRSPFDYCDVVTSTTHKNLRGPRGGIIFFRKGKNLRKRAGSFSQGDENEYDFEDRINFGVFPSMQGGPIII

SEQ ID NO: 18948 - protein, 121 aa, Zea mays subsp. mays
  peptide (1)..(121): Ceres Seq. ID no. 4614319
  misc_feature (1)..(118): Pfam Name: Serine hydroxymethyltransferase Pfam Description: Serine hydroxymethyltransferase
  misc_feature (1)..(118): Homolog of NCBI NO: 1346156 NR Description: Serine hydroxymethyltransferase 2, mitochondrial
  misc_feature (1)..(118): Homolog of NCBI NO: 15236371 NR Description: glycine hydroxymethyltransferase - like protein
  misc_feature (1)..(118): Homolog of NCBI NO: 15236375 NR Description: hydroxymethyltransferase
  misc_feature (1)..(118): Homolog of NCBI NO: 21592544 NR Description: hydroxymethyltransferase [Arabidopsis thaliana]
  misc_feature (1)..(118): Homolog of NCBI NO: 11762130 NR Description: AT4g13930 [Arabidopsis thaliana]
  misc_feature (1)..(118): Homolog of NCBI NO: 15219182 NR Description: glycine hydroxymethyltransferase, putative
  misc_feature (1)..(118): Homolog of NCBI NO: 21537165 NR Description: putative hydroxymethyltransferase [Arabidopsis
  misc_feature (1)..(118): Homolog of NCBI NO: 25286207 NR Description: probable hydroxymethyltransferase, 49598-47322
  misc_feature (1)..(118): Homolog of NCBI NO: 18400090 NR Description: putative hydroxymethyltransferase
  misc_feature (1)..(118): Homolog of NCBI NO: 34907298 NR Description: putative hydroxymethyltransferase
MDFHPKILICGGSSYPREWDFARMRLIADKCGAVLLCDMAHISGLVAAKECRSPFDYCDVVTSTTHKNLRGPRGGIIFFRKGKNLRKRAGSFSQGDENEYDFEDRINFGVFPSMQGGPIII

SEQ ID NO: 18949 - DNA, 1999 bp, Zea mays subsp. mays
  misc_feature (1)..(1999): Ceres Seq. ID no. 12359114
  misc_feature: MA Experiment ID: 108527 Result: Down-regulated in Transcription
  misc_feature: MA Experiment 108527 PARAMETER Experiment Name: Zm_5mM_NO_P Parameter: Age (day) Value: 8
  misc_feature: MA Experiment 108527 PARAMETER Experiment Name: Zm_5mM_NO_P Parameter: Organism Value: Zea mays
  misc_feature: MA Experiment 108527 PARAMETER Experiment Name: Zm_5mM_NO_P Parameter: Plant Line Value: 35A19
  misc_feature: MA Experiment 108527 PARAMETER Experiment Name: Zm_5mM_NO_P Parameter: Timepoint (hr) Value: 6
  misc_feature: MA Experiment 108527 PARAMETER Experiment Name: Zm_5mM_NO_P Parameter: Tissue Value: Aerial
  misc_feature: MA Experiment 108527 PARAMETER Experiment Name: Zm_5mM_NO_P Parameter: Treatment Value: 5mM NO vs. No Treatment
  misc_feature: MA Experiment ID: 108528 Result: Up-regulated in Transcription
  misc_feature: MA Experiment 108528 PARAMETER Experiment Name: Zm_Imbibed_Seeds_P Parameter: Age (day) Value: 5 vs. 2
  misc_feature: MA Experiment 108528 PARAMETER Experiment Name: Zm_Imbibed_Seeds_P Parameter: Organism Value: Zea mays
  misc_feature: MA Experiment 108528 PARAMETER Experiment Name: Zm_Imbibed_Seeds_P Parameter: Plant Line Value: 35A19
  misc_feature: MA Experiment 108528 PARAMETER Experiment Name: Zm_Imbibed_Seeds_P Parameter: Tissue Value: Aerial vs. Embryo
  misc_feature: MA Experiment ID: 108529 Result: Up-regulated in Transcription
  misc_feature: MA Experiment 108529 PARAMETER Experiment Name: Zm_Imbibed_Seeds_P Parameter: Age (day) Value: 5 vs. 2
  misc_feature: MA Experiment 108529 PARAMETER Experiment Name: Zm_Imbibed_Seeds_P Parameter: Organism Value: Zea mays
  misc_feature: MA Experiment 108529 PARAMETER Experiment Name: Zm_Imbibed_Seeds_P Parameter: Plant Line Value: 35A19
  misc_feature: MA Experiment 108529 PARAMETER Experiment Name: Zm_Imbibed_Seeds_P Parameter: Tissue Value: Roots vs. Embryo
  misc_feature: MA Experiment ID: 108530 Result: Up-regulated in Transcription
  misc_feature: MA Experiment 108530 PARAMETER Experiment Name: Zm_Imbibed_Seeds_P Parameter: Age (day) Value: 6 vs. 2
  misc_feature: MA Experiment 108530 PARAMETER Experiment Name: Zm_Imbibed_Seeds_P Parameter: Organism Value: Zea mays
  misc_feature: MA Experiment 108530 PARAMETER Experiment Name: Zm_Imbibed_Seeds_P Parameter: Plant Line Value: 35A19
  misc_feature: MA Experiment 108530 PARAMETER Experiment Name: Zm_Imbibed_Seeds_P Parameter: Tissue Value: Aerial vs. Embryo
  misc_feature: MA Experiment ID: 108535 Result: Down-regulated in Transcription
  misc_feature: MA Experiment 108535 PARAMETER Experiment Name: Zm_Meristem_P Parameter: Age (day) Value: 8
  misc_feature: MA Experiment 108535 PARAMETER Experiment Name: Zm_Meristem_P Parameter: Organism Value: Zea mays
  misc_feature: MA Experiment 108535 PARAMETER Experiment Name: Zm_Meristem_P Parameter: Plant Line Value: 35A19
  misc_feature: MA Experiment 108535 PARAMETER Experiment Name: Zm_Meristem_P Parameter: Tissue Value: Root Meristem vs. Above Root Meristem
  misc_feature: MA Experiment ID: 108546 Result: Up-regulated in Transcription
  misc_feature: MA Experiment 108546 PARAMETER Experiment Name: Zm_Imbibed_Seeds_P Parameter: Age (day) Value: 3 vs. 2
  misc_feature: MA Experiment 108546 PARAMETER Experiment Name: Zm_Imbibed_Seeds_P Parameter: Organism Value: Zea mays
  misc_feature: MA Experiment 108546 PARAMETER Experiment Name: Zm_Imbibed_Seeds_P Parameter: Plant Line Value: 35A19
  misc_feature: MA Experiment 108546 PARAMETER Experiment Name: Zm_Imbibed_Seeds_P Parameter: Tissue Value: Roots vs. Embryo
  misc_feature: MA Experiment ID: 108547 Result: Up-regulated in Transcription
  misc_feature: MA Experiment 108547 PARAMETER Experiment Name: Zm_Imbibed_Seeds_P Parameter: Age (day) Value: 4 vs. 2
  misc_feature: MA Experiment 108547 PARAMETER Experiment Name: Zm_Imbibed_Seeds_P Parameter: Organism Value: Zea mays
  misc_feature: MA Experiment 108547 PARAMETER Experiment Name: Zm_Imbibed_Seeds_P Parameter: Plant Line Value: 35A19
  misc_feature: MA Experiment 108547 PARAMETER Experiment Name: Zm_Imbibed_Seeds_P Parameter: Tissue Value: Aerial vs. Embryo
  misc_feature: MA Experiment ID: 20000480 Result: Up-regulated in Transcription
  misc_feature: MA Experiment 20000480 PARAMETER Experiment Name: Zm_Drought_P Parameter: Age (day) Value: 11
  misc_feature: MA Experiment 20000480 PARAMETER Experiment Name: Zm_Drought_P Parameter: Organism Value: Zea mays
  misc_feature: MA Experiment 20000480 PARAMETER Experiment Name: Zm_Drought_P Parameter: Plant Line Value: 35A19
  misc_feature: MA Experiment 20000480 PARAMETER Experiment Name: Zm_Drought_P Parameter: Timepoint (hr) Value: 72
  misc_feature: MA Experiment 20000480 PARAMETER Experiment Name: Zm_Drought_P Parameter: Tissue Value: Aerial
  misc_feature: MA Experiment 20000480 PARAMETER Experiment Name: Zm_Drought_P Parameter: Treatment Value: Drought vs. No Drought
  misc_feature: MA Experiment ID: 20000492 Result: Down-regulated in Transcription
  misc_feature: MA Experiment 20000492 PARAMETER Experiment Name: Zm_Hybrid_Seed_Dev_P Parameter: DAP Value: 12
  misc_feature: MA Experiment 20000492 PARAMETER Experiment Name: Zm_Hybrid_Seed_Dev_P Parameter: Organism Value: Zea mays
  misc_feature: MA Experiment 20000492 PARAMETER Experiment Name: Zm_Hybrid_Seed_Dev_P Parameter: Plant Line Value: 35A19
  misc_feature: MA Experiment 20000492 PARAMETER Experiment Name: Zm_Hybrid_Seed_Dev_P Parameter: Tissue Value: Fert Kernel vs. Unfert Floret
  misc_feature: MA Experiment ID: 20000535 Result: Down-regulated in Transcription
  misc_feature: MA Experiment 20000535 PARAMETER Experiment Name: Zm_Hybrid_Seed_Dev_P Parameter: DAP Value: 30 vs. 12
  misc_feature: MA Experiment 20000535 PARAMETER Experiment Name: Zm_Hybrid_Seed_Dev_P Parameter: Organism Value: Zea mays
  misc_feature: MA Experiment 20000535 PARAMETER Experiment Name: Zm_Hybrid_Seed_Dev_P Parameter: Plant Line Value: 35A19
  misc_feature: MA Experiment 20000535 PARAMETER Experiment Name: Zm_Hybrid_Seed_Dev_P Parameter: Tissue Value: Embryo vs. Unfert Floret
  misc_feature: MA Experiment ID: 20001613 Result: Down-regulated in Transcription
  misc_feature: MA Experiment 20001613 PARAMETER Experiment Name: Zm_50ppm_KNO3_L-to-H_P Parameter: Age (day) Value: 20
  misc_feature: MA Experiment 20001613 PARAMETER Experiment Name: Zm_50ppm_KNO3_L-to-H_P Parameter: Organism Value: Zea mays
  misc_feature: MA Experiment 20001613 PARAMETER Experiment Name: Zm_50ppm_KNO3_L-to-H_P Parameter: Plant Line Value: 35A19
  misc_feature: MA Experiment 20001613 PARAMETER Experiment Name: Zm_50ppm_KNO3_L-to-H_P Parameter: Timepoint (hr) Value: 24
  misc_feature: MA Experiment 20001613 PARAMETER Experiment Name: Zm_50ppm_KNO3_L-to-H_P Parameter: Tissue Value: Roots
  misc_feature: MA Experiment 20001613 PARAMETER Experiment Name: Zm_50ppm_KNO3_L-to-H_P Parameter: Treatment Value: 50ppm KNO3 vs. 50ppm KCl
aactgaggcgagggagagagagagagagtgagtgagtgagtaatgggcggttcatcaggccttgtggactggagaggacggccggtgaacaccaagaagcatggaggagtgagagcttcaattttcattcatgcgctggtgctgctcagcaacgtagccaacattgccagtatactgaatcgtaagctatctgcgcgaggagatgcacatggatgtcgcgagggcgacgacgatggcgagcaatttctttgccgcgctgcaaatgttctccatcccagcagccttccttgctgactcctacatcaagcgtttctacactgtcctcatctttggcccaattgaaatactgggctacatcctgctcgcggtccaagcacatgtcccatccctgcacccaccaccgtgcgtccctggacaagagacaagtacgtgtgagtccgtgagcggttcgaacctgagcctgctcctcctgggtctctacctgatccccatcggcgatggggcggctcgggcatgcctcccggctctcggcggggagcagttcgacaggtcggatcccgtagagcagaggcaggagtcgagcttcttcaactggtacaccttctccgtctcgacgggtggcttcgtggggctggtcttcatcgtgtgggtggagaacagtaaaggctgggacgtaggcttcgccgtctgtgccttgtccgtgctcctcgggatgctgatatggattgctggcctcccgttatacaggaaccagctgccaactagtagccccatcacaagaatactgcaggttcttgtagctgcattcaagaaaagaaatgttgcattaccggccaaccccagtgagctaaagcaaataagtcaaggcgacgccggttccctcgagattctgcatagaaccgacggatttcgctgccttgacaaagcagcggtggacaccggaaggaccggtggctggattctctgcagcataacccaggtggaggagactaagatcattctccggatggtgcccatcttcctgagtgctgtcctaggctacattccggtgcctctcatcctcaatttcaccgtgcagcagggcaacacaatggacaccaggcttggcgcacttcacatctcacccgcgacgctattcatcatccctacgcttttccagatggtgatcctcgttgtttacgaccggttcattgtcccgttcctaagacggataaccgggtacgtgggcggtgtcacgcacctccagcgcatcggcatcggattcctttcaaccgtagtggccaccggcgttgcagcaatagtggaggccagtaggaaaaaggtggtacgagacagttgccttgtggatgctacagctggaattccaatatctgttttctggctgaccatacagttcttcctgctaggcattgtggatgtcacctcctttgtagggcttcttgagttcttctacagtgaggcgtccacggggatgaagtctattggaagctccatcttctactgcatccttggggtgtcagcttggttggggagcctgttgattcaagtggcaaaccgagttacaagacaccgcgatggcacaggaggctggcttgatgggaccaacttgaacaaggggaaacttgaacgattctattggttgctagcagttcttgagctggtgtcgctattagtctacgtcttcttcgcctccaggtatgtttacgggaatgaccaaagggttgtggctgacgaagataataatacggctccatctgatggtaccataaatgttatctgattgttagagcgtagtggtaacgagactgagagattgtgcaaatgacagagacagaatgacagttgtctttattgcaaggaagacaatgcttatatatacagacgaactagtgcctccccaaggggtgcgtcccttggggagaaactgtcgcaccccatggaggggattgaacacacatattgtaacactcccccttaatcaatctaagtccatttgatc

SEQ ID NO: 18950 - protein, 525 aa, Zea mays subsp. mays
  peptide (1)..(525): Ceres Seq. ID no. 12359115
  misc_feature (37)..(434): Pfam Name: POT family Pfam Description: POT family
  misc_feature (1)..(204): Homolog of NCBI NO: 25404844 NR Description: nitrate transporter (NTL1), 53025-56402
  misc_feature (1)..(204): Homolog of NCBI NO: 11358579 NR Description: nitrate transporter NTL1 [validated] -
  misc_feature (233)..(501): Homolog of NCBI NO: 18409382 NR Description: nitrate transporter (NTL1)
  misc_feature (233)..(501): Homolog of NCBI NO: 25404844 NR Description: nitrate transporter (NTL1), 53025-56402
  misc_feature (233)..(501): Homolog of NCBI NO: 11358579 NR Description: nitrate transporter NTL1 [validated] -
  misc_feature (1)..(204): Homolog of NCBI NO: 17064754 NR Description: nitrate transporter (NTL1) [Arabidopsis thaliana]
  misc_feature (233)..(501): Homolog of NCBI NO: 17064754 NR Description: nitrate transporter (NTL1) [Arabidopsis thaliana]
  misc_feature (1)..(505): Homolog of NCBI NO: 34909514 NR Description: putative nitrate transporter
  misc_feature (1)..(513): Homolog of NCBI NO: 38347451 NR Description: OSJNBa0076N16.20 [Oryza sativa (japonica
  misc_feature (1)..(510): Homolog of NCBI NO: 21742982 NR Description: OSJNBa0076N16.17 [Oryza sativa (japonica
MHMDVARATTMASNFFAALQMFSIPAAFLADSYIKRFYTVLIFGPIEILGYILLAVQAHVPSLHPPPCVPGQETSTCESVSGSNLSLLLLGLYLIPIGDGAARACLPALGGEQFDRSDPVEQRQESSFFNWYTFSVSTGGFVGLVFIVWVENSKGWDVGFAVCALSVLLGMLIWIAGLPLYRNQLPTSSPITRILQVLVAAFKKRNVALPANPSELKQISQGDAGSLEILHRTDGFRCLDKAAVDTGRTGGWILCSITQVEETKIILRMVPIFLSAVLGYIPVPLILNFTVQQGNTMDTRLGALHISPATLFIIPTLFQMVILVVYDRFIVPFLRRITGYVGGVTHLQRIGIGFLSTVVATGVAAIVEASRKKVVRDSCLVDATAGIPISVFWLTIQFFLLGIVDVTSFVGLLEFFYSEASTGMKSIGSSIFYCILGVSAWLGSLLIQVANRVTRHRDGTGGWLDGTNLNKGKLERFYWLLAVLELVSLLVYVFFASRYVYGNDQRVVADEDNNTAPSDGTINVI

SEQ ID NO: 18951 - protein, 523 aa, Zea mays subsp. mays
  peptide (1)..(523): Ceres Seq. ID no. 12359116
  misc_feature (35)..(432): Pfam Name: POT family Pfam Description: POT family
  misc_feature (1)..(202): Homolog of NCBI NO: 25404844 NR Description: nitrate transporter (NTL1), 53025-56402
  misc_feature (1)..(202): Homolog of NCBI NO: 11358579 NR Description: nitrate transporter NTL1 [validated] -
  misc_feature (231)..(499): Homolog of NCBI NO: 18409382 NR Description: nitrate transporter (NTL1)
  misc_feature (231)..(499): Homolog of NCBI NO: 25404844 NR Description: nitrate transporter (NTL1), 53025-56402
  misc_feature (231)..(499): Homolog of NCBI NO: 11358579 NR Description: nitrate transporter NTL1 [validated] -
  misc_feature (1)..(202): Homolog of NCBI NO: 17064754 NR Description: nitrate transporter (NTL1) [Arabidopsis thaliana]
  misc_feature (231)..(499): Homolog of NCBI NO: 17064754 NR Description: nitrate transporter (NTL1) [Arabidopsis thaliana]
  misc_feature (1)..(503): Homolog of NCBI NO: 34909514 NR Description: putative nitrate transporter
  misc_feature (1)..(511): Homolog of NCBI NO: 38347451 NR Description: OSJNBa0076N16.20 [Oryza sativa (japonica
  misc_feature (1)..(508): Homolog of NCBI NO: 21742982 NR Description: OSJNBa0076N16.17 [Oryza sativa (japonica
MDVARATTMASNFFAALQMFSIPAAFLADSYIKRFYTVLIFGPIEILGYILLAVQAHVPSLHPPPCVPGQETSTCESVSGSNLSLLLLGLYLIPIGDGAARACLPALGGEQFDRSDPVEQRQESSFFNWYTFSVSTGGFVGLVFIVWVENSKGWDVGFAVCALSVLLGMLIWIAGLPLYRNQLPTSSPITRILQVLVAAFKKRNVALPANPSELKQISQGDAGSLEILHRTDGFRCLDKAAVDTGRTGGWILCSITQVEETKIILRMVPIFLSAVLGYIPVPLILNFTVQQGNTMDTRLGALHISPATLFIIPTLFQMVILVVYDRFIVPFLRRITGYVGGVTHLQRIGIGFLSTVVATGVAAIVEASRKKVVRDSCLVDATAGIPISVFWLTIQFFLLGIVDVTSFVGLLEFFYSEASTGMKSIGSSIFYCILGVSAWLGSLLIQVANRVTRHRDGTGGWLDGTNLNKGKLERFYWLLAVLELVSLLVYVFFASRYVYGNDQRVVADEDNNTAPSDGTINVI

SEQ ID NO: 18952 - protein, 515 aa, Zea mays subsp. mays
  peptide (1)..(515): Ceres Seq. ID no. 12359117
  misc_feature (27)..(424): Pfam Name: POT family Pfam Description: POT family
  misc_feature (1)..(194): Homolog of NCBI NO: 18409382 NR Description: nitrate transporter (NTL1)
  misc_feature (1)..(194): Homolog of NCBI NO: 11358579 NR Description: nitrate transporter NTL1 [validated] -
  misc_feature (223)..(491): Homolog of NCBI NO: 25404844 NR Description: nitrate transporter (NTL1), 53025-56402
  misc_feature (223)..(491): Homolog of NCBI NO: 18409382 NR Description: nitrate transporter (NTL1)
  misc_feature (223)..(491): Homolog of NCBI NO: 11358579 NR Description: nitrate transporter NTL1 [validated] -
  misc_feature (1)..(194): Homolog of NCBI NO: 17064754 NR Description: nitrate transporter (NTL1) [Arabidopsis thaliana]
  misc_feature (223)..(491): Homolog of NCBI NO: 17064754 NR Description: nitrate transporter (NTL1) [Arabidopsis thaliana]
  misc_feature (1)..(495): Homolog of NCBI NO: 34909514 NR Description: putative nitrate transporter
  misc_feature (1)..(503): Homolog of NCBI NO: 38347451 NR Description: OSJNBa0076N16.20 [Oryza sativa (japonica
  misc_feature (1)..(500): Homolog of NCBI NO: 21742982 NR Description: OSJNBa0076N16.17 [Oryza sativa (japonica
MASNFFAALQMFSIPAAFLADSYIKRFYTVLIFGPIEILGYILLAVQAHVPSLHPPPCVPGQETSTCESVSGSNLSLLLLGLYLIPIGDGAARACLPALGGEQFDRSDPVEQRQESSFFNWYTFSVSTGGFVGLVFIVWVENSKGWDVGFAVCALSVLLGMLIWIAGLPLYRNQLPTSSPITRILQVLVAAFKKRNVALPANPSELKQISQGDAGSLEILHRTDGFRCLDKAAVDTGRTGGWILCSITQVEETKIILRMVPIFLSAVLGYIPVPLILNFTVQQGNTMDTRLGALHISPATLFIIPTLFQMVILVVYDRFIVPFLRRITGYVGGVTHLQRIGIGFLSTVVATGVAAIVEASRKKVVRDSCLVDATAGIPISVFWLTIQFFLLGIVDVTSFVGLLEFFYSEASTGMKSIGSSIFYCILGVSAWLGSLLIQVANRVTRHRDGTGGWLDGTNLNKGKLERFYWLLAVLELVSLLVYVFFASRYVYGNDQRVVADEDNNTAPSDGTINVI

SEQ ID NO: 18953 - DNA, 759 bp, Zea mays subsp. mays
  misc_feature (1)..(759): Ceres Seq. ID no. 12483059
  misc_feature: MA Experiment ID: 108535 Result: Up-regulated in Transcription
  misc_feature: MA Experiment 108535 PARAMETER Experiment Name: Zm_Meristem_P Parameter: Age (day) Value: 8
  misc_feature: MA Experiment 108535 PARAMETER Experiment Name: Zm_Meristem_P Parameter: Organism Value: Zea mays
  misc_feature: MA Experiment 108535 PARAMETER Experiment Name: Zm_Meristem_P Parameter: Plant Line Value: 35A19
  misc_feature: MA Experiment 108535 PARAMETER Experiment Name: Zm_Meristem_P Parameter: Tissue Value: Root Meristem vs. Above Root Meristem
  misc_feature: MA Experiment ID: 108544 Result: Down-regulated in Transcription
catacacacacagccccatcccgccgcccgcaaggaaccagcgccaccttaggttagggcggccgcgcggagaagtgcgcggttgccaagatgcagatcttcgtgaagaccctgacggggaagaccatcacgctggaggtggagtcctcggacaccatcgacaacgtgaaggccaagatccaggacaaggagggcatcccgccggaccagcagcgcctcatcttcgccggcaagcagctcgaggatggccgcaccctcgccgactacaacatccagaaggagtcgacgctgcacctggtcgtccgcctcaggggaggcgccaagaagccgaagaagaagacgtacaccaagcccaagaagatcaagcacaagcacaagaaggtgaagctcgccgtgctccagttctacaaggttgacgacgccaccggcaaggtcacccgcctccgcaaggattgccccaacgccgagtgccatgcgggggtcttcatggccaaccacttcgaccgccactactgcggtaagtgtggcctcacctacgtctacaaccagcaggcgtaggatgccccttctttctttcggtaaggaaactgggaagtcttgctaggtgataatcctttttgctttgttttgttttgttgcaatggtagtagtttcttggaacagaacacctgtatctcttttggcgacgcttaatttgggtttaattatatcatgtcgttatgggtcctgtcaagcactgttgaattcgaatggtttttg

SEQ ID NO: 18954 - protein, 155 aa, Zea mays subsp. mays
  peptide (1)..(155): Ceres Seq. ID no. 12483060
  misc_feature (1)..(74): Pfam Name: Ubiquitin family Pfam Description: Ubiquitin family
  misc_feature (1)..(155): Homolog of NCBI NO: 541954 NR Description: ubiquitin/ribosomal protein S27a fusion protein -
  misc_feature (1)..(155): Homolog of NCBI NO: 25294256 NR Description: ubiquitin extension protein [imported] - common
  misc_feature (1)..(155): Homolog of NCBI NO: 279636 NR Description: ubiquitin / ribosomal protein S27a - tomato
  misc_feature (1)..(155): Homolog of NCBI NO: 34581769 NR Description: ubiquitin extension protein [Cucumis sativus]
  misc_feature (1)..(155): Homolog of NCBI NO: 902525 NR Description: ubiquitin fusion protein
  misc_feature (1)..(155): Homolog of NCBI NO: 100599 NR Description: ubiquitin / ribosomal protein S27a.2 - barley
  misc_feature (1)..(155): Homolog of NCBI NO: 100598 NR Description: ubiquitin / ribosomal protein S27a.1 - barley
  misc_feature (1)..(155): Homolog of NCBI NO: 34894792 NR Description: ubiquitin / ribosomal protein S27a
  misc_feature (1)..(155): Homolog of NCBI NO: 82733 NR Description: ubiquitin / ribosomal protein S27a - maize
  misc_feature (1)..(155): Homolog of NCBI NO: 1044940 NR Description: fusion gene [Zea mays]
MQIFVKTLTGKTITLEVESSDTIDNVKAKIQDKEGIPPDQQRLIFAGKQLEDGRTLADYNIQKESTLHLVVRLRGGAKKPKKKTYTKPKKIKHKHKKVKLAVLQFYKVDDATGKVTRLRKDCPNAECHAGVFMANHFDRHYCGKCGLTYVYNQQA

SEQ ID NO: 18955 - protein, 137 aa, Zea mays subsp. mays
  peptide (1)..(137): Ceres Seq. ID no. 12483061
YTHSPIPPPARNQRHLRLGRPRGEVRGCQDADLREDPDGEDHHAGGGVLGHHRQREGQDPGQGGHPAGPAAPHLRRQAARGWPHPRRLQHPEGVDAAPGRPPQGRRQEAEEEDVHQAQEDQAQAQEGEARRAPVLQG

SEQ ID NO: 18956 - DNA, 1883 bp, Zea mays subsp. mays
  misc_feature (1)..(1883): Ceres Seq. ID no. 12418285
  misc_feature: MA Experiment ID: 108522 Result: Up-regulated in Transcription
  misc_feature: MA Experiment 108522 PARAMETER Experiment Name: Zm_42deg_Heat_P Parameter: Age (day) Value: 8
  misc_feature: MA Experiment 108522 PARAMETER Experiment Name: Zm_42deg_Heat_P Parameter: Organism Value: Zea mays
  misc_feature: MA Experiment 108522 PARAMETER Experiment Name: Zm_42deg_Heat_P Parameter: Plant Line Value: 35A19
  misc_feature: MA Experiment 108522 PARAMETER Experiment Name: Zm_42deg_Heat_P Parameter: Temperature (deg C) Value: 42 vs. 22
  misc_feature: MA Experiment 108522 PARAMETER Experiment Name: Zm_42deg_Heat_P Parameter: Timepoint (hr) Value: 1
  misc_feature: MA Experiment 108522 PARAMETER Experiment Name: Zm_42deg_Heat_P Parameter: Tissue Value: Aerial
  misc_feature: MA Experiment ID: 108687 Result: Up-regulated in Transcription
  misc_feature: MA Experiment 108687 PARAMETER Experiment Name: Zm_Embryos-Flowers__P Parameter: Tissue Value: Embryo vs. Aerial+
agtatctctagctagttggccggaatgaccgccaccacctccgacaggtcggtctcgaaagccctcacgaggttccctatgaacttgcgggtgactccggtgaggttggccaccttctgcctgtacgccctgaacgcatcgccgtcgacgggcgcggcctccccgccggcgccgaagagttccttcctctccagctcggcggaggcgtgcaggcactcgagccagcggttggcctggttctgcaggtcgtcgaacagcccgcgcttggtgacgtcgcgctccgggtccaggaagtagccgtacgcgtgcgcccaccgcaggatccgccgcccttcggccacctgccggtaggcctcggccacgaacccgagctccgtggccgggacgtccgccgccctcgccatccactccagctccccgcgctccagcgtcgccgtgtccctggccacgctctccagcgccgcgcggttcgacacccaccgctcgtagtggtacaggtacctctccagcgacgccctggccaaccgcctcgcctccttctcctcggcgccggcgccggcgacgcccgtctcggccggcggatgtgggcggaggtcgttgcaggcgtagtggttctcccctcccgccggctgcaggcagagccagcagaagcggtggccgcacggcggcgagcaccgcatgtggttgcagccctggttcttctcgatggggcggccgcatctggggcacggcttggtgtgcgccatcacccagttggccgtctccgccgagtcggagctgttcttgagcagccacgcgtgcaccgtggcgcacgacaccggccggtgcgcctcctcgccgcaggcccagcagactccgtaccgtacacgcagaacacgtccgccgccgcgtcaccgccgcccgacgactccagcgcgcgggcgcacccggggccgccgcaccaccgcaccctcccgccgctctcctccacgtacgaccggagccagaaccgcgcgtaccggcccacgtcgtccgccgccagcacctcgtccacgagctcccggacgacgggcgccgagcagcgcgggtccgggcaccgcagcgacaggcagcgcgggccgtcgcccaccgccgcgcggacgtacccgcgccagcacccgttgcagtagtagtgggagcagcccgcggacgccgtctgccccgcgggctgctcgtcgaagcagatggcgcagacgcgcggccgcaagccgcgcgccgcggggacgagctggcccgggggaaggccggcggcgccgcgcacgcgccgctcgtccgcgaaccactcctcctggacccgcccgacgcgccacttgaagtggcgcagcaggacggccgcgaagcccggcgggatggacagcacctcggcgaccctggcggtgtccgcctcttgccgcgcgcggacgtcgtcctcggtcagaacggcgtacctctgctccccgtcgcacgccgcggcgtcggcctgtgtctgctcggctcctccttcgcagtcgtcgtcgtcgtcgtcgtcgtactcgaacatgtaatcctcgtcgccggagctgctgccgtcgtcagccgtttcctgggcatgcccgcgagagccatcgccatcggcgctctctccgtcgtcgtcgtggtcgcggccggatctaggggctgcttcgcatgtcttgccgcggcggctcgtcccgcagctgtcgtcgtcgtggcccgtgcagctgctgacctgtcggtacctcttgttggagacagcgccgccgccagacgccatgccgccgagccgcggtttcttggcgagggatttggactacatccttctctaacagcgttctggtccgttgatatgtactggtggatagtggtaatccatcggacgtttcggccgg

SEQ ID NO: 18957 - protein, 217 aa, Zea mays subsp. mays
  peptide (1)..(217): Ceres Seq. ID no. 12418286
  misc_feature (154)..(217): Pfam Name: Cupin Pfam Description: Cupin
  misc_feature (56)..(217): Homolog of NCBI NO: 6649242 NR Description: splicing coactivator subunit SRm300 [Homo sapiens]
  misc_feature (41)..(217): Homolog of NCBI NO: 29247944 NR Description: GLP_26_54603_52153 [Giardia lamblia ATCC 50803]
  misc_feature (56)..(217): Homolog of NCBI NO: 7512967 NR Description: hypothetical protein KIAA0324 - human (fragment)
  misc_feature (56)..(217): Homolog of NCBI NO: 6634015 NR Description: KIAA0324 protein [Homo sapiens]
  misc_feature (56)..(217): Homolog of NCBI NO: 5821151 NR Description: RNA binding protein [Homo sapiens]
  misc_feature (56)..(217): Homolog of NCBI NO: 34868816 NR Description: similar to splicing coactivator subunit SRm300
  misc_feature (54)..(217): Homolog of NCBI NO: 30984464 NR Description: very large tegument protein [Cercopithecine
  misc_feature (49)..(217): Homolog of NCBI NO: 34872074 NR Description: similar to Ser/Arg-related nuclear matrix protein
  misc_feature (45)..(217): Homolog of NCBI NO: 34872074 NR Description: similar to Ser/Arg-related nuclear matrix protein
  misc_feature (49)..(217): Homolog of NCBI NO: 6649242 NR Description: splicing coactivator subunit SRm300 [Homo sapiens]
MWLQPWFFSMGRPHLGHGLVCAITQLAVSAESELFLSSHACTVAHDTGRCASSPQAQQTPYRTRRTRPPPRHRRPTTPARGRTRGRRTTAPSRRSPPRTTGARTARTGPRRPPPAPRPRAPGRRAPSSAGPGTAATGSAGRRPPPRGRTRASTRCSSSGSSPRTPSAPRAARRSRWRRRAAASRAPRGRAGPGEGRRRRARAARPRTTPPGPARRAT

SEQ ID NO: 18958 - protein, 208 aa, Zea mays subsp. mays
  peptide (1)..(208): Ceres Seq. ID no. 12418287
  misc_feature (145)..(208): Pfam Name: Cupin Pfam Description: Cupin
  misc_feature (47)..(208): Homolog of NCBI NO: 6649242 NR Description: splicing coactivator subunit SRm300 [Homo sapiens]
  misc_feature (32)..(208): Homolog of NCBI NO: 29247944 NR Description: GLP_26_54603_52153 [Giardia lamblia ATCC 50803]
  misc_feature (47)..(208): Homolog of NCBI NO: 7512967 NR Description: hypothetical protein KIAA0324 - human (fragment)
  misc_feature (47)..(208): Homolog of NCBI NO: 6634015 NR Description: KIAA0324 protein [Homo sapiens]
  misc_feature (47)..(208): Homolog of NCBI NO: 5821151 NR Description: RNA binding protein [Homo sapiens]
  misc_feature (47)..(208): Homolog of NCBI NO: 34868816 NR Description: similar to splicing coactivator subunit SRm300
  misc_feature (45)..(208): Homolog of NCBI NO: 30984464 NR Description: very large tegument protein [Cercopithecine
  misc_feature (40)..(208): Homolog of NCBI NO: 34872074 NR Description: similar to Ser/Arg-related nuclear matrix protein
  misc_feature (36)..(208): Homolog of NCBI NO: 34872074 NR Description: similar to Ser/Arg-related nuclear matrix protein
  misc_feature (40)..(208): Homolog of NCBI NO: 6649242 NR Description: splicing coactivator subunit SRm300 [Homo sapiens]
MGRPHLGHGLVCAITQLAVSAESELFLSSHACTVAHDTGRCASSPQAQQTPYRTRRTRPPPRHRRPTTPARGRTRGRRTTAPSRRSPPRTTGARTARTGPRRPPPAPRPRAPGRRAPSSAGPGTAATGSAGRRPPPRGRTRASTRCSSSGSSPRTPSAPRAARRSRWRRRAAASRAPRGRAGPGEGRRRRARAARPRTTPPGPARRAT

SEQ ID NO: 18959 - protein, 188 aa, Zea mays subsp. mays
  peptide (1)..(188): Ceres Seq. ID no. 12418288
  misc_feature (86)..(188): Homolog of NCBI NO: 13592175 NR Description: ppg3 [Leishmania major]
  misc_feature (94)..(188): Homolog of NCBI NO: 5420387 NR Description: proteophosphoglycan [Leishmania major]
  misc_feature (90)..(188): Homolog of NCBI NO: 13592175 NR Description: ppg3 [Leishmania major]
  misc_feature (86)..(188): Homolog of NCBI NO: 13592175 NR Description: ppg3 [Leishmania major]
  misc_feature (86)..(188): Homolog of NCBI NO: 13592175 NR Description: ppg3 [Leishmania major]
  misc_feature (86)..(188): Homolog of NCBI NO: 13592175 NR Description: ppg3 [Leishmania major]
  misc_feature (86)..(188): Homolog of NCBI NO: 13592175 NR Description: ppg3 [Leishmania major]
  misc_feature (86)..(188): Homolog of NCBI NO: 13592175 NR Description: ppg3 [Leishmania major]
  misc_feature (90)..(188): Homolog of NCBI NO: 13592175 NR Description: ppg3 [Leishmania major]
  misc_feature (81)..(188): Homolog of NCBI NO: 24648035 NR Description: CG7709-PA [Drosophila melanogaster]
MWAEVVAGVVVLPSRRLQAEPAEAVAARRRAPHVVAALVLLDGAAASGARLGVRHHPVGRLRRVGAVLEQPRVHRGARHRPVRLLAAGPADSVPYTQNTSAAASPPPDDSSARAHPGPPHHRTLPPLSSTYDRSQNRAYRPTSSAASTSSTSSRTTGAEQRGSGHRSDRQRGPSPTAARTYPRQHPLQ

SEQ ID NO: 18960 - DNA, 1764 bp, Zea mays subsp. mays
  misc_feature (1)..(1764): Ceres Seq. ID no. 12375648
  misc_feature: MA Experiment ID: 108528 Result: Down-regulated in Transcription
  misc_feature: MA Experiment 108528 PARAMETER Experiment Name: Zm_Imbibed_Seeds_P Parameter: Age (day) Value: 5 vs. 2
  misc_feature: MA Experiment 108528 PARAMETER Experiment Name: Zm_Imbibed_Seeds_P Parameter: Organism Value: Zea mays
  misc_feature: MA Experiment 108528 PARAMETER Experiment Name: Zm_Imbibed_Seeds_P Parameter: Plant Line Value: 35A19
  misc_feature: MA Experiment 108528 PARAMETER Experiment Name: Zm_Imbibed_Seeds_P Parameter: Tissue Value: Aerial vs. Embryo
  misc_feature: MA Experiment ID: 108530 Result: Down-regulated in Transcription
  misc_feature: MA Experiment 108530 PARAMETER Experiment Name: Zm_Imbibed_Seeds_P Parameter: Age (day) Value: 6 vs. 2
  misc_feature: MA Experiment 108530 PARAMETER Experiment Name: Zm_Imbibed_Seeds_P Parameter: Organism Value: Zea mays
  misc_feature: MA Experiment 108530 PARAMETER Experiment Name: Zm_Imbibed_Seeds_P Parameter: Plant Line Value: 35A19
  misc_feature: MA Experiment 108530 PARAMETER Experiment Name: Zm_Imbibed_Seeds_P Parameter: Tissue Value: Aerial vs. Embryo
  misc_feature: MA Experiment ID: 108535 Result: Down-regulated in Transcription
  misc_feature: MA Experiment 108535 PARAMETER Experiment Name: Zm_Meristem_P Parameter: Age (day) Value: 8
  misc_feature: MA Experiment 108535 PARAMETER Experiment Name: Zm_Meristem_P Parameter: Organism Value: Zea mays
  misc_feature: MA Experiment 108535 PARAMETER Experiment Name: Zm_Meristem_P Parameter: Plant Line Value: 35A19
  misc_feature: MA Experiment 108535 PARAMETER Experiment Name: Zm_Meristem_P Parameter: Tissue Value: Root Meristem vs. Above Root Meristem
  misc_feature: MA Experiment ID: 108543 Result: Up-regulated in Transcription
  misc_feature: MA Experiment ID: 108545 Result: Down-regulated in Transcription
  misc_feature: MA Experiment 108545 PARAMETER Experiment Name: Zm_Imbibed_Seeds_P Parameter: Age (day) Value: 3 vs. 2
  misc_feature: MA Experiment 108545 PARAMETER Experiment Name: Zm_Imbibed_Seeds_P Parameter: Organism Value: Zea mays
  misc_feature: MA Experiment 108545 PARAMETER Experiment Name: Zm_Imbibed_Seeds_P Parameter: Plant Line Value: 35A19
  misc_feature: MA Experiment 108545 PARAMETER Experiment Name: Zm_Imbibed_Seeds_P Parameter: Tissue Value: Aerial vs. Embryo
  misc_feature: MA Experiment ID: 108546 Result: Up-regulated in Transcription
  misc_feature: MA Experiment 108546 PARAMETER Experiment Name: Zm_Imbibed_Seeds_P Parameter: Age (day) Value: 3 vs. 2
  misc_feature: MA Experiment 108546 PARAMETER Experiment Name: Zm_Imbibed_Seeds_P Parameter: Organism Value: Zea mays
  misc_feature: MA Experiment 108546 PARAMETER Experiment Name: Zm_Imbibed_Seeds_P Parameter: Plant Line Value: 35A19
  misc_feature: MA Experiment 108546 PARAMETER Experiment Name: Zm_Imbibed_Seeds_P Parameter: Tissue Value: Roots vs. Embryo
  misc_feature: MA Experiment ID: 108547 Result: Down-regulated in Transcription
  misc_feature: MA Experiment 108547 PARAMETER Experiment Name: Zm_Imbibed_Seeds_P Parameter: Age (day) Value: 4 vs. 2
  misc_feature: MA Experiment 108547 PARAMETER Experiment Name: Zm_Imbibed_Seeds_P Parameter: Organism Value: Zea mays
  misc_feature: MA Experiment 108547 PARAMETER Experiment Name: Zm_Imbibed_Seeds_P Parameter: Plant Line Value: 35A19
  misc_feature: MA Experiment 108547 PARAMETER Experiment Name: Zm_Imbibed_Seeds_P Parameter: Tissue Value: Aerial vs. Embryo
  misc_feature: MA Experiment ID: 108689 Result: Up-regulated in Transcription
  misc_feature: MA Experiment 108689 PARAMETER Experiment Name: Zm_Drought_Roots_P Parameter: Age (day) Value: 9
  misc_feature: MA Experiment 108689 PARAMETER Experiment Name: Zm_Drought_Roots_P Parameter: Organism Value: Zea mays
  misc_feature: MA Experiment 108689 PARAMETER Experiment Name: Zm_Drought_Roots_P Parameter: Plant Line Value: 35A19
  misc_feature: MA Experiment 108689 PARAMETER Experiment Name: Zm_Drought_Roots_P Parameter: Timepoint (hr) Value: 24
  misc_feature: MA Experiment 108689 PARAMETER Experiment Name: Zm_Drought_Roots_P Parameter: Tissue Value: Roots
  misc_feature: MA Experiment 108689 PARAMETER Experiment Name: Zm_Drought_Roots_P Parameter: Treatment Value: Drought vs. No Drought
  misc_feature: MA Experiment ID: 20000478 Result: Down-regulated in Transcription
  misc_feature: MA Experiment 20000478 PARAMETER Experiment Name: Zm_5mM_SA_P Parameter: Age (day) Value: 11
  misc_feature: MA Experiment 20000478 PARAMETER Experiment Name: Zm_5mM_SA_P Parameter: Organism Value: Zea mays
  misc_feature: MA Experiment 20000478 PARAMETER Experiment Name: Zm_5mM_SA_P Parameter: Plant Line Value: 35A19
  misc_feature: MA Experiment 20000478 PARAMETER Experiment Name: Zm_5mM_SA_P Parameter: Timepoint (hr) Value: 72
  misc_feature: MA Experiment 20000478 PARAMETER Experiment Name: Zm_5mM_SA_P Parameter: Tissue Value: Aerial
  misc_feature: MA Experiment 20000478 PARAMETER Experiment Name: Zm_5mM_SA_P Parameter: Treatment Value: 5mM SA vs. No Treatment
atcacgcacggccacacctgccctccattccatccagcacctagaaaaaactaatcgcaattagttgacgcataatattttgagggaggagaaggggggaattgactagttgaccaatcgcgagtggcgatgatgatgcagttgggggccaggagtttggtgaggaggttctcccgtctcgccgcggcgggggccccggccgagacgacgtcggctggcgtgccgcgaatgccggcgttcgaccacgtcccgctgccctacgacgggccgagcgccgccgacatcgcccgcaagcgcgccgagtacctcagcccgtccctcttccacttctactccaagcctctgaacatcgtggagggcaagaggcagtacttgtacgacgagcacggccggcgctacctggacgcgttcgccggcatcgccaccgtgtgctgcggccactgccaccccgacgtcgtggacgcgatcaccaggcaggccaagcgcctgcagcactccaccgtgctctacctcaaccacgtcatcgccgatttcgccgaggcgctggcatccaagctgcccggcgacctcaaggtcgtcttcttcaccaactccggcacggaggcgaacgagctggccatcctgatggcgcggctgtacaccggctcccacgacatcatctccctccgcaactcgtaccacggcaacgcggccgggaccatgggagccaccgcgcagaagaactggaagttcaacgtcatccagagtggcgtgcaccacgcggtgaacccggacccctacagaggcgccttcggctccgacgccgagaagtacgtgcgggacgtgcaggagatcatcgagttcggcaccaccggccaggtcgccggcttcatatccgaggccatccagggcgtgggcggaatcgtggaggtgtcgccgggctacctgccgctggcgtacgacaaggtccggaaggccggcgggctctgcatcgccgacgaggtccaggcgggtttcgcccgcgtcggcagccacttctggggcttcgagacccacggcgtcgtccccgacatagtgaccatggcaaagggcatcggcaacggcatcccgctgggcgccgtggtgacgacgccggaggtcgcgcaggtgctgacccggcgctgctacttcaacacgttcggcggcaacccgctgtgcaccgccggcgggctcgccgtcctcgaggtgctcgagaaggagaggctccaggagaacgccttcgtcgtcggctcctacctcaaggaccgcctccgcggtctccaggagaagcacgagatcatcggcgacgtgaggggaacgggtttcatgctcggcatcgagctggtcaccgatcggcagctcaagacgccggcgaaagatgagatctgccacgccatggaatacatgaaagatatgggcgtcttggtcggcaaaggcgggttctatgggaacgtcttcaggatcactccccctctatgcttcaccaaggaagatgctgatttcttcgtcgaggtgatggacattgcgctgtcgaagctctgagctgtggccgtcaggcggaggggcggtgtgtctgtctgtatatataatcctcgcccgagtttagcagctgcgtcggagttgtactatctcactcaagagaatggcgaaaaaaccttggcagtttgtgactcaaggggaaaaaactaaaccatgcagacgaatttggcttatcgcaacgctagcttttaattcagctttcgtctggagatgacgtgccttgtaacg

SEQ ID NO: 18961 - protein, 469 aa, Zea mays subsp. mays
  peptide (1)..(469): Ceres Seq. ID no. 12375649
  misc_feature (62)..(469): Pfam Name: Aminotransferase class-III Pfam Description: Aminotransferase class-III
  misc_feature (225)..(462): Homolog of NCBI NO: 39595899 NR Description: Hypothetical protein CBG12888 [Caenorhabditis
  misc_feature (1)..(222): Homolog of NCBI NO: 28574759 NR Description: CG11241-PA [Drosophila melanogaster]
  misc_feature (1)..(222): Homolog of NCBI NO: 16198011 NR Description: LD24726p [Drosophila melanogaster]
  misc_feature (219)..(468): Homolog of NCBI NO: 28574759 NR Description: CG11241-PA [Drosophila melanogaster]
  misc_feature (219)..(468): Homolog of NCBI NO: 16198011 NR Description: LD24726p [Drosophila melanogaster]
  misc_feature (12)..(469): Homolog of NCBI NO: 18420498 NR Description: putative protein
  misc_feature (12)..(469): Homolog of NCBI NO: 5731259 NR Description: alanine:glyoxylate aminotransferase 2 homolog
  misc_feature (9)..(469): Homolog of NCBI NO: 15028237 NR Description: putative beta-alanine-pyruvate aminotransferase
  misc_feature (9)..(469): Homolog of NCBI NO: 15224499 NR Description: putative beta-alanine-pyruvate aminotransferase
  misc_feature (25)..(469): Homolog of NCBI NO: 15231974 NR Description: putative aminotransferase
MMMQLGARSLVRRFSRLAAAGAPAETTSAGVPRMPAFDHVPLPYDGPSAADIARKRAEYLSPSLFHFYSKPLNIVEGKRQYLYDEHGRRYLDAFAGIATVCCGHCHPDVVDAITRQAKRLQHSTVLYLNHVIADFAEALASKLPGDLKVVFFTNSGTEANELAILMARLYTGSHDIISLRNSYHGNAAGTMGATAQKNWKFNVIQSGVHHAVNPDPYRGAFGSDAEKYVRDVQEIIEFGTTGQVAGFISEAIQGVGGIVEVSPGYLPLAYDKVRKAGGLCIADEVQAGFARVGSHFWGFETHGVVPDIVTMAKGIGNGIPLGAVVTTPEVAQVLTRRCYFNTFGGNPLCTAGGLAVLEVLEKERLQENAFVVGSYLKDRLRGLQEKHEIIGDVRGTGFMLGIELVTDRQLKTPAKDEICHAMEYMKDMGVLVGKGGFYGNVFRITPPLCFTKEDADFFVEVMDIALSKL

SEQ ID NO: 18962 - protein, 468 aa, Zea mays subsp. mays
  peptide (1)..(468): Ceres Seq. ID no. 12375650
  misc_feature (61)..(468): Pfam Name: Aminotransferase class-III Pfam Description: Aminotransferase class-III
  misc_feature (224)..(461): Homolog of NCBI NO: 39595899 NR Description: Hypothetical protein CBG12888 [Caenorhabditis
  misc_feature (1)..(221): Homolog of NCBI NO: 28574759 NR Description: CG11241-PA [Drosophila melanogaster]
  misc_feature (1)..(221): Homolog of NCBI NO: 16198011 NR Description: LD24726p [Drosophila melanogaster]
  misc_feature (218)..(467): Homolog of NCBI NO: 28574759 NR Description: CG11241-PA [Drosophila melanogaster]
  misc_feature (218)..(467): Homolog of NCBI NO: 16198011 NR Description: LD24726p [Drosophila melanogaster]
  misc_feature (11)..(468): Homolog of NCBI NO: 18420498 NR Description: putative protein
  misc_feature (11)..(468): Homolog of NCBI NO: 5731259 NR Description: alanine:glyoxylate aminotransferase 2 homolog
  misc_feature (8)..(468): Homolog of NCBI NO: 15028237 NR Description: putative beta-alanine-pyruvate aminotransferase
  misc_feature (8)..(468): Homolog of NCBI NO: 15224499 NR Description: putative beta-alanine-pyruvate aminotransferase
  misc_feature (24)..(468): Homolog of NCBI NO: 15231974 NR Description: putative aminotransferase
MMQLGARSLVRRFSRLAAAGAPAETTSAGVPRMPAFDHVPLPYDGPSAADIARKRAEYLSPSLFHFYSKPLNIVEGKRQYLYDEHGRRYLDAFAGIATVCCGHCHPDVVDAITRQAKRLQHSTVLYLNHVIADFAEALASKLPGDLKVVFFTNSGTEANELAILMARLYTGSHDIISLRNSYHGNAAGTMGATAQKNWKFNVIQSGVHHAVNPDPYRGAFGSDAEKYVRDVQEIIEFGTTGQVAGFISEAIQGVGGIVEVSPGYLPLAYDKVRKAGGLCIADEVQAGFARVGSHFWGFETHGVVPDIVTMAKGIGNGIPLGAVVTTPEVAQVLTRRCYFNTFGGNPLCTAGGLAVLEVLEKERLQENAFVVGSYLKDRLRGLQEKHEIIGDVRGTGFMLGIELVTDRQLKTPAKDEICHAMEYMKDMGVLVGKGGFYGNVFRITPPLCFTKEDADFFVEVMDIALSKL

SEQ ID NO: 18963 - protein, 467 aa, Zea mays subsp. mays
  peptide (1)..(467): Ceres Seq. ID no. 12375651
  misc_feature (60)..(467): Pfam Name: Aminotransferase class-III Pfam Description: Aminotransferase class-III
  misc_feature (223)..(460): Homolog of NCBI NO: 39595899 NR Description: Hypothetical protein CBG12888 [Caenorhabditis
  misc_feature (1)..(220): Homolog of NCBI NO: 28574759 NR Description: CG11241-PA [Drosophila melanogaster]
  misc_feature (1)..(220): Homolog of NCBI NO: 16198011 NR Description: LD24726p [Drosophila melanogaster]
  misc_feature (217)..(466): Homolog of NCBI NO: 28574759 NR Description: CG11241-PA [Drosophila melanogaster]
  misc_feature (217)..(466): Homolog of NCBI NO: 16198011 NR Description: LD24726p [Drosophila melanogaster]
  misc_feature (10)..(467): Homolog of NCBI NO: 18420498 NR Description: putative protein
  misc_feature (10)..(467): Homolog of NCBI NO: 5731259 NR Description: alanine:glyoxylate aminotransferase 2 homolog
  misc_feature (7)..(467): Homolog of NCBI NO: 15028237 NR Description: putative beta-alanine-pyruvate aminotransferase
  misc_feature (7)..(467): Homolog of NCBI NO: 15224499 NR Description: putative beta-alanine-pyruvate aminotransferase
  misc_feature (23)..(467): Homolog of NCBI NO: 15231974 NR Description: putative aminotransferase
MQLGARSLVRRFSRLAAAGAPAETTSAGVPRMPAFDHVPLPYDGPSAADIARKRAEYLSPSLFHFYSKPLNIVEGKRQYLYDEHGRRYLDAFAGIATVCCGHCHPDVVDAITRQAKRLQHSTVLYLNHVIADFAEALASKLPGDLKVVFFTNSGTEANELAILMARLYTGSHDIISLRNSYHGNAAGTMGATAQKNWKFNVIQSGVHHAVNPDPYRGAFGSDAEKYVRDVQEIIEFGTTGQVAGFISEAIQGVGGIVEVSPGYLPLAYDKVRKAGGLCIADEVQAGFARVGSHFWGFETHGVVPDIVTMAKGIGNGIPLGAVVTTPEVAQVLTRRCYFNTFGGNPLCTAGGLAVLEVLEKERLQENAFVVGSYLKDRLRGLQEKHEIIGDVRGTGFMLGIELVTDRQLKTPAKDEICHAMEYMKDMGVLVGKGGFYGNVFRITPPLCFTKEDADFFVEVMDIALSKL

SEQ ID NO: 18964 - DNA, 1834 bp, Zea mays subsp. mays
  misc_feature (1)..(1834): Ceres Seq. ID no. 13589535
  misc_feature: MA Experiment ID: 108527 Result: Up-regulated in Transcription
  misc_feature: MA Experiment 108527 PARAMETER Experiment Name: Zm_5mM_NO_P Parameter: Age (day) Value: 8
  misc_feature: MA Experiment 108527 PARAMETER Experiment Name: Zm_5mM_NO_P Parameter: Organism Value: Zea mays
  misc_feature: MA Experiment 108527 PARAMETER Experiment Name: Zm_5mM_NO_P Parameter: Plant Line Value: 35A19
  misc_feature: MA Experiment 108527 PARAMETER Experiment Name: Zm_5mM_NO_P Parameter: Timepoint (hr) Value: 6
  misc_feature: MA Experiment 108527 PARAMETER Experiment Name: Zm_5mM_NO_P Parameter: Tissue Value: Aerial
  misc_feature: MA Experiment 108527 PARAMETER Experiment Name: Zm_5mM_NO_P Parameter: Treatment Value: 5mM NO vs. No Treatment
  misc_feature: MA Experiment ID: 108543 Result: Down-regulated in Transcription
  misc_feature: MA Experiment ID: 108559 Result: Up-regulated in Transcription
  misc_feature: MA Experiment 108559 PARAMETER Experiment Name: Zm_5mM_NO_P Parameter: Age (day) Value: 8
  misc_feature: MA Experiment 108559 PARAMETER Experiment Name: Zm_5mM_NO_P Parameter: Organism Value: Zea mays
  misc_feature: MA Experiment 108559 PARAMETER Experiment Name: Zm_5mM_NO_P Parameter: Plant Line Value: 35A19
  misc_feature: MA Experiment 108559 PARAMETER Experiment Name: Zm_5mM_NO_P Parameter: Timepoint (hr) Value: 12
  misc_feature: MA Experiment 108559 PARAMETER Experiment Name: Zm_5mM_NO_P Parameter: Tissue Value: Aerial
  misc_feature: MA Experiment 108559 PARAMETER Experiment Name: Zm_5mM_NO_P Parameter: Treatment Value: 5mM NO vs. No Treatment
ctaatcgaaaaccacttgatcccatgttcaacagacctttgttccctagaactttgggcaacccttttgcccttttggatccaggttttgctgacataactgctggtgatatatttggacgtggaccccgagttacacaacctagggacgtgaggcagatacctattgaagttaaggacagcaatactcaaacaggcagttctggtcagggtcccattattgaggatgttactggacgtgaatctttctatggtccagaggtccatgggaccgttatagttgacgaagatgatgaagacttgccattaacactatctgctcaggatcctaagatcccaagcagtgctttgcacccaaaccatttcatgcctagtgcgcctccagtggttgatgttagtgaccataacaatgatatagaagaggagatgattaaggcagcaattgaagcttcaaaaagggaagctgacgggatgaaaaatgttctaagtagtggtcaatctgaaaacatgtcacgtggcagaggtgatcatgagcttgctcgggcggtttctttgtccttggagacagcagagcgagagagagctctgcgccaagagggaatgtatgtagcagatcactctcctgacttatctgataaagaaggcggtcaaggaggaagtgggataagcgaaaggcgaggactaactacaggagaagtgggaacttctgagcaaacagtagatgaagagaacttccaagaggacaatgaagatggtgaagaacaacctttagttaggactcgttctaggcgacttcgaggcagaactattgagccagcagaaactgttcaaagggctgacagcccgccctcaagtccccaacctcatgttcaaattggtcatcagcgtaatgtggggtttccttcagtagagtggggtggtatttcttctgaagagcgtgatgaagctcttatgcttgaggctgcaatgtttggtgggattcctgaaggagcaccatatccattttccttcccagcccatggcaggtcgactcactatcccctagtagcacgtcctccatcaccatcattaacggcacagcggttgttaagggagcagcaggatgatgagtatcttgctgctctccaagctgatcgagaaaaagagttgaaggctgtgcaggaggctgaacttcgcagggtagaggaagctgcagcaagagaggctgctcttgaacgtcaaaagaaagaagaggaggagaagctaaagaaacaacgtgaggaagaggagttggaatccaagcttgcagccaaacaagcatcactacctaaggagccactacaaaatgacgagggggctgtcacagtggtagtccgcatgcctgatggtagtcgtcgaggacggcgctttctcaaatctgacaggcttcagtatctttttgatttcatagacatcagccggactttcaaaccaggaacttatagactggcgaggtcttatcccaggcgtgccttcactgaattggagagccagatgtcactgagcgatctcggtctcactagcaagcaggaagctctgttcctagaaaaactgtctgcgtagagtacaaggttctggagttatggtcgagtagtatatgcacttataaaatcggtcatttagatcgtgcctggcgtgtgttcatgaaaatactgcagcggttgaatgattactgatctctagagatcccgtcgccatcttctgtgctctgaaacggaggtgtttcgatctgactgtgcagatgggcagttctacattcagatttcagaacaactgtagctcttgcggttttaagacttgagtatggtttactttgg

SEQ ID NO: 18965 - protein, 525 aa, Zea mays subsp. mays
  peptide (1)..(525): Ceres Seq. ID no. 13589536
  misc_feature (441)..(521): Pfam Name: UBX domain Pfam Description: UBX domain
  misc_feature (2)..(396): Homolog of NCBI NO: 13160609 NR Description: Ara4-interacting protein [Arabidopsis thaliana]
  misc_feature (2)..(422): Homolog of NCBI NO: 7487672 NR Description: hypothetical protein T5C23.170 - Arabidopsis
  misc_feature (395)..(523): Homolog of NCBI NO: 30678726 NR Description: expressed protein [Arabidopsis thaliana]
  misc_feature (134)..(263): Homolog of NCBI NO: 30678726 NR Description: expressed protein [Arabidopsis thaliana]
  misc_feature (127)..(421): Homolog of NCBI NO: 13160609 NR Description: Ara4-interacting protein [Arabidopsis thaliana]
  misc_feature (71)..(521): Homolog of NCBI NO: 18416058 NR Description: expressed protein [Arabidopsis thaliana]
  misc_feature (127)..(521): Homolog of NCBI NO: 7487672 NR Description: hypothetical protein T5C23.170 - Arabidopsis
  misc_feature (127)..(521): Homolog of NCBI NO: 18413644 NR Description: expressed protein [Arabidopsis thaliana]
  misc_feature (20)..(191): Homolog of NCBI NO: 7486575 NR Description: hypothetical protein F7H19.230 - Arabidopsis
  misc_feature (183)..(521): Homolog of NCBI NO: 7486575 NR Description: hypothetical protein F7H19.230 - Arabidopsis
NRKPLDPMFNRPLFPRTLGNPFALLDPGFADITAGDIFGRGPRVTQPRDVRQIPIEVKDSNTQTGSSGQGPIIEDVTGRESFYGPEVHGTVIVDEDDEDLPLTLSAQDPKIPSSALHPNHFMPSAPPVVDVSDHNNDIEEEMIKAAIEASKREADGMKNVLSSGQSENMSRGRGDHELARAVSLSLETAERERALRQEGMYVADHSPDLSDKEGGQGGSGISERRGLTTGEVGTSEQTVDEENFQEDNEDGEEQPLVRTRSRRLRGRTIEPAETVQRADSPPSSPQPHVQIGHQRNVGFPSVEWGGISSEERDEALMLEAAMFGGIPEGAPYPFSFPAHGRSTHYPLVARPPSPSLTAQRLLREQQDDEYLAALQADREKELKAVQEAELRRVEEAAAREAALERQKKEEEEKLKKQREEEELESKLAAKQASLPKEPLQNDEGAVTVVVRMPDGSRRGRRFLKSDRLQYLFDFIDISRTFKPGTYRLARSYPRRAFTELESQMSLSDLGLTSKQEALFLEKLSA

SEQ ID NO: 18966 - protein, 518 aa, Zea mays subsp. mays
  peptide (1)..(518): Ceres Seq. ID no. 13589537
  misc_feature (434)..(514): Pfam Name: UBX domain Pfam Description: UBX domain
  misc_feature (1)..(389): Homolog of NCBI NO: 13160609 NR Description: Ara4-interacting protein [Arabidopsis thaliana]
  misc_feature (1)..(415): Homolog of NCBI NO: 7487672 NR Description: hypothetical protein T5C23.170 - Arabidopsis
  misc_feature (388)..(516): Homolog of NCBI NO: 30678726 NR Description: expressed protein [Arabidopsis thaliana]
  misc_feature (127)..(256): Homolog of NCBI NO: 30678726 NR Description: expressed protein [Arabidopsis thaliana]
  misc_feature (120)..(414): Homolog of NCBI NO: 13160609 NR Description: Ara4-interacting protein [Arabidopsis thaliana]
  misc_feature (64)..(514): Homolog of NCBI NO: 18416058 NR Description: expressed protein [Arabidopsis thaliana]
  misc_feature (120)..(514): Homolog of NCBI NO: 7487672 NR Description: hypothetical protein T5C23.170 - Arabidopsis
  misc_feature (120)..(514): Homolog of NCBI NO: 18413644 NR Description: expressed protein [Arabidopsis thaliana]
  misc_feature (13)..(184): Homolog of NCBI NO: 7486575 NR Description: hypothetical protein F7H19.230 - Arabidopsis
  misc_feature (176)..(514): Homolog of NCBI NO: 7486575 NR Description: hypothetical protein F7H19.230 - Arabidopsis
MFNRPLFPRTLGNPFALLDPGFADITAGDIFGRGPRVTQPRDVRQIPIEVKDSNTQTGSSGQGPIIEDVTGRESFYGPEVHGTVIVDEDDEDLPLTLSAQDPKIPSSALHPNHFMPSAPPVVDVSDHNNDIEEEMIKAAIEASKREADGMKNVLSSGQSENMSRGRGDHELARAVSLSLETAERERALRQEGMYVADHSPDLSDKEGGQGGSGISERRGLTTGEVGTSEQTVDEENFQEDNEDGEEQPLVRTRSRRLRGRTIEPAETVQRADSPPSSPQPHVQIGHQRNVGFPSVEWGGISSEERDEALMLEAAMFGGIPEGAPYPFSFPAHGRSTHYPLVARPPSPSLTAQRLLREQQDDEYLAALQADREKELKAVQEAELRRVEEAAAREAALERQKKEEEEKLKKQREEEELESKLAAKQASLPKEPLQNDEGAVTVVVRMPDGSRRGRRFLKSDRLQYLFDFIDISRTFKPGTYRLARSYPRRAFTELESQMSLSDLGLTSKQEALFLEKLSA

SEQ ID NO: 18967 - protein, 404 aa, Zea mays subsp. mays
  peptide (1)..(404): Ceres Seq. ID no. 13589538
  misc_feature (320)..(400): Pfam Name: UBX domain Pfam Description: UBX domain
  misc_feature (1)..(275): Homolog of NCBI NO: 13160609 NR Description: Ara4-interacting protein [Arabidopsis thaliana]
  misc_feature (1)..(301): Homolog of NCBI NO: 7487672 NR Description: hypothetical protein T5C23.170 - Arabidopsis
  misc_feature (274)..(402): Homolog of NCBI NO: 30678726 NR Description: expressed protein [Arabidopsis thaliana]
  misc_feature (13)..(142): Homolog of NCBI NO: 30678726 NR Description: expressed protein [Arabidopsis thaliana]
  misc_feature (6)..(300): Homolog of NCBI NO: 13160609 NR Description: Ara4-interacting protein [Arabidopsis thaliana]
  misc_feature (1)..(400): Homolog of NCBI NO: 18416058 NR Description: expressed protein [Arabidopsis thaliana]
  misc_feature (6)..(400): Homolog of NCBI NO: 7487672 NR Description: hypothetical protein T5C23.170 - Arabidopsis
  misc_feature (6)..(400): Homolog of NCBI NO: 18413644 NR Description: expressed protein [Arabidopsis thaliana]
  misc_feature (1)..(70): Homolog of NCBI NO: 7486575 NR Description: hypothetical protein F7H19.230 - Arabidopsis
  misc_feature (62)..(400): Homolog of NCBI NO: 7486575 NR Description: hypothetical protein F7H19.230 - Arabidopsis
MPSAPPVVDVSDHNNDIEEEMIKAAIEASKREADGMKNVLSSGQSENMSRGRGDHELARAVSLSLETAERERALRQEGMYVADHSPDLSDKEGGQGGSGISERRGLTTGEVGTSEQTVDEENFQEDNEDGEEQPLVRTRSRRLRGRTIEPAETVQRADSPPSSPQPHVQIGHQRNVGFPSVEWGGISSEERDEALMLEAAMFGGIPEGAPYPFSFPAHGRSTHYPLVARPPSPSLTAQRLLREQQDDEYLAALQADREKELKAVQEAELRRVEEAAAREAALERQKKEEEEKLKKQREEEELESKLAAKQASLPKEPLQNDEGAVTVVVRMPDGSRRGRRFLKSDRLQYLFDFIDISRTFKPGTYRLARSYPRRAFTELESQMSLSDLGLTSKQEALFLEKLSA

SEQ ID NO: 18968 - DNA, 1306 bp, Zea mays subsp. mays
  misc_feature (1)..(1306): Ceres Seq. ID no. 12419040
  misc_feature: MA Experiment ID: 20000477 Result: Down-regulated in Transcription
  misc_feature: MA Experiment 20000477 PARAMETER Experiment Name: Zm_5mM_SA_P Parameter: Age (day) Value: 10
  misc_feature: MA Experiment 20000477 PARAMETER Experiment Name: Zm_5mM_SA_P Parameter: Organism Value: Zea mays
  misc_feature: MA Experiment 20000477 PARAMETER Experiment Name: Zm_5mM_SA_P Parameter: Plant Line Value: 35A19
  misc_feature: MA Experiment 20000477 PARAMETER Experiment Name: Zm_5mM_SA_P Parameter: Timepoint (hr) Value: 48
  misc_feature: MA Experiment 20000477 PARAMETER Experiment Name: Zm_5mM_SA_P Parameter: Tissue Value: Aerial
  misc_feature: MA Experiment 20000477 PARAMETER Experiment Name: Zm_5mM_SA_P Parameter: Treatment Value: 5mM SA vs. No Treatment
  misc_feature: MA Experiment ID: 20000478 Result: Down-regulated in Transcription
  misc_feature: MA Experiment 20000478 PARAMETER Experiment Name: Zm_5mM_SA_P Parameter: Age (day) Value: 11
  misc_feature: MA Experiment 20000478 PARAMETER Experiment Name: Zm_5mM_SA_P Parameter: Organism Value: Zea mays
  misc_feature: MA Experiment 20000478 PARAMETER Experiment Name: Zm_5mM_SA_P Parameter: Plant Line Value: 35A19
  misc_feature: MA Experiment 20000478 PARAMETER Experiment Name: Zm_5mM_SA_P Parameter: Timepoint (hr) Value: 72
  misc_feature: MA Experiment 20000478 PARAMETER Experiment Name: Zm_5mM_SA_P Parameter: Tissue Value: Aerial
  misc_feature: MA Experiment 20000478 PARAMETER Experiment Name: Zm_5mM_SA_P Parameter: Treatment Value: 5mM SA vs. No Treatment
  misc_feature: MA Experiment ID: 20000479 Result: Down-regulated in Transcription
  misc_feature: MA Experiment 20000479 PARAMETER Experiment Name: Zm_Drought_P Parameter: Age (day) Value: 10
  misc_feature: MA Experiment 20000479 PARAMETER Experiment Name: Zm_Drought_P Parameter: Organism Value: Zea mays
  misc_feature: MA Experiment 20000479 PARAMETER Experiment Name: Zm_Drought_P Parameter: Plant Line Value: 35A19
  misc_feature: MA Experiment 20000479 PARAMETER Experiment Name: Zm_Drought_P Parameter: Timepoint (hr) Value: 48
  misc_feature: MA Experiment 20000479 PARAMETER Experiment Name: Zm_Drought_P Parameter: Tissue Value: Aerial
  misc_feature: MA Experiment 20000479 PARAMETER Experiment Name: Zm_Drought_P Parameter: Treatment Value: Drought vs. No Drought
  misc_feature: MA Experiment ID: 20000480 Result: Down-regulated in Transcription
  misc_feature: MA Experiment 20000480 PARAMETER Experiment Name: Zm_Drought_P Parameter: Age (day) Value: 11
  misc_feature: MA Experiment 20000480 PARAMETER Experiment Name: Zm_Drought_P Parameter: Organism Value: Zea mays
  misc_feature: MA Experiment 20000480 PARAMETER Experiment Name: Zm_Drought_P Parameter: Plant Line Value: 35A19
  misc_feature: MA Experiment 20000480 PARAMETER Experiment Name: Zm_Drought_P Parameter: Timepoint (hr) Value: 72
  misc_feature: MA Experiment 20000480 PARAMETER Experiment Name: Zm_Drought_P Parameter: Tissue Value: Aerial
  misc_feature: MA Experiment 20000480 PARAMETER Experiment Name: Zm_Drought_P Parameter: Treatment Value: Drought vs. No Drought
caaaaaatttttgctcagcccgctctcggacgaacccattcacccgtccggccgtccgtgcgcggcgcacccacccggcaccggcaccagcaccaccgcccgcccggcgcccgtcacgctcgagaggaggaggaagaagaagggactggtgcgacagcgcgcgatggccgccgtcgtgtgcgtcaccggcgccggcggcttcatcggctcgtggatcgtcaagatcctcctcgcccgcgggtacgccgtccggggcacctcccgccgcgaagctgctgaccccaagaacgcgcacctgtgggcgctcgacggcgcggcggagcgcctcaccatgctgcaggtggacctgctcgaccgcgccagcctccgcgccgccttccgcggctgcgacggcgtcatccacaccgcctcgccgatgcacgacaaccccgaggagatcatcgagccgattatcgccgggacgcggaacgtcgtggaggcggcggcggacgccggcgtgcggcgcctggtgctgtcctccaccatcggcaccatgtacatggacccgcgccgcgaccccgacgccccgctcggcgactccagctggagcgacctcgagtactgcaagagcaccgagaactggtactgctacgcaaagacggtggcggagcagggcgcgtgggaggcggcgcgggcgcgggggctggacctggcggtggtcatcccggtggtggtgctcggcgagctgctgcagcccagcatgaacaccagcaccctgcacatcctcaagtacctcacgggacagacaaaggagtacgtcaacgagtcgcacgcctacgtgcacgtcatggacgccgncnaggcgcacgtaagggtgctggaggcgcccggcgccggcggccggcggtacgtctgcgccgagcgcaccctgcaccgcggcgagctctgccgcatcctcgccggactcttcccggagtaccctattccgacaaggtgcaaggatcaggtgaacccaccgaagaagggctacaagtttacgaaccaacctctgaaggaccttggcgtcaagttcactccagtgcatgggtacctgtacnaagcagtgaagtccctgcaagacaagggcttcctcccgaagacctctggcgccaaggtgcctgaacgacgcanctacctgcctcaaacgacatcacagncaccacccgaaatcgtntcgaaactttgaggtggatctgcacacgtgctcaaactggccatgttttttttttgtnagaacaagccgttcatttgattggttattaaaagattttgggcagtctgttcttac

SEQ ID NO: 18969 - protein, 400 aa, Zea mays subsp. mays
  peptide (1)..(400): Ceres Seq. ID no. 12419041
  misc_feature (59)..(327): Pfam Name: NAD dependent epimerase/dehydratase family Pfam Description: NAD dependent epimerase/dehydratase family
  misc_feature (59)..(374): Homolog of NCBI NO: 7431407 NR Description: cinnamoyl-CoA reductase (EC 1.2.1.44) CCR - cider
  misc_feature (59)..(387): Homolog of NCBI NO: 25140432 NR Description: cinnamoyl CoA reductase [Hordeum vulgare]
  misc_feature (60)..(371): Homolog of NCBI NO: 7239228 NR Description: cinnamoyl CoA reductase; CCR [Populus tremuloides]
  misc_feature (59)..(371): Homolog of NCBI NO: 2960364 NR Description: cinnamoyl CoA reductase [Populus balsamifera
  misc_feature (58)..(371): Homolog of NCBI NO: 25140434 NR Description: cinnamoyl CoA reductase [Solanum tuberosum]
  misc_feature (59)..(371): Homolog of NCBI NO: 40233135 NR Description: cinnamoyl CoA reductase [Populus tomentosa]
  misc_feature (59)..(371): Homolog of NCBI NO: 9998901 NR Description: cinnamoyl-CoA reductase [Populus balsamifera
  misc_feature (59)..(371): Homolog of NCBI NO: 28544959 NR Description: cinnamoyl-CoA reductase [Zea mays]
  misc_feature (59)..(371): Homolog of NCBI NO: 3668115 NR Description: cinnamoyl-CoA reductase [Zea mays]
  misc_feature (59)..(371): Homolog of NCBI NO: 28544965 NR Description: cinnamoyl-CoA reductase [Zea mays]
  misc_feature (279)..(279): Xaa is any aa, unknown or other
  misc_feature (280)..(280): Xaa is any aa, unknown or other
  misc_feature (359)..(359): Xaa is any aa, unknown or other
  misc_feature (383)..(383): Xaa is any aa, unknown or other
  misc_feature (392)..(392): Xaa is any aa, unknown or other
  misc_feature (397)..(397): Xaa is any aa, unknown or other
KKFLLSPLSDEPIHPSGRPCAAHPPGTGTSTTARPAPVTLERRRKKKGLVRQRAMAAVVCVTGAGGFIGSWIVKILLARGYAVRGTSRREAADPKNAHLWALDGAAERLTMLQVDLLDRASLRAAFRGCDGVIHTASPMHDNPEEIIEPIIAGTRNVVEAAADAGVRRLVLSSTIGTMYMDPRRDPDAPLGDSSWSDLEYCKSTENWYCYAKTVAEQGAWEAARARGLDLAVVIPVVVLGELLQPSMNTSTLHILKYLTGQTKEYVNESHAYVHVMDAXXAHVRVLEAPGAGGRRYVCAERTLHRGELCRILAGLFPEYPIPTRCKDQVNPPKKGYKFTNQPLKDLGVKFTPVHGYLYXAVKSLQDKGFLPKTSGAKVPERRXYLPQTTSQXPPEIXSKL

SEQ ID NO: 18970 - protein, 346 aa, Zea mays subsp. mays
  peptide (1)..(346): Ceres Seq. ID no. 12419042
  misc_feature (5)..(273): Pfam Name: NAD dependent epimerase/dehydratase family Pfam Description: NAD dependent epimerase/dehydratase family
  misc_feature (5)..(320): Homolog of NCBI NO: 7431407 NR Description: cinnamoyl-CoA reductase (EC 1.2.1.44) CCR - cider
  misc_feature (5)..(333): Homolog of NCBI NO: 25140432 NR Description: cinnamoyl CoA reductase [Hordeum vulgare]
  misc_feature (6)..(317): Homolog of NCBI NO: 7239228 NR Description: cinnamoyl CoA reductase; CCR [Populus tremuloides]
  misc_feature (5)..(317): Homolog of NCBI NO: 2960364 NR Description: cinnamoyl CoA reductase [Populus balsamifera
  misc_feature (4)..(317): Homolog of NCBI NO: 25140434 NR Description: cinnamoyl CoA reductase [Solanum tuberosum]
  misc_feature (5)..(317): Homolog of NCBI NO: 40233135 NR Description: cinnamoyl CoA reductase [Populus tomentosa]
  misc_feature (5)..(317): Homolog of NCBI NO: 9998901 NR Description: cinnamoyl-CoA reductase [Populus balsamifera
  misc_feature (5)..(317): Homolog of NCBI NO: 28544959 NR Description: cinnamoyl-CoA reductase [Zea mays]
  misc_feature (5)..(317): Homolog of NCBI NO: 3668115 NR Description: cinnamoyl-CoA reductase [Zea mays]
  misc_feature (5)..(317): Homolog of NCBI NO: 28544965 NR Description: cinnamoyl-CoA reductase [Zea mays]
  misc_feature (225)..(225): Xaa is any aa, unknown or other
  misc_feature (226)..(226): Xaa is any aa, unknown or other
  misc_feature (305)..(305): Xaa is any aa, unknown or other
  misc_feature (329)..(329): Xaa is any aa, unknown or other
  misc_feature (338)..(338): Xaa is any aa, unknown or other
  misc_feature (343)..(343): Xaa is any aa, unknown or other
MAAVVCVTGAGGFIGSWIVKILLARGYAVRGTSRREAADPKNAHLWALDGAAERLTMLQVDLLDRASLRAAFRGCDGVIHTASPMHDNPEEIIEPIIAGTRNVVEAAADAGVRRLVLSSTIGTMYMDPRRDPDAPLGDSSWSDLEYCKSTENWYCYAKTVAEQGAWEAARARGLDLAVVIPVVVLGELLQPSMNTSTLHILKYLTGQTKEYVNESHAYVHVMDAXXAHVRVLEAPGAGGRRYVCAERTLHRGELCRILAGLFPEYPIPTRCKDQVNPPKKGYKFTNQPLKDLGVKFTPVHGYLYXAVKSLQDKGFLPKTSGAKVPERRXYLPQTTSQXPPEIXSKL

SEQ ID NO: 18971 - protein, 290 aa, Zea mays subsp. mays
  peptide (1)..(290): Ceres Seq. ID no. 12419043
  misc_feature (1)..(217): Pfam Name: NAD dependent epimerase/dehydratase family Pfam Description: NAD dependent epimerase/dehydratase family
  misc_feature (1)..(264): Homolog of NCBI NO: 7431407 NR Description: cinnamoyl-CoA reductase (EC 1.2.1.44) CCR - cider
  misc_feature (1)..(277): Homolog of NCBI NO: 25140432 NR Description: cinnamoyl CoA reductase [Hordeum vulgare]
  misc_feature (1)..(261): Homolog of NCBI NO: 7239228 NR Description: cinnamoyl CoA reductase; CCR [Populus tremuloides]
  misc_feature (1)..(261): Homolog of NCBI NO: 2960364 NR Description: cinnamoyl CoA reductase [Populus balsamifera
  misc_feature (1)..(261): Homolog of NCBI NO: 25140434 NR Description: cinnamoyl CoA reductase [Solanum tuberosum]
  misc_feature (1)..(261): Homolog of NCBI NO: 40233135 NR Description: cinnamoyl CoA reductase [Populus tomentosa]
  misc_feature (1)..(261): Homolog of NCBI NO: 9998901 NR Description: cinnamoyl-CoA reductase [Populus balsamifera
  misc_feature (1)..(261): Homolog of NCBI NO: 28544959 NR Description: cinnamoyl-CoA reductase [Zea mays]
  misc_feature (1)..(261): Homolog of NCBI NO: 3668115 NR Description: cinnamoyl-CoA reductase [Zea mays]
  misc_feature (1)..(261): Homolog of NCBI NO: 28544965 NR Description: cinnamoyl-CoA reductase [Zea mays]
  misc_feature (169)..(169): Xaa is any aa, unknown or other
  misc_feature (170)..(170): Xaa is any aa, unknown or other
  misc_feature (249)..(249): Xaa is any aa, unknown or other
  misc_feature (273)..(273): Xaa is any aa, unknown or other
  misc_feature (282)..(282): Xaa is any aa, unknown or other
  misc_feature (287)..(287): Xaa is any aa, unknown or other
MLQVDLLDRASLRAAFRGCDGVIHTASPMHDNPEEIIEPIIAGTRNVVEAAADAGVRRLVLSSTIGTMYMDPRRDPDAPLGDSSWSDLEYCKSTENWYCYAKTVAEQGAWEAARARGLDLAVVIPVVVLGELLQPSMNTSTLHILKYLTGQTKEYVNESHAYVHVMDAXXAHVRVLEAPGAGGRRYVCAERTLHRGELCRILAGLFPEYPIPTRCKDQVNPPKKGYKFTNQPLKDLGVKFTPVHGYLYXAVKSLQDKGFLPKTSGAKVPERRXYLPQTTSQXPPEIXSKL

SEQ ID NO: 18972 - DNA, 1900 bp, Zea mays subsp. mays; identical to SEQ ID NO: 3280
  misc_feature (1)..(1900): Ceres Seq. ID no. 13493214
  misc_feature: MA Experiment ID: 108535 Result: Up-regulated in Transcription
  misc_feature: MA Experiment 108535 PARAMETER Experiment Name: Zm_Meristem_P Parameter: Age (day) Value: 8
  misc_feature: MA Experiment 108535 PARAMETER Experiment Name: Zm_Meristem_P Parameter: Organism Value: Zea mays
  misc_feature: MA Experiment 108535 PARAMETER Experiment Name: Zm_Meristem_P Parameter: Plant Line Value: 35A19
  misc_feature: MA Experiment 108535 PARAMETER Experiment Name: Zm_Meristem_P Parameter: Tissue Value: Root Meristem vs. Above Root Meristem
  misc_feature: MA Experiment ID: 108556 Result: Down-regulated in Transcription
  misc_feature: MA Experiment 108556 PARAMETER Experiment Name: Zm_Drought_P Parameter: Age (day) Value: 9
  misc_feature: MA Experiment 108556 PARAMETER Experiment Name: Zm_Drought_P Parameter: Organism Value: Zea mays
  misc_feature: MA Experiment 108556 PARAMETER Experiment Name: Zm_Drought_P Parameter: Plant Line Value: 35A19
  misc_feature: MA Experiment 108556 PARAMETER Experiment Name: Zm_Drought_P Parameter: Timepoint (hr) Value: 24
  misc_feature: MA Experiment 108556 PARAMETER Experiment Name: Zm_Drought_P Parameter: Tissue Value: Aerial
  misc_feature: MA Experiment 108556 PARAMETER Experiment Name: Zm_Drought_P Parameter: Treatment Value: Drought vs. No Drought
  misc_feature: MA Experiment ID: 20000477 Result: Down-regulated in Transcription
  misc_feature: MA Experiment 20000477 PARAMETER Experiment Name: Zm_5mM_SA_P Parameter: Age (day) Value: 10
  misc_feature: MA Experiment 20000477 PARAMETER Experiment Name: Zm_5mM_SA_P Parameter: Organism Value: Zea mays
  misc_feature: MA Experiment 20000477 PARAMETER Experiment Name: Zm_5mM_SA_P Parameter: Plant Line Value: 35A19
  misc_feature: MA Experiment 20000477 PARAMETER Experiment Name: Zm_5mM_SA_P Parameter: Timepoint (hr) Value: 48
  misc_feature: MA Experiment 20000477 PARAMETER Experiment Name: Zm_5mM_SA_P Parameter: Tissue Value: Aerial
  misc_feature: MA Experiment 20000477 PARAMETER Experiment Name: Zm_5mM_SA_P Parameter: Treatment Value: 5mM SA vs. No Treatment
  misc_feature: MA Experiment ID: 20000478 Result: Down-regulated in Transcription
  misc_feature: MA Experiment 20000478 PARAMETER Experiment Name: Zm_5mM_SA_P Parameter: Age (day) Value: 11
  misc_feature: MA Experiment 20000478 PARAMETER Experiment Name: Zm_5mM_SA_P Parameter: Organism Value: Zea mays
  misc_feature: MA Experiment 20000478 PARAMETER Experiment Name: Zm_5mM_SA_P Parameter: Plant Line Value: 35A19
  misc_feature: MA Experiment 20000478 PARAMETER Experiment Name: Zm_5mM_SA_P Parameter: Timepoint (hr) Value: 72
  misc_feature: MA Experiment 20000478 PARAMETER Experiment Name: Zm_5mM_SA_P Parameter: Tissue Value: Aerial
  misc_feature: MA Experiment 20000478 PARAMETER Experiment Name: Zm_5mM_SA_P Parameter: Treatment Value: 5mM SA vs. No Treatment
  misc_feature: MA Experiment ID: 20000479 Result: Down-regulated in Transcription
  misc_feature: MA Experiment 20000479 PARAMETER Experiment Name: Zm_Drought_P Parameter: Age (day) Value: 10
  misc_feature: MA Experiment 20000479 PARAMETER Experiment Name: Zm_Drought_P Parameter: Organism Value: Zea mays
  misc_feature: MA Experiment 20000479 PARAMETER Experiment Name: Zm_Drought_P Parameter: Plant Line Value: 35A19
  misc_feature: MA Experiment 20000479 PARAMETER Experiment Name: Zm_Drought_P Parameter: Timepoint (hr) Value: 48
  misc_feature: MA Experiment 20000479 PARAMETER Experiment Name: Zm_Drought_P Parameter: Tissue Value: Aerial
  misc_feature: MA Experiment 20000479 PARAMETER Experiment Name: Zm_Drought_P Parameter: Treatment Value: Drought vs. No Drought
  misc_feature: MA Experiment ID: 20000480 Result: Down-regulated in Transcription
  misc_feature: MA Experiment 20000480 PARAMETER Experiment Name: Zm_Drought_P Parameter: Age (day) Value: 11
  misc_feature: MA Experiment 20000480 PARAMETER Experiment Name: Zm_Drought_P Parameter: Organism Value: Zea mays
  misc_feature: MA Experiment 20000480 PARAMETER Experiment Name: Zm_Drought_P Parameter: Plant Line Value: 35A19
  misc_feature: MA Experiment 20000480 PARAMETER Experiment Name: Zm_Drought_P Parameter: Timepoint (hr) Value: 72
  misc_feature: MA Experiment 20000480 PARAMETER Experiment Name: Zm_Drought_P Parameter: Tissue Value: Aerial
  misc_feature: MA Experiment 20000480 PARAMETER Experiment Name: Zm_Drought_P Parameter: Treatment Value: Drought vs. No Drought

SEQ ID NO: 18973 - protein, 393 aa, Zea mays subsp. mays; identical to SEQ ID NO: 3281
  peptide (1)..(393): Ceres Seq. ID no. 13493215
  misc_feature (132)..(367): Homolog of NCBI NO: 28828936 NR Description: similar to Rattus norvegicus (Rat). Mevalonate
  misc_feature (20)..(367): Homolog of NCBI NO: 12963731 NR Description: mevalonate kinase [Mus musculus]
  misc_feature (20)..(367): Homolog of NCBI NO: 33303805 NR Description: mevalonate kinase [synthetic construct]
  misc_feature (20)..(367): Homolog of NCBI NO: 4557769 NR Description: mevalonate kinase [Homo sapiens]
  misc_feature (20)..(367): Homolog of NCBI NO: 450346 NR Description: ORF for viral-cellular fusion transcript
  misc_feature (20)..(367): Homolog of NCBI NO: 13592007 NR Description: mevalonate kinase [Rattus norvegicus]
  misc_feature (14)..(368): Homolog of NCBI NO: 5578718 NR Description: mevalonate kinase [Arabidopsis thaliana]
  misc_feature (14)..(368): Homolog of NCBI NO: 15240936 NR Description: mevalonate kinase [Arabidopsis thaliana]
  misc_feature (14)..(371): Homolog of NCBI NO: 16417946 NR Description: mevalonate kinase [Hevea brasiliensis]
  misc_feature (14)..(368): Homolog of NCBI NO: 37532842 NR Description: putative mevalonate kinase
  misc_feature (14)..(368): Homolog of NCBI NO: 5578718 NR Description: mevalonate kinase [Arabidopsis thaliana]
  misc_feature (14)..(368): Homolog of NCBI NO: 15240936 NR Description: mevalonate kinase [Arabidopsis thaliana]
  misc_feature (14)..(371): Homolog of NCBI NO: 16417946 NR Description: mevalonate kinase [Hevea brasiliensis]
  misc_feature (14)..(368): Homolog of NCBI NO: 37532842 NR Description: putative mevalonate kinase
  misc_feature (132)..(367): Homolog of NCBI NO: 28828936 NR Description: similar to Rattus norvegicus (Rat). Mevalonate
  misc_feature (20)..(367): Homolog of NCBI NO: 12963731 NR Description: mevalonate kinase [Mus musculus]
  misc_feature (20)..(367): Homolog of NCBI NO: 33303805 NR Description: mevalonate kinase [synthetic construct]
  misc_feature (20)..(367): Homolog of NCBI NO: 4557769 NR Description: mevalonate kinase [Homo sapiens]
  misc_feature (20)..(367): Homolog of NCBI NO: 450346 NR Description: ORF for viral-cellular fusion transcript
  misc_feature (20)..(367): Homolog of NCBI NO: 13592007 NR Description: mevalonate kinase [Rattus norvegicus]

SEQ ID NO: 18974 - protein, 235 aa, Zea mays subsp. mays; identical to SEQ ID NO: 3282
  peptide (1)..(235): Ceres Seq. ID no. 13493216
  misc_feature (1)..(209): Homolog of NCBI NO: 28828936 NR Description: similar to Rattus norvegicus (Rat). Mevalonate
  misc_feature (1)..(209): Homolog of NCBI NO: 12963731 NR Description: mevalonate kinase [Mus musculus]
  misc_feature (1)..(209): Homolog of NCBI NO: 33303805 NR Description: mevalonate kinase [synthetic construct]
  misc_feature (1)..(209): Homolog of NCBI NO: 4557769 NR Description: mevalonate kinase [Homo sapiens]
  misc_feature (1)..(209): Homolog of NCBI NO: 450346 NR Description: ORF for viral-cellular fusion transcript
  misc_feature (1)..(209): Homolog of NCBI NO: 13592007 NR Description: mevalonate kinase [Rattus norvegicus]
  misc_feature (1)..(210): Homolog of NCBI NO: 5578718 NR Description: mevalonate kinase [Arabidopsis thaliana]
  misc_feature (1)..(210): Homolog of NCBI NO: 15240936 NR Description: mevalonate kinase [Arabidopsis thaliana]
  misc_feature (1)..(213): Homolog of NCBI NO: 16417946 NR Description: mevalonate kinase [Hevea brasiliensis]
  misc_feature (1)..(210): Homolog of NCBI NO: 37532842 NR Description: putative mevalonate kinase
  misc_feature (1)..(209): Homolog of NCBI NO: 28828936 NR Description: similar to Rattus norvegicus (Rat). Mevalonate
  misc_feature (1)..(209): Homolog of NCBI NO: 12963731 NR Description: mevalonate kinase [Mus musculus]
  misc_feature (1)..(209): Homolog of NCBI NO: 33303805 NR Description: mevalonate kinase [synthetic construct]
  misc_feature (1)..(209): Homolog of NCBI NO: 4557769 NR Description: mevalonate kinase [Homo sapiens]
  misc_feature (1)..(209): Homolog of NCBI NO: 450346 NR Description: ORF for viral-cellular fusion transcript
  misc_feature (1)..(209): Homolog of NCBI NO: 13592007 NR Description: mevalonate kinase [Rattus norvegicus]
  misc_feature (1)..(210): Homolog of NCBI NO: 5578718 NR Description: mevalonate kinase [Arabidopsis thaliana]
  misc_feature (1)..(210): Homolog of NCBI NO: 15240936 NR Description: mevalonate kinase [Arabidopsis thaliana]
  misc_feature (1)..(213): Homolog of NCBI NO: 16417946 NR Description: mevalonate kinase [Hevea brasiliensis]
  misc_feature (1)..(210): Homolog of NCBI NO: 37532842 NR Description: putative mevalonate kinase

SEQ ID NO: 18975 - protein, 221 aa, Zea mays subsp. mays; identical to SEQ ID NO: 3283
  peptide (1)..(221): Ceres Seq. ID no. 13493217
  misc_feature (1)..(195): Homolog of NCBI NO: 28828936 NR Description: similar to Rattus norvegicus (Rat). Mevalonate
  misc_feature (1)..(195): Homolog of NCBI NO: 12963731 NR Description: mevalonate kinase [Mus musculus]
  misc_feature (1)..(195): Homolog of NCBI NO: 33303805 NR Description: mevalonate kinase [synthetic construct]
  misc_feature (1)..(195): Homolog of NCBI NO: 4557769 NR Description: mevalonate kinase [Homo sapiens]
  misc_feature (1)..(195): Homolog of NCBI NO: 450346 NR Description: ORF for viral-cellular fusion transcript
  misc_feature (1)..(195): Homolog of NCBI NO: 13592007 NR Description: mevalonate kinase [Rattus norvegicus]
  misc_feature (1)..(196): Homolog of NCBI NO: 5578718 NR Description: mevalonate kinase [Arabidopsis thaliana]
  misc_feature (1)..(196): Homolog of NCBI NO: 15240936 NR Description: mevalonate kinase [Arabidopsis thaliana]
  misc_feature (1)..(199): Homolog of NCBI NO: 16417946 NR Description: mevalonate kinase [Hevea brasiliensis]
  misc_feature (1)..(196): Homolog of NCBI NO: 37532842 NR Description: putative mevalonate kinase
  misc_feature (1)..(195): Homolog of NCBI NO: 28828936 NR Description: similar to Rattus norvegicus (Rat). Mevalonate
  misc_feature (1)..(195): Homolog of NCBI NO: 12963731 NR Description: mevalonate kinase [Mus musculus]
  misc_feature (1)..(195): Homolog of NCBI NO: 33303805 NR Description: mevalonate kinase [synthetic construct]
  misc_feature (1)..(195): Homolog of NCBI NO: 4557769 NR Description: mevalonate kinase [Homo sapiens]
  misc_feature (1)..(195): Homolog of NCBI NO: 450346 NR Description: ORF for viral-cellular fusion transcript
  misc_feature (1)..(195): Homolog of NCBI NO: 13592007 NR Description: mevalonate kinase [Rattus norvegicus]
  misc_feature (1)..(196): Homolog of NCBI NO: 5578718 NR Description: mevalonate kinase [Arabidopsis thaliana]
  misc_feature (1)..(196): Homolog of NCBI NO: 15240936 NR Description: mevalonate kinase [Arabidopsis thaliana]
  misc_feature (1)..(199): Homolog of NCBI NO: 16417946 NR Description: mevalonate kinase [Hevea brasiliensis]
  misc_feature (1)..(196): Homolog of NCBI NO: 37532842 NR Description: putative mevalonate kinase

SEQ ID NO: 18976 - DNA, 1522 bp, Zea mays subsp. mays
  misc_feature (1)..(1522): Ceres Seq. ID no. 12359886
  misc_feature: MA Experiment ID: 108515 Result: Up-regulated in Transcription
  misc_feature: MA Experiment 108515 PARAMETER Experiment Name: Zm_2mM_SA_P Parameter: Age (day) Value: 8
  misc_feature: MA Experiment 108515 PARAMETER Experiment Name: Zm_2mM_SA_P Parameter: Organism Value: Zea mays
  misc_feature: MA Experiment 108515 PARAMETER Experiment Name: Zm_2mM_SA_P Parameter: Plant Line Value: 35A19
  misc_feature: MA Experiment 108515 PARAMETER Experiment Name: Zm_2mM_SA_P Parameter: Timepoint (hr) Value: 12
  misc_feature: MA Experiment 108515 PARAMETER Experiment Name: Zm_2mM_SA_P Parameter: Tissue Value: Aerial
  misc_feature: MA Experiment 108515 PARAMETER Experiment Name: Zm_2mM_SA_P Parameter: Treatment Value: 2mM SA vs. No Treatment
  misc_feature: MA Experiment ID: 108527 Result: Up-regulated in Transcription
  misc_feature: MA Experiment 108527 PARAMETER Experiment Name: Zm_5mM_NO_P Parameter: Age (day) Value: 8
  misc_feature: MA Experiment 108527 PARAMETER Experiment Name: Zm_5mM_NO_P Parameter: Organism Value: Zea mays
  misc_feature: MA Experiment 108527 PARAMETER Experiment Name: Zm_5mM_NO_P Parameter: Plant Line Value: 35A19
  misc_feature: MA Experiment 108527 PARAMETER Experiment Name: Zm_5mM_NO_P Parameter: Timepoint (hr) Value: 6
  misc_feature: MA Experiment 108527 PARAMETER Experiment Name: Zm_5mM_NO_P Parameter: Tissue Value: Aerial
  misc_feature: MA Experiment 108527 PARAMETER Experiment Name: Zm_5mM_NO_P Parameter: Treatment Value: 5mM NO vs. No Treatment
  misc_feature: MA Experiment ID: 108528 Result: Down-regulated in Transcription
  misc_feature: MA Experiment 108528 PARAMETER Experiment Name: Zm_Imbibed_Seeds_P Parameter: Age (day) Value: 5 vs. 2
  misc_feature: MA Experiment 108528 PARAMETER Experiment Name: Zm_Imbibed_Seeds_P Parameter: Organism Value: Zea mays
  misc_feature: MA Experiment 108528 PARAMETER Experiment Name: Zm_Imbibed_Seeds_P Parameter: Plant Line Value: 35A19
  misc_feature: MA Experiment 108528 PARAMETER Experiment Name: Zm_Imbibed_Seeds_P Parameter: Tissue Value: Aerial vs. Embryo
  misc_feature: MA Experiment ID: 108530 Result: Down-regulated in Transcription
  misc_feature: MA Experiment 108530 PARAMETER Experiment Name: Zm_Imbibed_Seeds_P Parameter: Age (day) Value: 6 vs. 2
  misc_feature: MA Experiment 108530 PARAMETER Experiment Name: Zm_Imbibed_Seeds_P Parameter: Organism Value: Zea mays
  misc_feature: MA Experiment 108530 PARAMETER Experiment Name: Zm_Imbibed_Seeds_P Parameter: Plant Line Value: 35A19
  misc_feature: MA Experiment 108530 PARAMETER Experiment Name: Zm_Imbibed_Seeds_P Parameter: Tissue Value: Aerial vs. Embryo
  misc_feature: MA Experiment ID: 108543 Result: Up-regulated in Transcription
  misc_feature: MA Experiment ID: 108545 Result: Down-regulated in Transcription
  misc_feature: MA Experiment 108545 PARAMETER Experiment Name: Zm_Imbibed_Seeds_P Parameter: Age (day) Value: 3 vs. 2
  misc_feature: MA Experiment 108545 PARAMETER Experiment Name: Zm_Imbibed_Seeds_P Parameter: Organism Value: Zea mays
  misc_feature: MA Experiment 108545 PARAMETER Experiment Name: Zm_Imbibed_Seeds_P Parameter: Plant Line Value: 35A19
  misc_feature: MA Experiment 108545 PARAMETER Experiment Name: Zm_Imbibed_Seeds_P Parameter: Tissue Value: Aerial vs. Embryo
  misc_feature: MA Experiment ID: 108546 Result: Up-regulated in Transcription
  misc_feature: MA Experiment 108546 PARAMETER Experiment Name: Zm_Imbibed_Seeds_P Parameter: Age (day) Value: 3 vs. 2
  misc_feature: MA Experiment 108546 PARAMETER Experiment Name: Zm_Imbibed_Seeds_P Parameter: Organism Value: Zea mays
  misc_feature: MA Experiment 108546 PARAMETER Experiment Name: Zm_Imbibed_Seeds_P Parameter: Plant Line Value: 35A19
  misc_feature: MA Experiment 108546 PARAMETER Experiment Name: Zm_Imbibed_Seeds_P Parameter: Tissue Value: Roots vs. Embryo
  misc_feature: MA Experiment ID: 108547 Result: Down-regulated in Transcription
  misc_feature: MA Experiment 108547 PARAMETER Experiment Name: Zm_Imbibed_Seeds_P Parameter: Age (day) Value: 4 vs. 2
  misc_feature: MA Experiment 108547 PARAMETER Experiment Name: Zm_Imbibed_Seeds_P Parameter: Organism Value: Zea mays
  misc_feature: MA Experiment 108547 PARAMETER Experiment Name: Zm_Imbibed_Seeds_P Parameter: Plant Line Value: 35A19
  misc_feature: MA Experiment 108547 PARAMETER Experiment Name: Zm_Imbibed_Seeds_P Parameter: Tissue Value: Aerial vs. Embryo
  misc_feature: MA Experiment ID: 108548 Result: Up-regulated in Transcription
  misc_feature: MA Experiment 108548 PARAMETER Experiment Name: Zm_20uM_KNO3_H-to-L_P Parameter: Age (day) Value: 11
  misc_feature: MA Experiment 108548 PARAMETER Experiment Name: Zm_20uM_KNO3_H-to-L_P Parameter: Organism Value: Zea mays
  misc_feature: MA Experiment 108548 PARAMETER Experiment Name: Zm_20uM_KNO3_H-to-L_P Parameter: Plant Line Value: 35A19
  misc_feature: MA Experiment 108548 PARAMETER Experiment Name: Zm_20uM_KNO3_H-to-L_P Parameter: Timepoint (hr) Value: 4
  misc_feature: MA Experiment 108548 PARAMETER Experiment Name: Zm_20uM_KNO3_H-to-L_P Parameter: Tissue Value: Roots
  misc_feature: MA Experiment 108548 PARAMETER Experiment Name: Zm_20uM_KNO3_H-to-L_P Parameter: Treatment Value: 20uM KNO3 vs. 60mM KNO3
  misc_feature: MA Experiment ID: 108689 Result: Down-regulated in Transcription
  misc_feature: MA Experiment 108689 PARAMETER Experiment Name: Zm_Drought_Roots_P Parameter: Age (day) Value: 9
  misc_feature: MA Experiment 108689 PARAMETER Experiment Name: Zm_Drought_Roots_P Parameter: Organism Value: Zea mays
  misc_feature: MA Experiment 108689 PARAMETER Experiment Name: Zm_Drought_Roots_P Parameter: Plant Line Value: 35A19
  misc_feature: MA Experiment 108689 PARAMETER Experiment Name: Zm_Drought_Roots_P Parameter: Timepoint (hr) Value: 24
  misc_feature: MA Experiment 108689 PARAMETER Experiment Name: Zm_Drought_Roots_P Parameter: Tissue Value: Roots
  misc_feature: MA Experiment 108689 PARAMETER Experiment Name: Zm_Drought_Roots_P Parameter: Treatment Value: Drought vs. No Drought
  misc_feature: MA Experiment ID: 20000480 Result: Down-regulated in Transcription
  misc_feature: MA Experiment 20000480 PARAMETER Experiment Name: Zm_Drought_P Parameter: Age (day) Value: 11
  misc_feature: MA Experiment 20000480 PARAMETER Experiment Name: Zm_Drought_P Parameter: Organism Value: Zea mays
  misc_feature: MA Experiment 20000480 PARAMETER Experiment Name: Zm_Drought_P Parameter: Plant Line Value: 35A19
  misc_feature: MA Experiment 20000480 PARAMETER Experiment Name: Zm_Drought_P Parameter: Timepoint (hr) Value: 72
  misc_feature: MA Experiment 20000480 PARAMETER Experiment Name: Zm_Drought_P Parameter: Tissue Value: Aerial
  misc_feature: MA Experiment 20000480 PARAMETER Experiment Name: Zm_Drought_P Parameter: Treatment Value: Drought vs. No Drought
  misc_feature: MA Experiment ID: 20000535 Result: Down-regulated in Transcription
  misc_feature: MA Experiment 20000535 PARAMETER Experiment Name: Zm_Hybrid_Seed_Dev_P Parameter: DAP Value: 30 vs. 12
  misc_feature: MA Experiment 20000535 PARAMETER Experiment Name: Zm_Hybrid_Seed_Dev_P Parameter: Organism Value: Zea mays
  misc_feature: MA Experiment 20000535 PARAMETER Experiment Name: Zm_Hybrid_Seed_Dev_P Parameter: Plant Line Value: 35A19
  misc_feature: MA Experiment 20000535 PARAMETER Experiment Name: Zm_Hybrid_Seed_Dev_P Parameter: Tissue Value: Embryo vs. Unfert Floret
  misc_feature: MA Experiment ID: 20000626 Result: Up-regulated in Transcription
  misc_feature: MA Experiment 20000626 PARAMETER Experiment Name: Zm_Herbicide-Treatments_P Parameter: Timepoint (hr) Value: 12
  misc_feature: MA Experiment 20000626 PARAMETER Experiment Name: Zm_Herbicide-Treatments_P Parameter: Tissue Value: Aerial
  misc_feature: MA Experiment 20000626 PARAMETER Experiment Name: Zm_Herbicide-Treatments_P Parameter: Treatment Value: Roundup vs. No Treatment
  misc_feature: MA Experiment ID: 20000627 Result: Up-regulated in Transcription
  misc_feature: MA Experiment 20000627 PARAMETER Experiment Name: Zm_Herbicide-Treatments_P Parameter: Timepoint (hr) Value: 12
  misc_feature: MA Experiment 20000627 PARAMETER Experiment Name: Zm_Herbicide-Treatments_P Parameter: Tissue Value: Aerial
  misc_feature: MA Experiment 20000627 PARAMETER Experiment Name: Zm_Herbicide-Treatments_P Parameter: Treatment Value: Finale vs. No Treatment
  misc_feature: MA Experiment ID: 20000630 Result: Up-regulated in Transcription
  misc_feature: MA Experiment 20000630 PARAMETER Experiment Name: Zm_Herbicide-Treatments_P Parameter: Timepoint (hr) Value: 4
  misc_feature: MA Experiment 20000630 PARAMETER Experiment Name: Zm_Herbicide-Treatments_P Parameter: Tissue Value: Aerial
  misc_feature: MA Experiment 20000630 PARAMETER Experiment Name: Zm_Herbicide-Treatments_P Parameter: Treatment Value: Roundup vs. No Treatment
ataaccgaatagaaatagctttggtgcaaacaagcaagcagcagagcagatcaagtaaaggtagcaatttgagtagtgtgcaagctaagatggggcaacaagaaaaggaagtgatcccgctgatgaccccgtacaagatgggacagctggagctctcccaccgcgtggtgctggcgccgatgacgcggtgccgcgccatcggggacgtgccgcagccgcacgccgccgtgtactactcgcagcgcgccagcaggggcggcgtgctcatcaccgagggcacgggggtgtccgccaccgcgcagggcttcccggggtcccccggcatctggacgcaggagcaggtggcggcgtggaagccccatcgtcgacgccgtccaccgcaagggcgcgctcttcttctgccagatcgcgcacgtcggaagggcatccaccaacgatttccagccggacggccaggcgccggtctcgagcacggacgcgcagctcccacccgacgccgagtccggcacggtgttctccaggccacgccggctgcgggccgacgagatcccggggatcgtcgacgacttcaggcgcgccgcgcgcaacgcgatcgaggccgggttcgacggcgtggagatccacggagcgcacgggttcctcctggagcagttcatgaaggacggcgccaacgaccgcgccgacgagtacggcggcagcgtcgagaaccggtgccgcttcgtggtcgaggtcgtggacgctctggtccgtgaagtcggcgcgagccgggttggcatcaggctctccccgttcgcggactacttggactgtgcggattccaaccccttggcgctaggtcactacatggtggaacagctcaacaggcacgaggggtttctgtactgccacatggtggagcctcgaatggccatcgtcgacgaccgcaggcagattccgcatcgactcctgccgttcaaggcggcgttcaatggcaccttcatcgcccgcgggcgggtacgacagggaggaagggaacaaggtggtcgccgaaggctacgcggaccttgtcgcatacggaaggctgttcttggccaacccagacctgcctaaaaggttcgaggtagacgagatcctgaacaagtatgatcgttccaccttttatacacaagaccctgttgttggctatacagattaccctttccttagggaggacagcgaagacttagctgctcaagcttaatggcgtggatgatcgatgtaatcacggttactgcacgatcgagatcgatactacatccatttgaatatatatatgtctaagatgcattgtttttgttttaagttagttttttttatatttgaccaaatttatgtaaaagatatatgtgctaaactagttgagtataccggtgtgttgcaacgacaaacgctagtctgtatcaaatgattttattaaactttactatagccagacttacaacaccatatcttgtacatgtgtgtatttgttcaagtaaaaatatataatggtggacttggaggc

SEQ ID NO: 18977 - protein, 249 aa, Zea mays subsp. mays
  peptide (1)..(249): Ceres Seq. ID no. 12359887
  misc_feature (39)..(119): Pfam Name: NADH:flavin oxidoreductase / NADH oxidase family Pfam Description: NADH:flavin oxidoreductase / NADH oxidase family
  misc_feature (33)..(119): Homolog of NCBI NO: 4894182 NR Description: 12-oxophytodienoate reductase [Lycopersicon
  misc_feature (38)..(119): Homolog of NCBI NO: 40645347 NR Description: hypothetical protein [Pisum sativum]
  misc_feature (30)..(119): Homolog of NCBI NO: 13516922 NR Description: 12-oxophytodienoic acid 10, 11-reductase [Pisum
  misc_feature (30)..(119): Homolog of NCBI NO: 40645353 NR Description: hypothetical protein [Pisum sativum]
  misc_feature (29)..(119): Homolog of NCBI NO: 40645349 NR Description: hypothetical protein [Pisum sativum]
  misc_feature (33)..(119): Homolog of NCBI NO: 40645459 NR Description: LEDI-5c protein [Lithospermum erythrorhizon]
  misc_feature (32)..(119): Homolog of NCBI NO: 7449901 NR Description: probable 12-oxophytodienoate reductase (EC
  misc_feature (30)..(119): Homolog of NCBI NO: 40645351 NR Description: hypothetical protein [Pisum sativum]
  misc_feature (36)..(119): Homolog of NCBI NO: 7449902 NR Description: probable 12-oxophytodienoate reductase (EC
  misc_feature (30)..(119): Homolog of NCBI NO: 40645345 NR Description: hypothetical protein [Pisum sativum]
NRIEIALVQTSKQQSRSSKGSNLSSVQAKMGQQEKEVIPLMTPYKMGQLELSHRVVLAPMTRCRAIGDVPQPHAAVYYSQRASRGGVLITEGTGVSATAQGFPGSPGIWTQEQVAAWKPHRRRRPPQGRALLLPDRARRKGIHQRFPAGRPGAGLEHGRAAPTRRRVRHGVLQATPAAGRRDPGDRRRLQARRAQRDRGRVRRRGDPRSARVPPGAVHEGRRQRPRRRVRRQRREPVPLRGRGRGRSGP

SEQ ID NO: 18978 - protein, 220 aa, Zea mays subsp. mays
  peptide (1)..(220): Ceres Seq. ID no. 12359888
  misc_feature (10)..(90): Pfam Name: NADH:flavin oxidoreductase / NADH oxidase family Pfam Description: NADH:flavin oxidoreductase / NADH oxidase family
  misc_feature (4)..(90): Homolog of NCBI NO: 4894182 NR Description: 12-oxophytodienoate reductase [Lycopersicon
  misc_feature (9)..(90): Homolog of NCBI NO: 40645347 NR Description: hypothetical protein [Pisum sativum]
  misc_feature (1)..(90): Homolog of NCBI NO: 13516922 NR Description: 12-oxophytodienoic acid 10, 11-reductase [Pisum
  misc_feature (1)..(90): Homolog of NCBI NO: 40645353 NR Description: hypothetical protein [Pisum sativum]
  misc_feature (1)..(90): Homolog of NCBI NO: 40645349 NR Description: hypothetical protein [Pisum sativum]
  misc_feature (4)..(90): Homolog of NCBI NO: 40645459 NR Description: LEDI-5c protein [Lithospermum erythrorhizon]
  misc_feature (3)..(90): Homolog of NCBI NO: 7449901 NR Description: probable 12-oxophytodienoate reductase (EC
  misc_feature (1)..(90): Homolog of NCBI NO: 40645351 NR Description: hypothetical protein [Pisum sativum]
  misc_feature (7)..(90): Homolog of NCBI NO: 7449902 NR Description: probable 12-oxophytodienoate reductase (EC
  misc_feature (1)..(90): Homolog of NCBI NO: 40645345 NR Description: hypothetical protein [Pisum sativum]
MGQQEKEVIPLMTPYKMGQLELSHRVVLAPMTRCRAIGDVPQPHAAVYYSQRASRGGVLITEGTGVSATAQGFPGSPGIWTQEQVAAWKPHRRRRPPQGRALLLPDRARRKGIHQRFPAGRPGAGLEHGRAAPTRRRVRHGVLQATPAAGRRDPGDRRRLQARRAQRDRGRVRRRGDPRSARVPPGAVHEGRRQRPRRRVRRQRREPVPLRGRGRGRSGP

SEQ ID NO: 18979 - protein, 209 aa, Zea mays subsp. mays
  peptide (1)..(209): Ceres Seq. ID no. 12359889
  misc_feature (1)..(79): Pfam Name: NADH:flavin oxidoreductase / NADH oxidase family Pfam Description: NADH:flavin oxidoreductase / NADH oxidase family
  misc_feature (1)..(79): Homolog of NCBI NO: 4894182 NR Description: 12-oxophytodienoate reductase [Lycopersicon
  misc_feature (1)..(79): Homolog of NCBI NO: 40645347 NR Description: hypothetical protein [Pisum sativum]
  misc_feature (1)..(79): Homolog of NCBI NO: 13516922 NR Description: 12-oxophytodienoic acid 10, 11-reductase [Pisum
  misc_feature (1)..(79): Homolog of NCBI NO: 40645353 NR Description: hypothetical protein [Pisum sativum]
  misc_feature (1)..(79): Homolog of NCBI NO: 40645349 NR Description: hypothetical protein [Pisum sativum]
  misc_feature (1)..(79): Homolog of NCBI NO: 40645459 NR Description: LEDI-5c protein [Lithospermum erythrorhizon]
  misc_feature (1)..(79): Homolog of NCBI NO: 7449901 NR Description: probable 12-oxophytodienoate reductase (EC
  misc_feature (1)..(79): Homolog of NCBI NO: 40645351 NR Description: hypothetical protein [Pisum sativum]
  misc_feature (1)..(79): Homolog of NCBI NO: 7449902 NR Description: probable 12-oxophytodienoate reductase (EC
  misc_feature (1)..(79): Homolog of NCBI NO: 40645345 NR Description: hypothetical protein [Pisum sativum]
MTPYKMGQLELSHRVVLAPMTRCRAIGDVPQPHAAVYYSQRASRGGVLITEGTGVSATAQGFPGSPGIWTQEQVAAWKPHRRRRPPQGRALLLPDRARRKGIHQRFPAGRPGAGLEHGRAAPTRRRVRHGVLQATPAAGRRDPGDRRRLQARRAQRDRGRVRRRGDPRSARVPPGAVHEGRRQRPRRRVRRQRREPVPLRGRGRGRSGP

SEQ ID NO: 18980 - DNA, 901 bp, Zea mays subsp. mays
  misc_feature (1)..(901): Ceres Seq. ID no. 12436121
  misc_feature: MA Experiment ID: 108523 Result: Up-regulated in Transcription
  misc_feature: MA Experiment 108523 PARAMETER Experiment Name: Zm_42deg_Heat_P Parameter: Age (day) Value: 8
  misc_feature: MA Experiment 108523 PARAMETER Experiment Name: Zm_42deg_Heat_P Parameter: Organism Value: Zea mays
  misc_feature: MA Experiment 108523 PARAMETER Experiment Name: Zm_42deg_Heat_P Parameter: Plant Line Value: 35A19
  misc_feature: MA Experiment 108523 PARAMETER Experiment Name: Zm_42deg_Heat_P Parameter: Temperature (deg C) Value: 42 vs. 22
  misc_feature: MA Experiment 108523 PARAMETER Experiment Name: Zm_42deg_Heat_P Parameter: Timepoint (hr) Value: 6
  misc_feature: MA Experiment 108523 PARAMETER Experiment Name: Zm_42deg_Heat_P Parameter: Tissue Value: Aerial
aaaacaaaccctagccgccaggcgcaggcggtcagggagcgagtaccgagcgccccagttcacacggtttatatcctaatctacgcagtcaatcctccttagcggtttcgttaatttgtttgtttccagcggccgttgcttcggtgattttgcttagctacgctttggaccggcgttccttcgctgctagctagtaccttttggaagtcaaggagtgctgtctttcgcctgatctacctagacgccttttcttgaatcagcgacttctattttggttaattagcaccggtagcccccctgctctcttgagtgagatgtcagaatacaagaacgtcgttggggggaggctaaagctgaagggtaaggcactggatgtgaaggaaggtggagtcaagaagaaaaaaaagaagcatcagcttgaagagtcgtctcagattgagcacgatgagctccacaaaggtagctgtccgtgtggagctcggttcatctttcgaacaacatgtttcgttttacatataaattggaccacttttgtgtgtggggaaactctggcttaccagctgatcacaacaatgagcttattgaagctggcaaggtgggagatgaagaaaggaatctacatccagactacgaccacctcacaccggcggagcgacgctatatagatcagaagcagaagatcgacatgcaaaagctggccaaagttgctaacaagtcacacagggaccgtatccaggacttcaaccagtatctggcgaacctcagcgagcactatgacatccctaaagttggccctggctaacaaacatagccaaactgctgtgtacgcacaaacaattgtatgctcggtgggcttcaagaacattaaaaatatataaatgtatgttgggtgattgggtct

SEQ ID NO: 18981 - protein, 116 aa, Zea mays subsp. mays
  peptide (1)..(116): Ceres Seq. ID no. 12436122
  misc_feature (1)..(49): Homolog of NCBI NO: 18394403 NR Description: expressed protein
MSEYKNVVGGRLKLKGKALDVKEGGVKKKKKKHQLEESSQIEHDELHKGSCPCGARFIFRTTCFVLHINWTTFVCGETLAYQLITTMSLLKLARWEMKKGIYIQTTTTSHRRSDAI

SEQ ID NO: 18982 - protein, 100 aa, Zea mays subsp. mays
  peptide (1)..(100): Ceres Seq. ID no. 12436123
  misc_feature (21)..(100): Homolog of NCBI NO: 40746298 NR Description: hypothetical protein AN0678.2 [Aspergillus
  misc_feature (46)..(100): Homolog of NCBI NO: 23509013 NR Description: hypothetical protein, conserved [Plasmodium
  misc_feature (32)..(97): Homolog of NCBI NO: 13325257 NR Description: Similar to CG15432 gene product [Homo sapiens]
  misc_feature (26)..(97): Homolog of NCBI NO: 21165518 NR Description: hypothetical protein [Mus musculus]
  misc_feature (26)..(97): Homolog of NCBI NO: 13385950 NR Description: RIKEN cDNA 2510049I19 [Mus musculus]
  misc_feature (26)..(97): Homolog of NCBI NO: 7661696 NR Description: DKFZP586O0120 protein [Homo sapiens]
  misc_feature (26)..(97): Homolog of NCBI NO: 7512937 NR Description: hypothetical protein DKFZp586O0120.1 - human
  misc_feature (45)..(100): Homolog of NCBI NO: 20269115 NR Description: CGI-144-like protein [Lycopersicon esculentum]
  misc_feature (9)..(100): Homolog of NCBI NO: 18394403 NR Description: expressed protein
MFRFTYKLDHFCVWGNSGLPADHNNELIEAGKVGDEERNLHPDYDHLTPAERRYIDQKQKIDMQKLAKVANKSHRDRIQDFNQYLANLSEHYDIPKVGPG

SEQ ID NO: 18983 - DNA, 1581 bp, Zea mays subsp. mays
  misc_feature (1)..(1581): Ceres Seq. ID no. 12418879
  misc_feature: MA Experiment ID: 20000535 Result: Down-regulated in Transcription
  misc_feature: MA Experiment 20000535 PARAMETER Experiment Name: Zm_Hybrid_Seed_Dev_P Parameter: DAP Value: 30 vs. 12
  misc_feature: MA Experiment 20000535 PARAMETER Experiment Name: Zm_Hybrid_Seed_Dev_P Parameter: Organism Value: Zea mays
  misc_feature: MA Experiment 20000535 PARAMETER Experiment Name: Zm_Hybrid_Seed_Dev_P Parameter: Plant Line Value: 35A19
  misc_feature: MA Experiment 20000535 PARAMETER Experiment Name: Zm_Hybrid_Seed_Dev_P Parameter: Tissue Value: Embryo vs. Unfert Floret
ctccattcctgcatcccatctcttcttcgcctcctccgcctcgccggcgtcaccgtccggtcccgcctctcccccccgctcgaagctcgatctcttctcccgttctccgcccacgcaatccctgccaccgccgaatgcggaacactccctttggtgaccgactgacctaccctgcttctgccgggttagttgagtgtccgcgccgcgtccggatctcgaatgcgccgccgccgccgtcgcgcgatctagcggctgcgcgctgccccgcaggagggtagagctccaggggcccggtgtggtcaggcggcagatatggcaacggaggcgtccacctctgcggcgggcgggatctgggtggaggggatgtccgcggacaacataaaggggctggtgctcgcgctctcctccagcttcttcatcggggccagcttcatcgtcaagaagaaggggcttaagaaggccggtgcgtccggcgtccgcgcaggtgttggtggttactcttacttgtatgaaccattatggtgggcaggaatgattacaatgattgttggagaagtggctaactttgcagcatatgcttttgctcctgctatcttggtcacaccacttggtgcccttagcatcataattagtgctgctcttgcagacattatgttgaaggaaaagctgcatatatttggtatacttgggtgtgttctttgtgttgtgggttcaacaactattgtacttcatgcccctcaggagcgcacaattgaatctgtagcagaagtgtgggatcttgctactgaaccagcctttctatcttatgctgccattgttcttgctgcaacatttgtcctcatatactactttattccacgatatggtcagacacacatcatggtctatattggtgtttgttcccttgtaggatctctgtcggtcatttgtgaaagctcttggaatagccttgaaactgaccttttctggcatgaatcagctaatttatccacaaacatggttgttcaccattgttgttgttgcatgtatagtaacacagatgaactacctgaacaaggctcttgatactttcaacacagcagttgtatcaccgatatactatacaatgttcacgtcactaaccattttggctagcgtgataatgttcaaggactgggatcgtcaaaatccaactcaaattgtaacagagatgtgtggttttgttaccattctttcggggacgtttcttctccacaagacaaaagacatggttgatggcctcccgccaactctacctgtccggattcctaaacatgaggacgatgcagctgaaggaatccctctcaggtctgctgaaggcatcccgctcagatcaccgagggcaacggaatcgtttcgatcaacgctataatggttggtgatccttcttcaaaggccatgctcagccattctttcatttgatacacacctttgtagattgtattttaggattccaaaaggtaaaggcaccgctccccatgtaatttttttgagacaccggtgtagagtatcgggggaacttatgttatacatctcgaaatgcccagaatgggcttagatccg

SEQ ID NO: 18984 - protein, 250 aa, Zea mays subsp. mays
  peptide (1)..(250): Ceres Seq. ID no. 12418880
  misc_feature (18)..(205): Pfam Name: Protein of unknown function (DUF803) Pfam Description: Protein of unknown function (DUF803)
  misc_feature (10)..(164): Homolog of NCBI NO: 15233982 NR Description: putative protein; protein id: At4g09640.1
  misc_feature (25)..(206): Homolog of NCBI NO: 38382727 NR Description: Unknown (protein for MGC:66088) [Danio rerio]
  misc_feature (1)..(205): Homolog of NCBI NO: 20161440 NR Description: B1065E10.15 [Oryza sativa (japonica
  misc_feature (18)..(205): Homolog of NCBI NO: 26449939 NR Description: unknown protein [Arabidopsis thaliana]
  misc_feature (15)..(205): Homolog of NCBI NO: 15229534 NR Description: unknown protein; protein id: At3g23870.1
  misc_feature (18)..(205): Homolog of NCBI NO: 21593618 NR Description: unknown [Arabidopsis thaliana]
  misc_feature (15)..(205): Homolog of NCBI NO: 18414079 NR Description: expressed protein
  misc_feature (10)..(205): Homolog of NCBI NO: 25406128 NR Description: unknown protein F17M19.5 [imported] - Arabidopsis
  misc_feature (8)..(205): Homolog of NCBI NO: 18399280 NR Description: expressed protein
  misc_feature (10)..(205): Homolog of NCBI NO: 18409942 NR Description: expressed protein
MATEASTSAAGGIWVEGMSADNIKGLVLALSSSFFIGASFIVKKKGLKKAGASGVRAGVGGYSYLYEPLWWAGMITMIVGEVANFAAYAFAPAILVTPLGALSIIISAALADIMLKEKLHIFGILGCVLCVVGSTTIVLHAPQERTIESVAEVWDLATEPAFLSYAAIVLAATFVLIYYFIPRYGQTHIMVYIGVCSLVGSLSVICESSWNSLETDLFWHESANLSTNMVVHHCCCCMYSNTDELPEQGS

SEQ ID NO: 18985 - protein, 233 aa, Zea mays subsp. mays
  peptide (1)..(233): Ceres Seq. ID no. 12418881
  misc_feature (1)..(188): Pfam Name: Protein of unknown function (DUF803) Pfam Description: Protein of unknown function (DUF803)
  misc_feature (1)..(147): Homolog of NCBI NO: 15233982 NR Description: putative protein; protein id: At4g09640.1
  misc_feature (8)..(189): Homolog of NCBI NO: 38382727 NR Description: Unknown (protein for MGC:66088) [Danio rerio]
  misc_feature (1)..(188): Homolog of NCBI NO: 20161440 NR Description: B1065E10.15 [Oryza sativa (japonica
  misc_feature (1)..(188): Homolog of NCBI NO: 26449939 NR Description: unknown protein [Arabidopsis thaliana]
  misc_feature (1)..(188): Homolog of NCBI NO: 15229534 NR Description: unknown protein; protein id: At3g23870.1
  misc_feature (1)..(188): Homolog of NCBI NO: 21593618 NR Description: unknown [Arabidopsis thaliana]
  misc_feature (1)..(188): Homolog of NCBI NO: 18414079 NR Description: expressed protein
  misc_feature (1)..(188): Homolog of NCBI NO: 25406128 NR Description: unknown protein F17M19.5 [imported] - Arabidopsis
  misc_feature (1)..(188): Homolog of NCBI NO: 18399280 NR Description: expressed protein
  misc_feature (1)..(188): Homolog of NCBI NO: 18409942 NR Description: expressed protein
MSADNIKGLVLALSSSFFIGASFIVKKKGLKKAGASGVRAGVGGYSYLYEPLWWAGMITMIVGEVANFAAYAFAPAILVTPLGALSIIISAALADIMLKEKLHIFGILGCVLCVVGSTTIVLHAPQERTIESVAEVWDLATEPAFLSYAAIVLAATFVLIYYFIPRYGQTHIMVYIGVCSLVGSLSVICESSWNSLETDLFWHESANLSTNMVVHHCCCCMYSNTDELPEQGS

SEQ ID NO: 18986 - protein, 177 aa, Zea mays subsp. mays
  peptide (1)..(177): Ceres Seq. ID no. 12418882
  misc_feature (1)..(132): Pfam Name: Protein of unknown function (DUF803) Pfam Description: Protein of unknown function (DUF803)
  misc_feature (1)..(132): Homolog of NCBI NO: 15229534 NR Description: unknown protein; protein id: At3g23870.1
  misc_feature (1)..(132): Homolog of NCBI NO: 21593618 NR Description: unknown [Arabidopsis thaliana]
  misc_feature (1)..(132): Homolog of NCBI NO: 18414079 NR Description: expressed protein
  misc_feature (1)..(132): Homolog of NCBI NO: 20161440 NR Description: B1065E10.15 [Oryza sativa (japonica
  misc_feature (1)..(91): Homolog of NCBI NO: 15233982 NR Description: putative protein; protein id: At4g09640.1
  misc_feature (1)..(133): Homolog of NCBI NO: 38382727 NR Description: Unknown (protein for MGC:66088) [Danio rerio]
  misc_feature (1)..(132): Homolog of NCBI NO: 26449939 NR Description: unknown protein [Arabidopsis thaliana]
  misc_feature (1)..(132): Homolog of NCBI NO: 25406128 NR Description: unknown protein F17M19.5 [imported] - Arabidopsis
  misc_feature (1)..(132): Homolog of NCBI NO: 18399280 NR Description: expressed protein
  misc_feature (1)..(132): Homolog of NCBI NO: 18409942 NR Description: expressed protein
MITMIVGEVANFAAYAFAPAILVTPLGALSIIISAALADIMLKEKLHIFGILGCVLCVVGSTTIVLHAPQERTIESVAEVWDLATEPAFLSYAAIVLAATFVLIYYFIPRYGQTHIMVYIGVCSLVGSLSVICESSWNSLETDLFWHESANLSTNMVVHHCCCCMYSNTDELPEQGS

SEQ ID NO: 18987 - DNA, 1625 bp, Zea mays subsp. mays; identical to SEQ ID NO: 1790
  misc_feature (1)..(1625): Ceres Seq. ID no. 13494770
  misc_feature: MA Experiment ID: 108504 Result: Down-regulated in Transcription
  misc_feature: MA Experiment 108504 PARAMETER Experiment Name: Zm_Drought_P Parameter: Age (day) Value: 8
  misc_feature: MA Experiment 108504 PARAMETER Experiment Name: Zm_Drought_P Parameter: Organism Value: Zea mays
  misc_feature: MA Experiment 108504 PARAMETER Experiment Name: Zm_Drought_P Parameter: Plant Line Value: 35A19
  misc_feature: MA Experiment 108504 PARAMETER Experiment Name: Zm_Drought_P Parameter: Timepoint (hr) Value: 12
  misc_feature: MA Experiment 108504 PARAMETER Experiment Name: Zm_Drought_P Parameter: Tissue Value: Aerial
  misc_feature: MA Experiment 108504 PARAMETER Experiment Name: Zm_Drought_P Parameter: Treatment Value: Drought vs. No Drought
  misc_feature: MA Experiment ID: 108527 Result: Down-regulated in Transcription
  misc_feature: MA Experiment 108527 PARAMETER Experiment Name: Zm_5mM_NO_P Parameter: Age (day) Value: 8
  misc_feature: MA Experiment 108527 PARAMETER Experiment Name: Zm_5mM_NO_P Parameter: Organism Value: Zea mays
  misc_feature: MA Experiment 108527 PARAMETER Experiment Name: Zm_5mM_NO_P Parameter: Plant Line Value: 35A19
  misc_feature: MA Experiment 108527 PARAMETER Experiment Name: Zm_5mM_NO_P Parameter: Timepoint (hr) Value: 6
  misc_feature: MA Experiment 108527 PARAMETER Experiment Name: Zm_5mM_NO_P Parameter: Tissue Value: Aerial
  misc_feature: MA Experiment 108527 PARAMETER Experiment Name: Zm_5mM_NO_P Parameter: Treatment Value: 5mM NO vs. No Treatment
  misc_feature: MA Experiment ID: 108535 Result: Down-regulated in Transcription
  misc_feature: MA Experiment 108535 PARAMETER Experiment Name: Zm_Meristem_P Parameter: Age (day) Value: 8
  misc_feature: MA Experiment 108535 PARAMETER Experiment Name: Zm_Meristem_P Parameter: Organism Value: Zea mays
  misc_feature: MA Experiment 108535 PARAMETER Experiment Name: Zm_Meristem_P Parameter: Plant Line Value: 35A19
  misc_feature: MA Experiment 108535 PARAMETER Experiment Name: Zm_Meristem_P Parameter: Tissue Value: Root Meristem vs. Above Root Meristem
  misc_feature: MA Experiment ID: 108556 Result: Down-regulated in Transcription
  misc_feature: MA Experiment 108556 PARAMETER Experiment Name: Zm_Drought_P Parameter: Age (day) Value: 9
  misc_feature: MA Experiment 108556 PARAMETER Experiment Name: Zm_Drought_P Parameter: Organism Value: Zea mays
  misc_feature: MA Experiment 108556 PARAMETER Experiment Name: Zm_Drought_P Parameter: Plant Line Value: 35A19
  misc_feature: MA Experiment 108556 PARAMETER Experiment Name: Zm_Drought_P Parameter: Timepoint (hr) Value: 24
  misc_feature: MA Experiment 108556 PARAMETER Experiment Name: Zm_Drought_P Parameter: Tissue Value: Aerial
  misc_feature: MA Experiment 108556 PARAMETER Experiment Name: Zm_Drought_P Parameter: Treatment Value: Drought vs. No Drought
  misc_feature: MA Experiment ID: 108597 Result: Down-regulated in Transcription
  misc_feature: MA Experiment 108597 PARAMETER Experiment Name: Zm_100uM_ABA_P Parameter: Age (day) Value: 9
  misc_feature: MA Experiment 108597 PARAMETER Experiment Name: Zm_100uM_ABA_P Parameter: Organism Value: Zea mays
  misc_feature: MA Experiment 108597 PARAMETER Experiment Name: Zm_100uM_ABA_P Parameter: Plant Line Value: 35A19
  misc_feature: MA Experiment 108597 PARAMETER Experiment Name: Zm_100uM_ABA_P Parameter: Timepoint (hr) Value: 24
  misc_feature: MA Experiment 108597 PARAMETER Experiment Name: Zm_100uM_ABA_P Parameter: Tissue Value: Aerial
  misc_feature: MA Experiment 108597 PARAMETER Experiment Name: Zm_100uM_ABA_P Parameter: Treatment Value: 100uM ABA vs. No Treatment
  misc_feature: MA Experiment ID: 20000108 Result: Down-regulated in Transcription
  misc_feature: MA Experiment 20000108 PARAMETER Experiment Name: Zm_Root-Tips_P Parameter: Age (day) Value: 12
  misc_feature: MA Experiment 20000108 PARAMETER Experiment Name: Zm_Root-Tips_P Parameter: Organism Value: Zea mays
  misc_feature: MA Experiment 20000108 PARAMETER Experiment Name: Zm_Root-Tips_P Parameter: Tissue Value: Root tips vs. Root mid region    35
  misc_feature: MA Experiment 20000108 PARAMETER Experiment Name: Zm_Root-Tips_P Parameter: Tissue Value: Root tips vs. Root mid region   Sequence Listing-Misc Features (4)
  misc_feature: MA Experiment ID: 20000477 Result: Down-regulated in Transcription
  misc_feature: MA Experiment 20000477 PARAMETER Experiment Name: Zm_5mM_SA_P Parameter: Age (day) Value: 10
  misc_feature: MA Experiment 20000477 PARAMETER Experiment Name: Zm_5mM_SA_P Parameter: Organism Value: Zea mays
  misc_feature: MA Experiment 20000477 PARAMETER Experiment Name: Zm_5mM_SA_P Parameter: Plant Line Value: 35A19
  misc_feature: MA Experiment 20000477 PARAMETER Experiment Name: Zm_5mM_SA_P Parameter: Timepoint (hr) Value: 48
  misc_feature: MA Experiment 20000477 PARAMETER Experiment Name: Zm_5mM_SA_P Parameter: Tissue Value: Aerial
  misc_feature: MA Experiment 20000477 PARAMETER Experiment Name: Zm_5mM_SA_P Parameter: Treatment Value: 5mM SA vs. No Treatment
  misc_feature: MA Experiment ID: 20000478 Result: Down-regulated in Transcription
  misc_feature: MA Experiment 20000478 PARAMETER Experiment Name: Zm_5mM_SA_P Parameter: Age (day) Value: 11
  misc_feature: MA Experiment 20000478 PARAMETER Experiment Name: Zm_5mM_SA_P Parameter: Organism Value: Zea mays
  misc_feature: MA Experiment 20000478 PARAMETER Experiment Name: Zm_5mM_SA_P Parameter: Plant Line Value: 35A19
  misc_feature: MA Experiment 20000478 PARAMETER Experiment Name: Zm_5mM_SA_P Parameter: Timepoint (hr) Value: 72
  misc_feature: MA Experiment 20000478 PARAMETER Experiment Name: Zm_5mM_SA_P Parameter: Tissue Value: Aerial
  misc_feature: MA Experiment 20000478 PARAMETER Experiment Name: Zm_5mM_SA_P Parameter: Treatment Value: 5mM SA vs. No Treatment
  misc_feature: MA Experiment ID: 20000479 Result: Down-regulated in Transcription
  misc_feature: MA Experiment 20000479 PARAMETER Experiment Name: Zm_Drought_P Parameter: Age (day) Value: 10
  misc_feature: MA Experiment 20000479 PARAMETER Experiment Name: Zm_Drought_P Parameter: Organism Value: Zea mays
  misc_feature: MA Experiment 20000479 PARAMETER Experiment Name: Zm_Drought_P Parameter: Plant Line Value: 35A19
  misc_feature: MA Experiment 20000479 PARAMETER Experiment Name: Zm_Drought_P Parameter: Timepoint (hr) Value: 48
  misc_feature: MA Experiment 20000479 PARAMETER Experiment Name: Zm_Drought_P Parameter: Tissue Value: Aerial
  misc_feature: MA Experiment 20000479 PARAMETER Experiment Name: Zm_Drought_P Parameter: Treatment Value: Drought vs. No Drought
  misc_feature: MA Experiment ID: 20000480 Result: Down-regulated in Transcription
  misc_feature: MA Experiment 20000480 PARAMETER Experiment Name: Zm_Drought_P Parameter: Age (day) Value: 11
  misc_feature: MA Experiment 20000480 PARAMETER Experiment Name: Zm_Drought_P Parameter: Organism Value: Zea mays
  misc_feature: MA Experiment 20000480 PARAMETER Experiment Name: Zm_Drought_P Parameter: Plant Line Value: 35A19
  misc_feature: MA Experiment 20000480 PARAMETER Experiment Name: Zm_Drought_P Parameter: Timepoint (hr) Value: 72
  misc_feature: MA Experiment 20000480 PARAMETER Experiment Name: Zm_Drought_P Parameter: Tissue Value: Aerial
  misc_feature: MA Experiment 20000480 PARAMETER Experiment Name: Zm_Drought_P Parameter: Treatment Value: Drought vs. No Drought
  misc_feature: MA Experiment ID: 20000534 Result: Down-regulated in Transcription
  misc_feature: MA Experiment 20000534 PARAMETER Experiment Name: Zm_Hybrid_Pollen_P Parameter: Age (day) Value: 8
  misc_feature: MA Experiment 20000534 PARAMETER Experiment Name: Zm_Hybrid_Pollen_P Parameter: Organism Value: Zea mays
  misc_feature: MA Experiment 20000534 PARAMETER Experiment Name: Zm_Hybrid_Pollen_P Parameter: Plant Line Value: 35A19
  misc_feature: MA Experiment 20000534 PARAMETER Experiment Name: Zm_Hybrid_Pollen_P Parameter: Tissue Value: Pollen vs. Aerial
  misc_feature: MA Experiment ID: 20000535 Result: Down-regulated in Transcription
  misc_feature: MA Experiment 20000535 PARAMETER Experiment Name: Zm_Hybrid_Seed_Dev_P Parameter: DAP Value: 30 vs. 12
  misc_feature: MA Experiment 20000535 PARAMETER Experiment Name: Zm_Hybrid_Seed_Dev_P Parameter: Organism Value: Zea mays
  misc_feature: MA Experiment 20000535 PARAMETER Experiment Name: Zm_Hybrid_Seed_Dev_P Parameter: Plant Line Value: 35A19
  misc_feature: MA Experiment 20000535 PARAMETER Experiment Name: Zm_Hybrid_Seed_Dev_P Parameter: Tissue Value: Embryo vs. Unfert Floret
  misc_feature: MA Experiment ID: 20000626 Result: Down-regulated in Transcription
  misc_feature: MA Experiment 20000626 PARAMETER Experiment Name: Zm_Herbicide-Treatments_P Parameter: Timepoint (hr) Value: 12
  misc_feature: MA Experiment 20000626 PARAMETER Experiment Name: Zm_Herbicide-Treatments_P Parameter: Tissue Value: Aerial
  misc_feature: MA Experiment 20000626 PARAMETER Experiment Name: Zm_Herbicide-Treatments_P Parameter: Treatment Value: Roundup vs. No Treatment

SEQ ID NO: 18988 - protein, 368 aa, Zea mays subsp. mays; identical to SEQ ID NO: 1791
  peptide (1)..(368): Ceres Seq. ID no. 13494771
  misc_feature (1)..(159): Homolog of NCBI NO: 18415427 NR Description: expressed protein [Arabidopsis thaliana]
  misc_feature (1)..(159): Homolog of NCBI NO: 7485728 NR Description: hypothetical protein F18F4.140 - Arabidopsis
  misc_feature (6)..(156): Homolog of NCBI NO: 18415427 NR Description: expressed protein [Arabidopsis thaliana]
  misc_feature (6)..(156): Homolog of NCBI NO: 7485728 NR Description: hypothetical protein F18F4.140 - Arabidopsis
  misc_feature (1)..(156): Homolog of NCBI NO: 15235269 NR Description: expressed protein [Arabidopsis thaliana]
  misc_feature (1)..(156): Homolog of NCBI NO: 38347355 NR Description: OSJNBa0070C17.16 [Oryza sativa (japonica
  misc_feature (1)..(159): Homolog of NCBI NO: 18415427 NR Description: expressed protein [Arabidopsis thaliana]
  misc_feature (1)..(159): Homolog of NCBI NO: 7485728 NR Description: hypothetical protein F18F4.140 - Arabidopsis
  misc_feature (6)..(156): Homolog of NCBI NO: 18415427 NR Description: expressed protein [Arabidopsis thaliana]
  misc_feature (6)..(156): Homolog of NCBI NO: 7485728 NR Description: hypothetical protein F18F4.140 - Arabidopsis
  misc_feature (1)..(156): Homolog of NCBI NO: 15235269 NR Description: expressed protein [Arabidopsis thaliana]
  misc_feature (1)..(156): Homolog of NCBI NO: 38347355 NR Description: OSJNBa0070C17.16 [Oryza sativa (japonica

SEQ ID NO: 18989 - protein, 291 aa, Zea mays subsp. mays; identical to SEQ ID NO: 1792
  peptide (1)..(291): Ceres Seq. ID no. 13494772
  misc_feature (1)..(82): Homolog of NCBI NO: 18415427 NR Description: expressed protein [Arabidopsis thaliana]
  misc_feature (1)..(82): Homolog of NCBI NO: 7485728 NR Description: hypothetical protein F18F4.140 - Arabidopsis
  misc_feature (1)..(79): Homolog of NCBI NO: 18415427 NR Description: expressed protein [Arabidopsis thaliana]
  misc_feature (1)..(79): Homolog of NCBI NO: 7485728 NR Description: hypothetical protein F18F4.140 - Arabidopsis
  misc_feature (1)..(79): Homolog of NCBI NO: 15235269 NR Description: expressed protein [Arabidopsis thaliana]
  misc_feature (1)..(79): Homolog of NCBI NO: 38347355 NR Description: OSJNBa0070C17.16 [Oryza sativa (japonica
  misc_feature (1)..(82): Homolog of NCBI NO: 18415427 NR Description: expressed protein [Arabidopsis thaliana]
  misc_feature (1)..(82): Homolog of NCBI NO: 7485728 NR Description: hypothetical protein F18F4.140 - Arabidopsis
  misc_feature (1)..(79): Homolog of NCBI NO: 18415427 NR Description: expressed protein [Arabidopsis thaliana]
  misc_feature (1)..(79): Homolog of NCBI NO: 7485728 NR Description: hypothetical protein F18F4.140 - Arabidopsis
  misc_feature (1)..(79): Homolog of NCBI NO: 15235269 NR Description: expressed protein [Arabidopsis thaliana]
  misc_feature (1)..(79): Homolog of NCBI NO: 38347355 NR Description: OSJNBa0070C17.16 [Oryza sativa (japonica

SEQ ID NO: 18990 - protein, 239 aa, Zea mays subsp. mays; identical to SEQ ID NO: 1793
  peptide (1)..(239): Ceres Seq. ID no. 13494773
  misc_feature (1)..(30): Homolog of NCBI NO: 18415427 NR Description: expressed protein [Arabidopsis thaliana]
  misc_feature (1)..(30): Homolog of NCBI NO: 7485728 NR Description: hypothetical protein F18F4.140 - Arabidopsis
  misc_feature (1)..(27): Homolog of NCBI NO: 18415427 NR Description: expressed protein [Arabidopsis thaliana]
  misc_feature (1)..(27): Homolog of NCBI NO: 7485728 NR Description: hypothetical protein F18F4.140 - Arabidopsis
  misc_feature (1)..(27): Homolog of NCBI NO: 15235269 NR Description: expressed protein [Arabidopsis thaliana]
  misc_feature (1)..(27): Homolog of NCBI NO: 38347355 NR Description: OSJNBa0070C17.16 [Oryza sativa (japonica
  misc_feature (1)..(30): Homolog of NCBI NO: 18415427 NR Description: expressed protein [Arabidopsis thaliana]
  misc_feature (1)..(30): Homolog of NCBI NO: 7485728 NR Description: hypothetical protein F18F4.140 - Arabidopsis
  misc_feature (1)..(27): Homolog of NCBI NO: 18415427 NR Description: expressed protein [Arabidopsis thaliana]
  misc_feature (1)..(27): Homolog of NCBI NO: 7485728 NR Description: hypothetical protein F18F4.140 - Arabidopsis
  misc_feature (1)..(27): Homolog of NCBI NO: 15235269 NR Description: expressed protein [Arabidopsis thaliana]
  misc_feature (1)..(27): Homolog of NCBI NO: 38347355 NR Description: OSJNBa0070C17.16 [Oryza sativa (japonica

SEQ ID NO: 18991 - DNA, 1915 bp, Zea mays subsp. mays
  misc_feature (1)..(1915): Ceres Seq. ID no. 12369726
  misc_feature: MA Experiment ID: 108559 Result: Down-regulated in Transcription
  misc_feature: MA Experiment 108559 PARAMETER Experiment Name: Zm_5mM_NO_P Parameter: Age (day) Value: 8
  misc_feature: MA Experiment 108559 PARAMETER Experiment Name: Zm_5mM_NO_P Parameter: Organism Value: Zea mays
  misc_feature: MA Experiment 108559 PARAMETER Experiment Name: Zm_5mM_NO_P Parameter: Plant Line Value: 35A19
  misc_feature: MA Experiment 108559 PARAMETER Experiment Name: Zm_5mM_NO_P Parameter: Timepoint (hr) Value: 12
  misc_feature: MA Experiment 108559 PARAMETER Experiment Name: Zm_5mM_NO_P Parameter: Tissue Value: Aerial
  misc_feature: MA Experiment 108559 PARAMETER Experiment Name: Zm_5mM_NO_P Parameter: Treatment Value: 5mM NO vs. No Treatment
  misc_feature: MA Experiment ID: 20000478 Result: Down-regulated in Transcription
  misc_feature: MA Experiment 20000478 PARAMETER Experiment Name: Zm_5mM_SA_P Parameter: Age (day) Value: 11
  misc_feature: MA Experiment 20000478 PARAMETER Experiment Name: Zm_5mM_SA_P Parameter: Organism Value: Zea mays
  misc_feature: MA Experiment 20000478 PARAMETER Experiment Name: Zm_5mM_SA_P Parameter: Plant Line Value: 35A19
  misc_feature: MA Experiment 20000478 PARAMETER Experiment Name: Zm_5mM_SA_P Parameter: Timepoint (hr) Value: 72
  misc_feature: MA Experiment 20000478 PARAMETER Experiment Name: Zm_5mM_SA_P Parameter: Tissue Value: Aerial
  misc_feature: MA Experiment 20000478 PARAMETER Experiment Name: Zm_5mM_SA_P Parameter: Treatment Value: 5mM SA vs. No Treatment
  misc_feature: MA Experiment ID: 20000479 Result: Down-regulated in Transcription
  misc_feature: MA Experiment 20000479 PARAMETER Experiment Name: Zm_Drought_P Parameter: Age (day) Value: 10
  misc_feature: MA Experiment 20000479 PARAMETER Experiment Name: Zm_Drought_P Parameter: Organism Value: Zea mays
  misc_feature: MA Experiment 20000479 PARAMETER Experiment Name: Zm_Drought_P Parameter: Plant Line Value: 35A19
  misc_feature: MA Experiment 20000479 PARAMETER Experiment Name: Zm_Drought_P Parameter: Timepoint (hr) Value: 48
  misc_feature: MA Experiment 20000479 PARAMETER Experiment Name: Zm_Drought_P Parameter: Tissue Value: Aerial
  misc_feature: MA Experiment 20000479 PARAMETER Experiment Name: Zm_Drought_P Parameter: Treatment Value: Drought vs. No Drought
  misc_feature: MA Experiment ID: 20000480 Result: Down-regulated in Transcription
  misc_feature: MA Experiment 20000480 PARAMETER Experiment Name: Zm_Drought_P Parameter: Age (day) Value: 11
  misc_feature: MA Experiment 20000480 PARAMETER Experiment Name: Zm_Drought_P Parameter: Organism Value: Zea mays
  misc_feature: MA Experiment 20000480 PARAMETER Experiment Name: Zm_Drought_P Parameter: Plant Line Value: 35A19
  misc_feature: MA Experiment 20000480 PARAMETER Experiment Name: Zm_Drought_P Parameter: Timepoint (hr) Value: 72
  misc_feature: MA Experiment 20000480 PARAMETER Experiment Name: Zm_Drought_P Parameter: Tissue Value: Aerial
  misc_feature: MA Experiment 20000480 PARAMETER Experiment Name: Zm_Drought_P Parameter: Treatment Value: Drought vs. No Drought
  misc_feature: MA Experiment ID: 20000630 Result: Down-regulated in Transcription
  misc_feature: MA Experiment 20000630 PARAMETER Experiment Name: Zm_Herbicide-Treatments_P Parameter: Timepoint (hr) Value: 4
  misc_feature: MA Experiment 20000630 PARAMETER Experiment Name: Zm_Herbicide-Treatments_P Parameter: Tissue Value: Aerial
  misc_feature: MA Experiment 20000630 PARAMETER Experiment Name: Zm_Herbicide-Treatments_P Parameter: Treatment Value: Roundup vs. No Treatment
gcacgagaccattacctagaacatcctaatcgaaaagagagaagggagaggcgagggagctcaccaggagagaggggcctgtgtgagcattgagcaaagcaaacgaagcagtacatacatctctcgctcgcagaggcccggccggccggctccatgcaacaagggacgacgagcggtggcggtgggcgatgatgatgatgatggcgggggagcacgtgctggccgctctggccaccctgcttctggcctcgctcctgaccctggtgctgaaccacttcctgcccttgcttctgaaccccaaggcccccaggggaagcttcgggtggccgctcctcggcgagacgctcaggttcctcacgccgcacgcctccaacacgctgggcggcttcctcgaggatcactgctccaggtatgggcgggtgttcaagtcccacctgttctgcaccccgacggtggtgtcctgcgaccaggacctcaaccacttcatcctgcagaacgaggagcggctgttccagtgcagctacccgaggccgatccatggcatcctgggcaagtcctccatgctcgtcgtcctgggcgaggaccacaagcgcctcaggaacctcgccctcgccctcgtcacctccaccaagctcaagcccagctaccttggcgacatcgagaagatcgcgctgcacgtcgtcggcgcatggcgacggcacggcggcgtcagggtcgtcgcattctgcgaggaggcaagaaagttcgcattcagtgtgatagtgaagcaggtgctggggctgtcgccagaggagccggtcactgcaaggatactcgaggacttcctggccttcatgaagggcctcatctccttccccctctacatcccagggaccccatatgccaaggctgtccgggcgagagagaggatatccagcactgtgaagggcatcatcaaggagcggaggagcgctgggtcatggaacaagcagggcgacttccttgacgtgctgctgtcaagcaacgagctatctgacgaggagaaagtgagctttgtgctggactccctgctgggagggtatgagaccacctcgctcctcatctccatggtcgtttatttccttggccagtctgctcaagatctggacctggttaagagggagcacgacagcataagatccaacaaaggcaaggaggagtgcttgacttcagaagactacaagaagatggaatatacccaacaagtcatcaacgaggcgctgagatgcggcaacatcgtcaagttcgtccaccggaaggcgctgaaagacgtcaaatacaaagagtatctgattccatctggctggaaggtcctaccggtcttcactgccgttcatctgaacccctcacttcatggagacgcgcagcagtttcagccctgtaggtgggagggcacaagccaagggacaagcaagaggtttacaccgttcggtggtggcccccggctctgcccaggatcagagctcgctaaagtggagactgctttcttcctccatcaccttgtcctcaattatagatggagaattgatggcgatgacattccaatggcatacccgtatgtggagtttcagagaggtctgccaatagaaatcgagccaacgtcccctgaatcttgactgtcctggagctacagccatcagttatcacaccagagagaaaaggggaaggtgcatggagtatacatgaatggtcagtgacagatctcacaagtgaaggaacactgagggcgcgtgctagtagctagcatatgaggcagctgagactgtaatttaatgtacatggtgtagatatattttgtccatggcaattgcttgaagtggctgattcacttcaccctgtaaaacattctccagtggtttcaactgctatcctataaaaaagaagggcccctgtgttt

SEQ ID NO: 18992 - protein, 481 aa, Zea mays subsp. mays
  peptide (1)..(481): Ceres Seq. ID no. 12369727
  misc_feature (40)..(474): Homolog of NCBI NO: 34902330 NR Description: Putative steroid 22-alpha-hydroxylase
  misc_feature (318)..(477): Homolog of NCBI NO: 11357546 NR Description: hypothetical protein F18O22.190 - Arabidopsis
  misc_feature (45)..(278): Homolog of NCBI NO: 11357546 NR Description: hypothetical protein F18O22.190 - Arabidopsis
  misc_feature (263)..(474): Homolog of NCBI NO: 15229822 NR Description: steroid 22-alpha-hydroxylase (DWF4)
  misc_feature (263)..(474): Homolog of NCBI NO: 2935342 NR Description: steroid 22-alpha-hydroxylase; DWF4; CYP90B1
  misc_feature (4)..(253): Homolog of NCBI NO: 15229822 NR Description: steroid 22-alpha-hydroxylase (DWF4)
  misc_feature (4)..(253): Homolog of NCBI NO: 2935342 NR Description: steroid 22-alpha-hydroxylase; DWF4; CYP90B1
  misc_feature (45)..(477): Homolog of NCBI NO: 22326806 NR Description: cytochrome p450 family; protein id: At5g14400.1
  misc_feature (4)..(201): Homolog of NCBI NO: 32487441 NR Description: OSJNBa0016O02.25 [Oryza sativa (japonica
  misc_feature (233)..(473): Homolog of NCBI NO: 32487441 NR Description: OSJNBa0016O02.25 [Oryza sativa (japonica
MMMMMAGEHVLAALATLLLASLLTLVLNHFLPLLLNPKAPRGSFGWPLLGETLRFLTPHASNTLGGFLEDHCSRYGRVFKSHLFCTPTVVSCDQDLNHFILQNEERLFQCSYPRPIHGILGKSSMLVVLGEDHKRLRNLALALVTSTKLKPSYLGDIEKIALHVVGAWRRHGGVRVVAFCEEARKFAFSVIVKQVLGLSPEEPVTARILEDFLAFMKGLISFPLYIPGTPYAKAVRARERISSTVKGIIKERRSAGSWNKQGDFLDVLLSSNELSDEEKVSFVLDSLLGGYETTSLLISMVVYFLGQSAQDLDLVKREHDSIRSNKGKEECLTSEDYKKMEYTQQVINEALRCGNIVKFVHRKALKDVKYKEYLIPSGWKVLPVFTAVHLNPSLHGDAQQFQPCRWEGTSQGTSKRFTPFGGGPRLCPGSELAKVETAFFLHHLVLNYRWRIDGDDIPMAYPYVEFQRGLPIEIEPTSPES

SEQ ID NO: 18993 - protein, 480 aa, Zea mays subsp. mays
  peptide (1)..(480): Ceres Seq. ID no. 12369728
  misc_feature (39)..(473): Homolog of NCBI NO: 34902330 NR Description: Putative steroid 22-alpha-hydroxylase
  misc_feature (317)..(476): Homolog of NCBI NO: 11357546 NR Description: hypothetical protein F18O22.190 - Arabidopsis
  misc_feature (44)..(277): Homolog of NCBI NO: 11357546 NR Description: hypothetical protein F18O22.190 - Arabidopsis
  misc_feature (262)..(473): Homolog of NCBI NO: 15229822 NR Description: steroid 22-alpha-hydroxylase (DWF4)
  misc_feature (262)..(473): Homolog of NCBI NO: 2935342 NR Description: steroid 22-alpha-hydroxylase; DWF4; CYP90B1
  misc_feature (3)..(252): Homolog of NCBI NO: 15229822 NR Description: steroid 22-alpha-hydroxylase (DWF4)
  misc_feature (3)..(252): Homolog of NCBI NO: 2935342 NR Description: steroid 22-alpha-hydroxylase; DWF4; CYP90B1
  misc_feature (44)..(476): Homolog of NCBI NO: 22326806 NR Description: cytochrome p450 family; protein id: At5g14400.1
  misc_feature (3)..(200): Homolog of NCBI NO: 32487441 NR Description: OSJNBa0016O02.25 [Oryza sativa (japonica
  misc_feature (232)..(472): Homolog of NCBI NO: 32487441 NR Description: OSJNBa0016O02.25 [Oryza sativa (japonica
MMMMAGEHVLAALATLLLASLLTLVLNHFLPLLLNPKAPRGSFGWPLLGETLRFLTPHASNTLGGFLEDHCSRYGRVFKSHLFCTPTVVSCDQDLNHFILQNEERLFQCSYPRPIHGILGKSSMLVVLGEDHKRLRNLALALVTSTKLKPSYLGDIEKIALHVVGAWRRHGGVRVVAFCEEARKFAFSVIVKQVLGLSPEEPVTARILEDFLAFMKGLISFPLYIPGTPYAKAVRARERISSTVKGIIKERRSAGSWNKQGDFLDVLLSSNELSDEEKVSFVLDSLLGGYETTSLLISMVVYFLGQSAQDLDLVKREHDSIRSNKGKEECLTSEDYKKMEYTQQVINEALRCGNIVKFVHRKALKDVKYKEYLIPSGWKVLPVFTAVHLNPSLHGDAQQFQPCRWEGTSQGTSKRFTPFGGGPRLCPGSELAKVETAFFLHHLVLNYRWRIDGDDIPMAYPYVEFQRGLPIEIEPTSPES

SEQ ID NO: 18994 - protein, 479 aa, Zea mays subsp. mays
  peptide (1)..(479): Ceres Seq. ID no. 12369729
  misc_feature (38)..(472): Homolog of NCBI NO: 34902330 NR Description: Putative steroid 22-alpha-hydroxylase
  misc_feature (316)..(475): Homolog of NCBI NO: 11357546 NR Description: hypothetical protein F18O22.190 - Arabidopsis
  misc_feature (43)..(276): Homolog of NCBI NO: 11357546 NR Description: hypothetical protein F18O22.190 - Arabidopsis
  misc_feature (261)..(472): Homolog of NCBI NO: 15229822 NR Description: steroid 22-alpha-hydroxylase (DWF4)
  misc_feature (261)..(472): Homolog of NCBI NO: 2935342 NR Description: steroid 22-alpha-hydroxylase; DWF4; CYP90B1
  misc_feature (2)..(251): Homolog of NCBI NO: 15229822 NR Description: steroid 22-alpha-hydroxylase (DWF4)
  misc_feature (2)..(251): Homolog of NCBI NO: 2935342 NR Description: steroid 22-alpha-hydroxylase; DWF4; CYP90B1
  misc_feature (43)..(475): Homolog of NCBI NO: 22326806 NR Description: cytochrome p450 family; protein id: At5g14400.1
  misc_feature (2)..(199): Homolog of NCBI NO: 32487441 NR Description: OSJNBa0016O02.25 [Oryza sativa (japonica
  misc_feature (231)..(471): Homolog of NCBI NO: 32487441 NR Description: OSJNBa0016O02.25 [Oryza sativa (japonica
MMMAGEHVLAALATLLLASLLTLVLNHFLPLLLNPKAPRGSFGWPLLGETLRFLTPHASNTLGGFLEDHCSRYGRVFKSHLFCTPTVVSCDQDLNHFILQNEERLFQCSYPRPIHGILGKSSMLVVLGEDHKRLRNLALALVTSTKLKPSYLGDIEKIALHVVGAWRRHGGVRVVAFCEEARKFAFSVIVKQVLGLSPEEPVTARILEDFLAFMKGLISFPLYIPGTPYAKAVRARERISSTVKGIIKERRSAGSWNKQGDFLDVLLSSNELSDEEKVSFVLDSLLGGYETTSLLISMVVYFLGQSAQDLDLVKREHDSIRSNKGKEECLTSEDYKKMEYTQQVINEALRCGNIVKFVHRKALKDVKYKEYLIPSGWKVLPVFTAVHLNPSLHGDAQQFQPCRWEGTSQGTSKRFTPFGGGPRLCPGSELAKVETAFFLHHLVLNYRWRIDGDDIPMAYPYVEFQRGLPIEIEPTSPES

SEQ ID NO: 18995 - DNA, 468 bp, Zea mays subsp. mays
  misc_feature (1)..(468): Ceres Seq. ID no. 1847474
  misc_feature: MA Experiment ID: 20000534 Result: Up-regulated in Transcription
  misc_feature: MA Experiment 20000534 PARAMETER Experiment Name: Zm_Hybrid_Pollen_P Parameter: Age (day) Value: 8
  misc_feature: MA Experiment 20000534 PARAMETER Experiment Name: Zm_Hybrid_Pollen_P Parameter: Organism Value: Zea mays
  misc_feature: MA Experiment 20000534 PARAMETER Experiment Name: Zm_Hybrid_Pollen_P Parameter: Plant Line Value: 35A19
  misc_feature: MA Experiment 20000534 PARAMETER Experiment Name: Zm_Hybrid_Pollen_P Parameter: Tissue Value: Pollen vs. Aerial
gttgttttgttcttgcggagacgagacgagacgaggcgacgcgassnyaggagtcgaggaggatcggggctcaggtggtacaaacaaaggagcgtcaggggttgagggggaggggcaagatgaacaggaagccaggagactgggactgcagggcgtgccagcacctcaacttcagccgccgagacatatgccagcgctgcagcgagccacgtggagttgctgatcgtggcggcggaggaggaggaggcgactacgcaagcttcggtggccgcggtggctcctccttcggcggcggctttggcgctgctggctctgacgtccggcctggtgactggtactgctcctgcggcgcgcacaacttcgccagccgctccagctgcttcaagtgctccgcctacaaggaggaggccgctgtgaacagtggcgctggcggctttgacggcgacatgtcacgctcacggggctacg

SEQ ID NO: 18996 - protein, 155 aa, Zea mays subsp. mays
  peptide (1)..(155): Ceres Seq. ID no. 1847475
  misc_feature (43)..(70): Pfam Name: Zn-finger in Ran binding protein and others Pfam Description: Zn-finger in Ran binding protein and others
  misc_feature (84)..(135): Homolog of NCBI NO: 15225776 NR Description: putative second messenger-dependent protein kinase
  misc_feature (43)..(111): Homolog of NCBI NO: 27368046 NR Description: zinc finger protein [Gossypium hirsutum]
  misc_feature (42)..(81): Homolog of NCBI NO: 34913970 NR Description: B1110C07.23 [Oryza sativa (japonica
  misc_feature (93)..(145): Homolog of NCBI NO: 34913970 NR Description: B1110C07.23 [Oryza sativa (japonica
  misc_feature (40)..(152): Homolog of NCBI NO: 5803246 NR Description: ESTs AU077984(C62969),D41648(S4289), correspond to a region of the predicted gene.~Similar to putative
  misc_feature (40)..(152): Homolog of NCBI NO: 5679336 NR Description: putative zinc finger protein [Oryza sativa]
  misc_feature (40)..(154): Homolog of NCBI NO: 15239445 NR Description: putative protein; protein id: At5g25490.1
  misc_feature (43)..(153): Homolog of NCBI NO: 21595771 NR Description: putative zinc finger protein [Arabidopsis
  misc_feature (43)..(153): Homolog of NCBI NO: 15232662 NR Description: putative zinc finger protein
  misc_feature (40)..(154): Homolog of NCBI NO: 28849863 NR Description: zinc finger transcription factor ZFP30
  misc_feature (15)..(15): Xaa is any aa, unknown or other
  misc_feature (16)..(16): Xaa is any aa, unknown or other
CFVLAETRRDEATRXXESRRIGAQVVQTKERQGLRGRGKMNRKPGDWDCRACQHLNFSRRDICQRCSEPRGVADRGGGGGGGDYASFGGRGGSSFGGGFGAAGSDVRPGDWYCSCGAHNFASRSSCFKCSAYKEEAAVNSGAGGFDGDMSRSRGY

SEQ ID NO: 18997 - protein, 116 aa, Zea mays subsp. mays
  peptide (1)..(116): Ceres Seq. ID no. 1847476
  misc_feature (4)..(31): Pfam Name: Zn-finger in Ran binding protein and others Pfam Description: Zn-finger in Ran binding protein and others
  misc_feature (45)..(96): Homolog of NCBI NO: 15225776 NR Description: putative second messenger-dependent protein kinase
  misc_feature (4)..(72): Homolog of NCBI NO: 27368046 NR Description: zinc finger protein [Gossypium hirsutum]
  misc_feature (3)..(42): Homolog of NCBI NO: 34913970 NR Description: B1110C07.23 [Oryza sativa (japonica
  misc_feature (54)..(106): Homolog of NCBI NO: 34913970 NR Description: B1110C07.23 [Oryza sativa (japonica
  misc_feature (1)..(113): Homolog of NCBI NO: 5803246 NR Description: ESTs AU077984(C62969),D41648(S4289), correspond to a region of the predicted gene.~Similar to putative
  misc_feature (1)..(113): Homolog of NCBI NO: 5679336 NR Description: putative zinc finger protein [Oryza sativa]
  misc_feature (1)..(115): Homolog of NCBI NO: 15239445 NR Description: putative protein; protein id: At5g25490.1
  misc_feature (4)..(114): Homolog of NCBI NO: 21595771 NR Description: putative zinc finger protein [Arabidopsis
  misc_feature (4)..(114): Homolog of NCBI NO: 15232662 NR Description: putative zinc finger protein
  misc_feature (1)..(115): Homolog of NCBI NO: 28849863 NR Description: zinc finger transcription factor ZFP30
MNRKPGDWDCRACQHLNFSRRDICQRCSEPRGVADRGGGGGGGDYASFGGRGGSSFGGGFGAAGSDVRPGDWYCSCGAHNFASRSSCFKCSAYKEEAAVNSGAGGFDGDMSRSRGY

SEQ ID NO: 18998 - DNA, 1008 bp, Zea mays subsp. mays
  misc_feature (1)..(1008): Ceres Seq. ID no. 12384340
  misc_feature: MA Experiment ID: 20000535 Result: Down-regulated in Transcription
  misc_feature: MA Experiment 20000535 PARAMETER Experiment Name: Zm_Hybrid_Seed_Dev_P Parameter: DAP Value: 30 vs. 12
  misc_feature: MA Experiment 20000535 PARAMETER Experiment Name: Zm_Hybrid_Seed_Dev_P Parameter: Organism Value: Zea mays
  misc_feature: MA Experiment 20000535 PARAMETER Experiment Name: Zm_Hybrid_Seed_Dev_P Parameter: Plant Line Value: 35A19
  misc_feature: MA Experiment 20000535 PARAMETER Experiment Name: Zm_Hybrid_Seed_Dev_P Parameter: Tissue Value: Embryo vs. Unfert Floret
gaagacacaaagctgaaggcgagcgaagcaaagtagtagtagtagtactgccgttcccgtccccgacgcgcctcccgcccgagcccgcacaaccgcgccgcgtcaatcctcatgtggccgtcctgggtgaaggcgcacagctctgacagcgccgccgcctccacctccaccgccctcgtccccgccgcaggcgccggggcgtccccgcgcctctccatccccaacccgtctctcaaggacctccggtcgctgctcgcgccggactccgccgccacagccccgccctccgcctccccgtcgccgcgcgtcttgcaccgcatccgcgtcgccgcctccgcgctccgggccctccgcacgctccaccagcccccgtcccggcctccggcggcgcccgctggcaaggagccggtgccgggcggcgggcgggtggtgctgtacttcacgtccctccgcgtcgtccgcggcacctacgaggactgccgcgcggtgcgcgccatcctgcgcgggctccgcgcggccgtcgacgagcgcgacctctccatggaccccggccacctgcccgagctcgccgcgctcctcccccgcgtggcgctgccccaggtcttcgtcggcggccgccacctcggcggcgccgacgaggtccggcgcctccacgagtccggggagctccgccgcatcgtcgcccccgctcccggccccgcgttctacggcagctgcgcccgctgcggcggcgagcgatacctgctttgcggcgcctgcgacggcagccacaagcggtacagcctcaagggcggcggcgggttccgcgcctgcgccgagtgcaacgagaacgggctcgtccggtgccccgcctgctgcgtacccgtacccgtcgcctgatctagatccacgatccacctggtactggttttctgttttaattattattcaaactctactagctgtactctgtacacaaactgctaaggagcttgatgaggactggaggagaaagctaccactccgtcc

SEQ ID NO: 18999 - protein, 255 aa, Zea mays subsp. mays
  peptide (1)..(255): Ceres Seq. ID no. 12384341
  misc_feature (105)..(190): Pfam Name: Glutaredoxin Pfam Description: Glutaredoxin
  misc_feature (105)..(250): Homolog of NCBI NO: 15227326 NR Description: unknown protein
  misc_feature (3)..(250): Homolog of NCBI NO: 30694571 NR Description: expressed protein [Arabidopsis thaliana]
  misc_feature (3)..(250): Homolog of NCBI NO: 15451042 NR Description: putative protein [Arabidopsis thaliana]
  misc_feature (1)..(251): Homolog of NCBI NO: 15237686 NR Description: putative protein; protein id: At5g58530.1
  misc_feature (100)..(248): Homolog of NCBI NO: 15240723 NR Description: putative protein
  misc_feature (3)..(249): Homolog of NCBI NO: 32490043 NR Description: OSJNBa0063C18.3 [Oryza sativa (japonica
  misc_feature (78)..(249): Homolog of NCBI NO: 34899098 NR Description: hypothetical protein~similar to Arabidopsis
  misc_feature (160)..(249): Homolog of NCBI NO: 19071642 NR Description: hypothetical protein [Oryza sativa (japonica
  misc_feature (1)..(186): Homolog of NCBI NO: 19071642 NR Description: hypothetical protein [Oryza sativa (japonica
  misc_feature (1)..(251): Homolog of NCBI NO: 34907946 NR Description: B1088C09.21 [Oryza sativa (japonica
MWPSWVKAHSSDSAAASTSTALVPAAGAGASPRLSIPNPSLKDLRSLLAPDSAATAPPSASPSPRVLHRIRVAASALRALRTLHQPPSRPPAAPAGKEPVPGGGRVVLYFTSLRVVRGTYEDCRAVRAILRGLRAAVDERDLSMDPGHLPELAALLPRVALPQVFVGGRHLGGADEVRRLHESGELRRIVAPAPGPAFYGSCARCGGERYLLCGACDGSHKRYSLKGGGGFRACAECNENGLVRCPACCVPVPVA

SEQ ID NO: 19000 - DNA, 1681 bp, Zea mays subsp. mays
  misc_feature (1)..(1681): Ceres Seq. ID no. 12381795
  misc_feature: MA Experiment ID: 108527 Result: Down-regulated in Transcription
  misc_feature: MA Experiment 108527 PARAMETER Experiment Name: Zm_5mM_NO_P Parameter: Age (day) Value: 8
  misc_feature: MA Experiment 108527 PARAMETER Experiment Name: Zm_5mM_NO_P Parameter: Organism Value: Zea mays
  misc_feature: MA Experiment 108527 PARAMETER Experiment Name: Zm_5mM_NO_P Parameter: Plant Line Value: 35A19
  misc_feature: MA Experiment 108527 PARAMETER Experiment Name: Zm_5mM_NO_P Parameter: Timepoint (hr) Value: 6
  misc_feature: MA Experiment 108527 PARAMETER Experiment Name: Zm_5mM_NO_P Parameter: Tissue Value: Aerial
  misc_feature: MA Experiment 108527 PARAMETER Experiment Name: Zm_5mM_NO_P Parameter: Treatment Value: 5mM NO vs. No Treatment
  misc_feature: MA Experiment ID: 108535 Result: Down-regulated in Transcription
  misc_feature: MA Experiment 108535 PARAMETER Experiment Name: Zm_Meristem_P Parameter: Age (day) Value: 8
  misc_feature: MA Experiment 108535 PARAMETER Experiment Name: Zm_Meristem_P Parameter: Organism Value: Zea mays
  misc_feature: MA Experiment 108535 PARAMETER Experiment Name: Zm_Meristem_P Parameter: Plant Line Value: 35A19
  misc_feature: MA Experiment 108535 PARAMETER Experiment Name: Zm_Meristem_P Parameter: Tissue Value: Root Meristem vs. Above Root Meristem
  misc_feature: MA Experiment ID: 108540 Result: Down-regulated in Transcription
  misc_feature: MA Experiment 108540 PARAMETER Experiment Name: Zm_20percent_PEG_P Parameter: Age (day) Value: 8
  misc_feature: MA Experiment 108540 PARAMETER Experiment Name: Zm_20percent_PEG_P Parameter: Organism Value: Zea mays
  misc_feature: MA Experiment 108540 PARAMETER Experiment Name: Zm_20percent_PEG_P Parameter: Plant Line Value: 35A19
  misc_feature: MA Experiment 108540 PARAMETER Experiment Name: Zm_20percent_PEG_P Parameter: Timepoint (hr) Value: 6
  misc_feature: MA Experiment 108540 PARAMETER Experiment Name: Zm_20percent_PEG_P Parameter: Tissue Value: Aerial
  misc_feature: MA Experiment 108540 PARAMETER Experiment Name: Zm_20percent_PEG_P Parameter: Treatment Value: 20percent PEG vs. No Treatment
  misc_feature: MA Experiment ID: 108556 Result: Down-regulated in Transcription
  misc_feature: MA Experiment 108556 PARAMETER Experiment Name: Zm_Drought_P Parameter: Age (day) Value: 9
  misc_feature: MA Experiment 108556 PARAMETER Experiment Name: Zm_Drought_P Parameter: Organism Value: Zea mays
  misc_feature: MA Experiment 108556 PARAMETER Experiment Name: Zm_Drought_P Parameter: Plant Line Value: 35A19
  misc_feature: MA Experiment 108556 PARAMETER Experiment Name: Zm_Drought_P Parameter: Timepoint (hr) Value: 24
  misc_feature: MA Experiment 108556 PARAMETER Experiment Name: Zm_Drought_P Parameter: Tissue Value: Aerial
  misc_feature: MA Experiment 108556 PARAMETER Experiment Name: Zm_Drought_P Parameter: Treatment Value: Drought vs. No Drought
  misc_feature: MA Experiment ID: 108559 Result: Down-regulated in Transcription
  misc_feature: MA Experiment 108559 PARAMETER Experiment Name: Zm_5mM_NO_P Parameter: Age (day) Value: 8
  misc_feature: MA Experiment 108559 PARAMETER Experiment Name: Zm_5mM_NO_P Parameter: Organism Value: Zea mays
  misc_feature: MA Experiment 108559 PARAMETER Experiment Name: Zm_5mM_NO_P Parameter: Plant Line Value: 35A19
  misc_feature: MA Experiment 108559 PARAMETER Experiment Name: Zm_5mM_NO_P Parameter: Timepoint (hr) Value: 12
  misc_feature: MA Experiment 108559 PARAMETER Experiment Name: Zm_5mM_NO_P Parameter: Tissue Value: Aerial
  misc_feature: MA Experiment 108559 PARAMETER Experiment Name: Zm_5mM_NO_P Parameter: Treatment Value: 5mM NO vs. No Treatment
  misc_feature: MA Experiment ID: 108597 Result: Down-regulated in Transcription
  misc_feature: MA Experiment 108597 PARAMETER Experiment Name: Zm_100uM_ABA_P Parameter: Age (day) Value: 9
  misc_feature: MA Experiment 108597 PARAMETER Experiment Name: Zm_100uM_ABA_P Parameter: Organism Value: Zea mays
  misc_feature: MA Experiment 108597 PARAMETER Experiment Name: Zm_100uM_ABA_P Parameter: Plant Line Value: 35A19
  misc_feature: MA Experiment 108597 PARAMETER Experiment Name: Zm_100uM_ABA_P Parameter: Timepoint (hr) Value: 24
  misc_feature: MA Experiment 108597 PARAMETER Experiment Name: Zm_100uM_ABA_P Parameter: Tissue Value: Aerial
  misc_feature: MA Experiment 108597 PARAMETER Experiment Name: Zm_100uM_ABA_P Parameter: Treatment Value: 100uM ABA vs. No Treatment
  misc_feature: MA Experiment ID: 108689 Result: Down-regulated in Transcription
  misc_feature: MA Experiment 108689 PARAMETER Experiment Name: Zm_Drought_Roots_P Parameter: Age (day) Value: 9
  misc_feature: MA Experiment 108689 PARAMETER Experiment Name: Zm_Drought_Roots_P Parameter: Organism Value: Zea mays
  misc_feature: MA Experiment 108689 PARAMETER Experiment Name: Zm_Drought_Roots_P Parameter: Plant Line Value: 35A19
  misc_feature: MA Experiment 108689 PARAMETER Experiment Name: Zm_Drought_Roots_P Parameter: Timepoint (hr) Value: 24
  misc_feature: MA Experiment 108689 PARAMETER Experiment Name: Zm_Drought_Roots_P Parameter: Tissue Value: Roots
  misc_feature: MA Experiment 108689 PARAMETER Experiment Name: Zm_Drought_Roots_P Parameter: Treatment Value: Drought vs. No Drought
  misc_feature: MA Experiment ID: 20000108 Result: Down-regulated in Transcription
  misc_feature: MA Experiment 20000108 PARAMETER Experiment Name: Zm_Root-Tips_P Parameter: Age (day) Value: 12
  misc_feature: MA Experiment 20000108 PARAMETER Experiment Name: Zm_Root-Tips_P Parameter: Organism Value: Zea mays
  misc_feature: MA Experiment 20000108 PARAMETER Experiment Name: Zm_Root-Tips_P Parameter: Tissue Value: Root tips vs. Root mid region    35
  misc_feature: MA Experiment 20000108 PARAMETER Experiment Name: Zm_Root-Tips_P Parameter: Tissue Value: Root tips vs. Root mid region   Sequence Listing-Misc Features (4)
  misc_feature: MA Experiment ID: 20000477 Result: Down-regulated in Transcription
  misc_feature: MA Experiment 20000477 PARAMETER Experiment Name: Zm_5mM_SA_P Parameter: Age (day) Value: 10
  misc_feature: MA Experiment 20000477 PARAMETER Experiment Name: Zm_5mM_SA_P Parameter: Organism Value: Zea mays
  misc_feature: MA Experiment 20000477 PARAMETER Experiment Name: Zm_5mM_SA_P Parameter: Plant Line Value: 35A19
  misc_feature: MA Experiment 20000477 PARAMETER Experiment Name: Zm_5mM_SA_P Parameter: Timepoint (hr) Value: 48
  misc_feature: MA Experiment 20000477 PARAMETER Experiment Name: Zm_5mM_SA_P Parameter: Tissue Value: Aerial
  misc_feature: MA Experiment 20000477 PARAMETER Experiment Name: Zm_5mM_SA_P Parameter: Treatment Value: 5mM SA vs. No Treatment
  misc_feature: MA Experiment ID: 20000478 Result: Down-regulated in Transcription
  misc_feature: MA Experiment 20000478 PARAMETER Experiment Name: Zm_5mM_SA_P Parameter: Age (day) Value: 11
  misc_feature: MA Experiment 20000478 PARAMETER Experiment Name: Zm_5mM_SA_P Parameter: Organism Value: Zea mays
  misc_feature: MA Experiment 20000478 PARAMETER Experiment Name: Zm_5mM_SA_P Parameter: Plant Line Value: 35A19
  misc_feature: MA Experiment 20000478 PARAMETER Experiment Name: Zm_5mM_SA_P Parameter: Timepoint (hr) Value: 72
  misc_feature: MA Experiment 20000478 PARAMETER Experiment Name: Zm_5mM_SA_P Parameter: Tissue Value: Aerial
  misc_feature: MA Experiment 20000478 PARAMETER Experiment Name: Zm_5mM_SA_P Parameter: Treatment Value: 5mM SA vs. No Treatment
  misc_feature: MA Experiment ID: 20000479 Result: Down-regulated in Transcription
  misc_feature: MA Experiment 20000479 PARAMETER Experiment Name: Zm_Drought_P Parameter: Age (day) Value: 10
  misc_feature: MA Experiment 20000479 PARAMETER Experiment Name: Zm_Drought_P Parameter: Organism Value: Zea mays
  misc_feature: MA Experiment 20000479 PARAMETER Experiment Name: Zm_Drought_P Parameter: Plant Line Value: 35A19
  misc_feature: MA Experiment 20000479 PARAMETER Experiment Name: Zm_Drought_P Parameter: Timepoint (hr) Value: 48
  misc_feature: MA Experiment 20000479 PARAMETER Experiment Name: Zm_Drought_P Parameter: Tissue Value: Aerial
  misc_feature: MA Experiment 20000479 PARAMETER Experiment Name: Zm_Drought_P Parameter: Treatment Value: Drought vs. No Drought
  misc_feature: MA Experiment ID: 20000480 Result: Down-regulated in Transcription
  misc_feature: MA Experiment 20000480 PARAMETER Experiment Name: Zm_Drought_P Parameter: Age (day) Value: 11
  misc_feature: MA Experiment 20000480 PARAMETER Experiment Name: Zm_Drought_P Parameter: Organism Value: Zea mays
  misc_feature: MA Experiment 20000480 PARAMETER Experiment Name: Zm_Drought_P Parameter: Plant Line Value: 35A19
  misc_feature: MA Experiment 20000480 PARAMETER Experiment Name: Zm_Drought_P Parameter: Timepoint (hr) Value: 72
  misc_feature: MA Experiment 20000480 PARAMETER Experiment Name: Zm_Drought_P Parameter: Tissue Value: Aerial
  misc_feature: MA Experiment 20000480 PARAMETER Experiment Name: Zm_Drought_P Parameter: Treatment Value: Drought vs. No Drought
  misc_feature: MA Experiment ID: 20000487 Result: Down-regulated in Transcription
  misc_feature: MA Experiment 20000487 PARAMETER Experiment Name: Zm_50mM_NH4NO3_L_to_H_P Parameter: Organism Value: Zea mays
  misc_feature: MA Experiment 20000487 PARAMETER Experiment Name: Zm_50mM_NH4NO3_L_to_H_P Parameter: Timepoint (hr) Value: 4
  misc_feature: MA Experiment 20000487 PARAMETER Experiment Name: Zm_50mM_NH4NO3_L_to_H_P Parameter: Tissue Value: Leaves
  misc_feature: MA Experiment 20000487 PARAMETER Experiment Name: Zm_50mM_NH4NO3_L_to_H_P Parameter: Treatment Value: 50mM NH4NO3 vs. 100mM Mannitol
  misc_feature: MA Experiment ID: 20000535 Result: Down-regulated in Transcription
  misc_feature: MA Experiment 20000535 PARAMETER Experiment Name: Zm_Hybrid_Seed_Dev_P Parameter: DAP Value: 30 vs. 12
  misc_feature: MA Experiment 20000535 PARAMETER Experiment Name: Zm_Hybrid_Seed_Dev_P Parameter: Organism Value: Zea mays
  misc_feature: MA Experiment 20000535 PARAMETER Experiment Name: Zm_Hybrid_Seed_Dev_P Parameter: Plant Line Value: 35A19
  misc_feature: MA Experiment 20000535 PARAMETER Experiment Name: Zm_Hybrid_Seed_Dev_P Parameter: Tissue Value: Embryo vs. Unfert Floret
taataaaggaggcacatcgataggttctttatctggaagtagcagcataagtaattcttccggtcctggtggggatgattcacatctttggcctcagttgccagcttgggagatactggaggctgttccatttgtggttgatgctgctcttactgcttgttcccatggaagactatttccacgtgaactggccacaggcctgaaggatctggctgatttcctccctgcatctcttgctacaatagtaagctacttttccgctgaggtgacgcggggtgtctggaagcctgcatccatgaatggatcagattggcctagcccctctgtgaacctatccatggttgatgagcacatcaagaaaatcgtagctgctaccggtgttgatgttccaaagctagttacaggaggaagctcttcaggtacacttccgttaccattggctgctttcgtgagcctcacaatcacatacaagcttgacaaggcatcagagtgtttcctcaaccttgctggtccagctctagagaacctggctgcaagctgcccttggccaagcatggcaatcgttgcagcactgtggacccagaaggtgaagcgatggagcgatttcctaatattttcagcttcgcgcactgtgttccaccacaacaacgacgcagtcgtccagctcctccgaagctgcttcgccgctacccttggcatgtcttcgacatcagtatgcagctgtggaggtgtcgccagccttctgggcccacgggtactgccctggtggtttctcgccagttgcgccaggaatcctctacctccggatattccggtgcatcaaggactgctccatactcgccgaggacatactctcccttctgatgctctcagtgaaggatatcgcagaaacaactgtgcccagacaaaggtcagacaagctaaagaagaccaagtacgggatgaggcatggccaggtatctctttccgctgcaatgacgcaggtgaaggtggcggcatcgctgggggcgacactcgtctggctatccggcggcacggctctcgtccagtccctgatccaggagatgctgccgtcttggttcctgtccgcgcagaacctggatcagggcggggctagcggaggcgtggtgtacaagctgggcgggcacgcgttggcctacttcgcggtgtactcggggatgttggcctggggcatcgaccagacgcccgtgtcccggcgccgcgagagggtcatgcggtcgcacctggggttcctggcgagcgcgctggccgggaagatcttcctcggctgcgacctctccctgtggcgagcctacgtctctgggttcctaggactggtggttgaatgcaccccgtgctgggtgcaggaggtggacctgagggtgctcaagcgcctgagcagcggcctccggcactggggcgaggatgagctcgcggtggcgctcctccgccgcgccggtcccgaggctatgggcacagccgcggagatgatcttgggcagggagttgtgacgccgatgcgcgcgcgcgccgcgcggcgtatgctgttcgtcagcgatgatgcagtttttgtatataatcggttaaaatctggccatgtgtatgctcacgggtaatatttgaatgattttatctgtaaaactgttaagacgttttgatctctnnaatactaaccttcatcg

SEQ ID NO: 19001 - protein, 371 aa, Zea mays subsp. mays
  peptide (1)..(371): Ceres Seq. ID no. 12381796
  misc_feature (185)..(313): Homolog of NCBI NO: 34394478 NR Description: unknown protein [Oryza sativa (japonica
  misc_feature (1)..(158): Homolog of NCBI NO: 20197556 NR Description: unknown protein [Arabidopsis thaliana]
  misc_feature (1)..(252): Homolog of NCBI NO: 33146668 NR Description: unknown protein [Oryza sativa (japonica
  misc_feature (1)..(252): Homolog of NCBI NO: 33146669 NR Description: unknown protein [Oryza sativa (japonica
  misc_feature (161)..(249): Homolog of NCBI NO: 1223579 NR Description: cDNA101 [Arabidopsis thaliana]
  misc_feature (13)..(249): Homolog of NCBI NO: 26449340 NR Description: unknown protein [Arabidopsis thaliana]
  misc_feature (13)..(249): Homolog of NCBI NO: 15229478 NR Description: unknown protein; protein id: At3g23590.1
  misc_feature (1)..(249): Homolog of NCBI NO: 18407529 NR Description: unknown protein; protein id: At2g48110.1
  misc_feature (1)..(249): Homolog of NCBI NO: 25370851 NR Description: hypothetical protein At2g48110 [imported] -
NKGGTSIGSLSGSSSISNSSGPGGDDSHLWPQLPAWEILEAVPFVVDAALTACSHGRLFPRELATGLKDLADFLPASLATIVSYFSAEVTRGVWKPASMNGSDWPSPSVNLSMVDEHIKKIVAATGVDVPKLVTGGSSSGTLPLPLAAFVSLTITYKLDKASECFLNLAGPALENLAASCPWPSMAIVAALWTQKVKRWSDFLIFSASRTVFHHNNDAVVQLLRSCFAATLGMSSTSVCSCGGVASLLGPRVLPWWFLASCARNPLPPDIPVHQGLLHTRRGHTLPSDALSEGYRRNNCAQTKVRQAKEDQVRDEAWPGISFRCNDAGEGGGIAGGDTRLAIRRHGSRPVPDPGDAAVLVPVRAEPGSGRG

SEQ ID NO: 19002 - protein, 273 aa, Zea mays subsp. mays
  peptide (1)..(273): Ceres Seq. ID no. 12381797
  misc_feature (87)..(215): Homolog of NCBI NO: 34394478 NR Description: unknown protein [Oryza sativa (japonica
  misc_feature (1)..(60): Homolog of NCBI NO: 20197556 NR Description: unknown protein [Arabidopsis thaliana]
  misc_feature (1)..(154): Homolog of NCBI NO: 33146668 NR Description: unknown protein [Oryza sativa (japonica
  misc_feature (1)..(154): Homolog of NCBI NO: 33146669 NR Description: unknown protein [Oryza sativa (japonica
  misc_feature (63)..(151): Homolog of NCBI NO: 1223579 NR Description: cDNA101 [Arabidopsis thaliana]
  misc_feature (1)..(151): Homolog of NCBI NO: 26449340 NR Description: unknown protein [Arabidopsis thaliana]
  misc_feature (1)..(151): Homolog of NCBI NO: 15229478 NR Description: unknown protein; protein id: At3g23590.1
  misc_feature (1)..(151): Homolog of NCBI NO: 18407529 NR Description: unknown protein; protein id: At2g48110.1
  misc_feature (1)..(151): Homolog of NCBI NO: 25370851 NR Description: hypothetical protein At2g48110 [imported] -
MNGSDWPSPSVNLSMVDEHIKKIVAATGVDVPKLVTGGSSSGTLPLPLAAFVSLTITYKLDKASECFLNLAGPALENLAASCPWPSMAIVAALWTQKVKRWSDFLIFSASRTVFHHNNDAVVQLLRSCFAATLGMSSTSVCSCGGVASLLGPRVLPWWFLASCARNPLPPDIPVHQGLLHTRRGHTLPSDALSEGYRRNNCAQTKVRQAKEDQVRDEAWPGISFRCNDAGEGGGIAGGDTRLAIRRHGSRPVPDPGDAAVLVPVRAEPGSGRG

SEQ ID NO: 19003 - protein, 259 aa, Zea mays subsp. mays
  peptide (1)..(259): Ceres Seq. ID no. 12381798
  misc_feature (73)..(201): Homolog of NCBI NO: 34394478 NR Description: unknown protein [Oryza sativa (japonica
  misc_feature (1)..(46): Homolog of NCBI NO: 20197556 NR Description: unknown protein [Arabidopsis thaliana]
  misc_feature (1)..(140): Homolog of NCBI NO: 33146668 NR Description: unknown protein [Oryza sativa (japonica
  misc_feature (1)..(140): Homolog of NCBI NO: 33146669 NR Description: unknown protein [Oryza sativa (japonica
  misc_feature (49)..(137): Homolog of NCBI NO: 1223579 NR Description: cDNA101 [Arabidopsis thaliana]
  misc_feature (1)..(137): Homolog of NCBI NO: 26449340 NR Description: unknown protein [Arabidopsis thaliana]
  misc_feature (1)..(137): Homolog of NCBI NO: 15229478 NR Description: unknown protein; protein id: At3g23590.1
  misc_feature (1)..(137): Homolog of NCBI NO: 18407529 NR Description: unknown protein; protein id: At2g48110.1
  misc_feature (1)..(137): Homolog of NCBI NO: 25370851 NR Description: hypothetical protein At2g48110 [imported] -
MVDEHIKKIVAATGVDVPKLVTGGSSSGTLPLPLAAFVSLTITYKLDKASECFLNLAGPALENLAASCPWPSMAIVAALWTQKVKRWSDFLIFSASRTVFHHNNDAVVQLLRSCFAATLGMSSTSVCSCGGVASLLGPRVLPWWFLASCARNPLPPDIPVHQGLLHTRRGHTLPSDALSEGYRRNNCAQTKVRQAKEDQVRDEAWPGISFRCNDAGEGGGIAGGDTRLAIRRHGSRPVPDPGDAAVLVPVRAEPGSGRG

SEQ ID NO: 19004 - DNA, 2573 bp, Zea mays subsp. mays
  misc_feature (1)..(2573): Ceres Seq. ID no. 12387940
  misc_feature: MA Experiment ID: 108535 Result: Up-regulated in Transcription
  misc_feature: MA Experiment 108535 PARAMETER Experiment Name: Zm_Meristem_P Parameter: Age (day) Value: 8
  misc_feature: MA Experiment 108535 PARAMETER Experiment Name: Zm_Meristem_P Parameter: Organism Value: Zea mays
  misc_feature: MA Experiment 108535 PARAMETER Experiment Name: Zm_Meristem_P Parameter: Plant Line Value: 35A19
  misc_feature: MA Experiment 108535 PARAMETER Experiment Name: Zm_Meristem_P Parameter: Tissue Value: Root Meristem vs. Above Root Meristem
gcacgagaccattacctagaacatcctaatcaaaaagtgctagggtttcccccgtcttatcgcttcctcgttcccgcagccgccgcccaaaccctagcaaacccgtcctccgccatggccgacgaccactactcgtccaagcggaagtacgacgacccctcgccgccgccgcggcgcacggggttctcttctggcccgccgcctgcctcgccgcccgctggcggcgccccgtcgtacaacagcgttgcgccgccccccgatgagatccagctcgcgaagcagcgtgcgcaggagatcgcggcgcggatctttaacgccgcagaggccaagcgccctcgcgtcgacaacggcgacgatgacgtcggcggcttcggtggaggaagttccctgggtggcagcggtggtggtggtggtggccgcatcgggggcgcaggacttggcttctcgtcctctgccggtggtgggcatggggcttctatcccaccgttatcttctcagagcagtgcaccacagtactcatatggtggacatcagggtacaagcaaaaagattgaaattccaaatggaagggttggtgttattattggaaaagctggggaaactattaggtatatccaacttcaatcaggagcaaagattcaagttacgagagaccatgaagctgaacctggtgcactgacaaggcaagttgagctttctggcaatcctgagcagataagcaaagctgaacagttgatcaaagaagttatagcagaggctgatgctgggtcatccggtgctgtatctggtggccggaaatacaatgcaccacagccaggcgctgagacattccagatgaaaattgctaataataaggtgggattgattattgggaagggtggtgagaccataaagtctatgcaggccaaatctggagcccgcattcaggttattcctttgcatctgcctgctggtgatacttcaactgaaagaactgtgcatattgatggcactcaagaacaaattgaacatgcaaagcagctggtggctgaggttaccagtgagaatcgtgccaggaatccaatgtctggtggctattctcagcagggctatcaccctcctcgtcctcagtcaaactggggcccgccttctgcgccaccccagcagtctggttatggttatatgcagcctggggcttatcctggggcaccgccacagtatggtgcacctcagcaaccttatggtagctatcccccaacatctggtggctatcagactgggtgggatcagtctcaaaaccagcaatctcatacaactccccctggtactgggtatgattattatagccagcagcagcaacctcaacaacaacaatctgcccctgggactgctgcttctactgatgccactagctacaattatggccagccttcaacatatgcttcacaaggatatgattctacctatactcagcatagtggtgggcagcaagcatatggacatgatggctactctggttaccagacccaaggccagcagcagggctactctcagcagactggttatgaccagcagggatatggtgcatctgcttatggatcagctgcgaactcgacccaggatgggtccagctatggtggtcctggtggggccacccaggcatctccggggcagcaaacttcaaccccagctgctggaagccaccctggctatgccagtcaaccgcctactagtgctgcagcaagctatccagttcaaggttcagctccatctggatatggtgctccaccaccccagcctggctatggcacccaacctccacagcaaggtggatatggtccgggcgcttatgggcagccttctccacacggcgagaaacctcctgcatcttcaccttatggacaagctccgcctcctggatctgctcagggtgttatgtgcagtatggttacagccaacctgcatacggtgcaccaccagcttaccctggtgcacccactgcaagccacccgggctatggccaacagcagtcttatggcgatgcttatggtagtggaagctatgggcagcctacagcctacactactgaagcagcagctcctgctgcatcccaggatcactctgccgcacctgccgcggcccctggaacaacagctgcgccagctcctgacaacaatgggggtgccaaaacttctgcggaaacttgatcttcaacagctaattgggaacaaactttttacaagcctctgttgtgtcgtttcctccactgttgcttaatattacacatctagtttaggctccacatctacaggttatatctttctgcctgttgttttgaccccatgaatcgctctttccgtgctgttgattagtactttgttgtttttttattgctggttagatgtttggactggtgatatatgtgtttgtgcggttactcttgttggactctaatgggtacctaccggcttggtctggacatatactgtcctatatttgtttttagcctccttttacattggttattatgtgtgctgtacaactgtcggacgtttccataagnnggtgatagttatggatgaaaatttggttcc

SEQ ID NO: 19005 - protein, 751 aa, Zea mays subsp. mays
  peptide (1)..(751): Ceres Seq. ID no. 12387941
  misc_feature (330)..(636): Pfam Name: High molecular weight glutenin subunit Pfam Description: High molecular weight glutenin subunit
  misc_feature (123)..(627): Homolog of NCBI NO: 33589386 NR Description: RE39441p [Drosophila melanogaster]
  misc_feature (123)..(627): Homolog of NCBI NO: 24663043 NR Description: pericardine CG5700-PB
  misc_feature (174)..(562): Homolog of NCBI NO: 39794540 NR Description: Unknown (protein for MGC:75632) [Silurana
  misc_feature (174)..(562): Homolog of NCBI NO: 28278093 NR Description: Similar to far upstream element (FUSE) binding
  misc_feature (178)..(345): Homolog of NCBI NO: 15217613 NR Description: KH domain protein; protein id: At1g33680.1
  misc_feature (175)..(551): Homolog of NCBI NO: 40555849 NR Description: Unknown (protein for MGC:66046) [Danio rerio]
  misc_feature (178)..(345): Homolog of NCBI NO: 25511683 NR Description: F14M2.18 protein - Arabidopsis thaliana
  misc_feature (171)..(635): Homolog of NCBI NO: 22328551 NR Description: KH domain protein; protein id: At4g10070.1
  misc_feature (171)..(635): Homolog of NCBI NO: 7487735 NR Description: hypothetical protein T5L19.200 - Arabidopsis
  misc_feature (37)..(637): Homolog of NCBI NO: 15225229 NR Description: KH domain protein
ARDHYLEHPNQKVLGFPPSYRFLVPAAAAQTLANPSSAMADDHYSSKRKYDDPSPPPRRTGFSSGPPPASPPAGGAPSYNSVAPPPDEIQLAKQRAQEIAARIFNAAEAKRPRVDNGDDDVGGFGGGSSLGGSGGGGGGRIGGAGLGFSSSAGGGHGASIPPLSSQSSAPQYSYGGHQGTSKKIEIPNGRVGVIIGKAGETIRYIQLQSGAKIQVTRDHEAEPGALTRQVELSGNPEQISKAEQLIKEVIAEADAGSSGAVSGGRKYNAPQPGAETFQMKIANNKVGLIIGKGGETIKSMQAKSGARIQVIPLHLPAGDTSTERTVHIDGTQEQIEHAKQLVAEVTSENRARNPMSGGYSQQGYHPPRPQSNWGPPSAPPQQSGYGYMQPGAYPGAPPQYGAPQQPYGSYPPTSGGYQTGWDQSQNQQSHTTPPGTGYDYYSQQQQPQQQQSAPGTAASTDATSYNYGQPSTYASQGYDSTYTQHSGGQQAYGHDGYSGYQTQGQQQGYSQQTGYDQQGYGASAYGSAANSTQDGSSYGGPGGATQASPGQQTSTPAAGSHPGYASQPPTSAAASYPVQGSAPSGYGAPPPQPGYGTQPPQQGGYGPGAYGQPSPHGEKPPASSPYGQAPPPGSAQGVMCSMVTANLHTVHHQLTLVHPLQATRAMANSSLMAMLMVVEAMGSLQPTLLKQQLLLHPRITLPHLPRPLEQQLRQLLTTMGVPKLLRKLDLQQLIGNKLFTSLCCVVSSTVA

SEQ ID NO: 19006 - protein, 713 aa, Zea mays subsp. mays
  peptide (1)..(713): Ceres Seq. ID no. 12387942
  misc_feature (292)..(598): Pfam Name: High molecular weight glutenin subunit Pfam Description: High molecular weight glutenin subunit
  misc_feature (85)..(589): Homolog of NCBI NO: 33589386 NR Description: RE39441p [Drosophila melanogaster]
  misc_feature (85)..(589): Homolog of NCBI NO: 24663043 NR Description: pericardine CG5700-PB
  misc_feature (136)..(524): Homolog of NCBI NO: 39794540 NR Description: Unknown (protein for MGC:75632) [Silurana
  misc_feature (136)..(524): Homolog of NCBI NO: 28278093 NR Description: Similar to far upstream element (FUSE) binding
  misc_feature (140)..(307): Homolog of NCBI NO: 15217613 NR Description: KH domain protein; protein id: At1g33680.1
  misc_feature (137)..(513): Homolog of NCBI NO: 40555849 NR Description: Unknown (protein for MGC:66046) [Danio rerio]
  misc_feature (140)..(307): Homolog of NCBI NO: 25511683 NR Description: F14M2.18 protein - Arabidopsis thaliana
  misc_feature (133)..(597): Homolog of NCBI NO: 22328551 NR Description: KH domain protein; protein id: At4g10070.1
  misc_feature (133)..(597): Homolog of NCBI NO: 7487735 NR Description: hypothetical protein T5L19.200 - Arabidopsis
  misc_feature (1)..(599): Homolog of NCBI NO: 15225229 NR Description: KH domain protein
MADDHYSSKRKYDDPSPPPRRTGFSSGPPPASPPAGGAPSYNSVAPPPDEIQLAKQRAQEIAARIFNAAEAKRPRVDNGDDDVGGFGGGSSLGGSGGGGGGRIGGAGLGFSSSAGGGHGASIPPLSSQSSAPQYSYGGHQGTSKKIEIPNGRVGVIIGKAGETIRYIQLQSGAKIQVTRDHEAEPGALTRQVELSGNPEQISKAEQLIKEVIAEADAGSSGAVSGGRKYNAPQPGAETFQMKIANNKVGLIIGKGGETIKSMQAKSGARIQVIPLHLPAGDTSTERTVHIDGTQEQIEHAKQLVAEVTSENRARNPMSGGYSQQGYHPPRPQSNWGPPSAPPQQSGYGYMQPGAYPGAPPQYGAPQQPYGSYPPTSGGYQTGWDQSQNQQSHTTPPGTGYDYYSQQQQPQQQQSAPGTAASTDATSYNYGQPSTYASQGYDSTYTQHSGGQQAYGHDGYSGYQTQGQQQGYSQQTGYDQQGYGASAYGSAANSTQDGSSYGGPGGATQASPGQQTSTPAAGSHPGYASQPPTSAAASYPVQGSAPSGYGAPPPQPGYGTQPPQQGGYGPGAYGQPSPHGEKPPASSPYGQAPPPGSAQGVMCSMVTANLHTVHHQLTLVHPLQATRAMANSSLMAMLMVVEAMGSLQPTLLKQQLLLHPRITLPHLPRPLEQQLRQLLTTMGVPKLLRKLDLQQLIGNKLFTSLCCVVSSTVA

SEQ ID NO: 19007 - protein, 473 aa, Zea mays subsp. mays
  peptide (1)..(473): Ceres Seq. ID no. 12387943
  misc_feature (52)..(358): Pfam Name: High molecular weight glutenin subunit Pfam Description: High molecular weight glutenin subunit
  misc_feature (1)..(349): Homolog of NCBI NO: 33589386 NR Description: RE39441p [Drosophila melanogaster]
  misc_feature (1)..(349): Homolog of NCBI NO: 24663043 NR Description: pericardine CG5700-PB
  misc_feature (1)..(284): Homolog of NCBI NO: 39794540 NR Description: Unknown (protein for MGC:75632) [Silurana
  misc_feature (1)..(284): Homolog of NCBI NO: 28278093 NR Description: Similar to far upstream element (FUSE) binding
  misc_feature (1)..(67): Homolog of NCBI NO: 15217613 NR Description: KH domain protein; protein id: At1g33680.1
  misc_feature (1)..(273): Homolog of NCBI NO: 40555849 NR Description: Unknown (protein for MGC:66046) [Danio rerio]
  misc_feature (1)..(67): Homolog of NCBI NO: 25511683 NR Description: F14M2.18 protein - Arabidopsis thaliana
  misc_feature (1)..(357): Homolog of NCBI NO: 22328551 NR Description: KH domain protein; protein id: At4g10070.1
  misc_feature (1)..(357): Homolog of NCBI NO: 7487735 NR Description: hypothetical protein T5L19.200 - Arabidopsis
  misc_feature (1)..(359): Homolog of NCBI NO: 15225229 NR Description: KH domain protein
MKIANNKVGLIIGKGGETIKSMQAKSGARIQVIPLHLPAGDTSTERTVHIDGTQEQIEHAKQLVAEVTSENRARNPMSGGYSQQGYHPPRPQSNWGPPSAPPQQSGYGYMQPGAYPGAPPQYGAPQQPYGSYPPTSGGYQTGWDQSQNQQSHTTPPGTGYDYYSQQQQPQQQQSAPGTAASTDATSYNYGQPSTYASQGYDSTYTQHSGGQQAYGHDGYSGYQTQGQQQGYSQQTGYDQQGYGASAYGSAANSTQDGSSYGGPGGATQASPGQQTSTPAAGSHPGYASQPPTSAAASYPVQGSAPSGYGAPPPQPGYGTQPPQQGGYGPGAYGQPSPHGEKPPASSPYGQAPPPGSAQGVMCSMVTANLHTVHHQLTLVHPLQATRAMANSSLMAMLMVVEAMGSLQPTLLKQQLLLHPRITLPHLPRPLEQQLRQLLTTMGVPKLLRKLDLQQLIGNKLFTSLCCVVSSTVA

SEQ ID NO: 19008 - DNA, 1388 bp, Zea mays subsp. mays
  misc_feature (1)..(1388): Ceres Seq. ID no. 12420175
  misc_feature: MA Experiment ID: 108527 Result: Up-regulated in Transcription
  misc_feature: MA Experiment 108527 PARAMETER Experiment Name: Zm_5mM_NO_P Parameter: Age (day) Value: 8
  misc_feature: MA Experiment 108527 PARAMETER Experiment Name: Zm_5mM_NO_P Parameter: Organism Value: Zea mays
  misc_feature: MA Experiment 108527 PARAMETER Experiment Name: Zm_5mM_NO_P Parameter: Plant Line Value: 35A19
  misc_feature: MA Experiment 108527 PARAMETER Experiment Name: Zm_5mM_NO_P Parameter: Timepoint (hr) Value: 6
  misc_feature: MA Experiment 108527 PARAMETER Experiment Name: Zm_5mM_NO_P Parameter: Tissue Value: Aerial
  misc_feature: MA Experiment 108527 PARAMETER Experiment Name: Zm_5mM_NO_P Parameter: Treatment Value: 5mM NO vs. No Treatment
  misc_feature: MA Experiment ID: 108534 Result: Up-regulated in Transcription
  misc_feature: MA Experiment 108534 PARAMETER Experiment Name: Zm_4deg_Cold_P Parameter: Age (hr) Value: 8
  misc_feature: MA Experiment 108534 PARAMETER Experiment Name: Zm_4deg_Cold_P Parameter: Organism Value: Zea mays
  misc_feature: MA Experiment 108534 PARAMETER Experiment Name: Zm_4deg_Cold_P Parameter: Plant Line Value: 35A19
  misc_feature: MA Experiment 108534 PARAMETER Experiment Name: Zm_4deg_Cold_P Parameter: Temperature (deg C) Value: 4 vs. 22
  misc_feature: MA Experiment 108534 PARAMETER Experiment Name: Zm_4deg_Cold_P Parameter: Timepoint (hr) Value: 6
  misc_feature: MA Experiment 108534 PARAMETER Experiment Name: Zm_4deg_Cold_P Parameter: Tissue Value: Aerial
  misc_feature: MA Experiment ID: 108535 Result: Up-regulated in Transcription
  misc_feature: MA Experiment 108535 PARAMETER Experiment Name: Zm_Meristem_P Parameter: Age (day) Value: 8
  misc_feature: MA Experiment 108535 PARAMETER Experiment Name: Zm_Meristem_P Parameter: Organism Value: Zea mays
  misc_feature: MA Experiment 108535 PARAMETER Experiment Name: Zm_Meristem_P Parameter: Plant Line Value: 35A19
  misc_feature: MA Experiment 108535 PARAMETER Experiment Name: Zm_Meristem_P Parameter: Tissue Value: Root Meristem vs. Above Root Meristem
  misc_feature: MA Experiment ID: 108536 Result: Up-regulated in Transcription
  misc_feature: MA Experiment 108536 PARAMETER Experiment Name: Zm_Meristem_P Parameter: Age (day) Value: 8
  misc_feature: MA Experiment 108536 PARAMETER Experiment Name: Zm_Meristem_P Parameter: Organism Value: Zea mays
  misc_feature: MA Experiment 108536 PARAMETER Experiment Name: Zm_Meristem_P Parameter: Plant Line Value: 35A19
  misc_feature: MA Experiment 108536 PARAMETER Experiment Name: Zm_Meristem_P Parameter: Tissue Value: Shoot Meristem vs. Above Shoot Meristem
  misc_feature: MA Experiment ID: 108545 Result: Down-regulated in Transcription
  misc_feature: MA Experiment 108545 PARAMETER Experiment Name: Zm_Imbibed_Seeds_P Parameter: Age (day) Value: 3 vs. 2
  misc_feature: MA Experiment 108545 PARAMETER Experiment Name: Zm_Imbibed_Seeds_P Parameter: Organism Value: Zea mays
  misc_feature: MA Experiment 108545 PARAMETER Experiment Name: Zm_Imbibed_Seeds_P Parameter: Plant Line Value: 35A19
  misc_feature: MA Experiment 108545 PARAMETER Experiment Name: Zm_Imbibed_Seeds_P Parameter: Tissue Value: Aerial vs. Embryo
  misc_feature: MA Experiment ID: 108687 Result: Up-regulated in Transcription
  misc_feature: MA Experiment 108687 PARAMETER Experiment Name: Zm_Embryos-Flowers__P Parameter: Tissue Value: Embryo vs. Aerial+
  misc_feature: MA Experiment ID: 20000477 Result: Up-regulated in Transcription
  misc_feature: MA Experiment 20000477 PARAMETER Experiment Name: Zm_5mM_SA_P Parameter: Age (day) Value: 10
  misc_feature: MA Experiment 20000477 PARAMETER Experiment Name: Zm_5mM_SA_P Parameter: Organism Value: Zea mays
  misc_feature: MA Experiment 20000477 PARAMETER Experiment Name: Zm_5mM_SA_P Parameter: Plant Line Value: 35A19
  misc_feature: MA Experiment 20000477 PARAMETER Experiment Name: Zm_5mM_SA_P Parameter: Timepoint (hr) Value: 48
  misc_feature: MA Experiment 20000477 PARAMETER Experiment Name: Zm_5mM_SA_P Parameter: Tissue Value: Aerial
  misc_feature: MA Experiment 20000477 PARAMETER Experiment Name: Zm_5mM_SA_P Parameter: Treatment Value: 5mM SA vs. No Treatment
  misc_feature: MA Experiment ID: 20000478 Result: Up-regulated in Transcription
  misc_feature: MA Experiment 20000478 PARAMETER Experiment Name: Zm_5mM_SA_P Parameter: Age (day) Value: 11
  misc_feature: MA Experiment 20000478 PARAMETER Experiment Name: Zm_5mM_SA_P Parameter: Organism Value: Zea mays
  misc_feature: MA Experiment 20000478 PARAMETER Experiment Name: Zm_5mM_SA_P Parameter: Plant Line Value: 35A19
  misc_feature: MA Experiment 20000478 PARAMETER Experiment Name: Zm_5mM_SA_P Parameter: Timepoint (hr) Value: 72
  misc_feature: MA Experiment 20000478 PARAMETER Experiment Name: Zm_5mM_SA_P Parameter: Tissue Value: Aerial
  misc_feature: MA Experiment 20000478 PARAMETER Experiment Name: Zm_5mM_SA_P Parameter: Treatment Value: 5mM SA vs. No Treatment
  misc_feature: MA Experiment ID: 20000479 Result: Up-regulated in Transcription
  misc_feature: MA Experiment 20000479 PARAMETER Experiment Name: Zm_Drought_P Parameter: Age (day) Value: 10
  misc_feature: MA Experiment 20000479 PARAMETER Experiment Name: Zm_Drought_P Parameter: Organism Value: Zea mays
  misc_feature: MA Experiment 20000479 PARAMETER Experiment Name: Zm_Drought_P Parameter: Plant Line Value: 35A19
  misc_feature: MA Experiment 20000479 PARAMETER Experiment Name: Zm_Drought_P Parameter: Timepoint (hr) Value: 48
  misc_feature: MA Experiment 20000479 PARAMETER Experiment Name: Zm_Drought_P Parameter: Tissue Value: Aerial
  misc_feature: MA Experiment 20000479 PARAMETER Experiment Name: Zm_Drought_P Parameter: Treatment Value: Drought vs. No Drought
  misc_feature: MA Experiment ID: 20000480 Result: Up-regulated in Transcription
  misc_feature: MA Experiment 20000480 PARAMETER Experiment Name: Zm_Drought_P Parameter: Age (day) Value: 11
  misc_feature: MA Experiment 20000480 PARAMETER Experiment Name: Zm_Drought_P Parameter: Organism Value: Zea mays
  misc_feature: MA Experiment 20000480 PARAMETER Experiment Name: Zm_Drought_P Parameter: Plant Line Value: 35A19
  misc_feature: MA Experiment 20000480 PARAMETER Experiment Name: Zm_Drought_P Parameter: Timepoint (hr) Value: 72
  misc_feature: MA Experiment 20000480 PARAMETER Experiment Name: Zm_Drought_P Parameter: Tissue Value: Aerial
  misc_feature: MA Experiment 20000480 PARAMETER Experiment Name: Zm_Drought_P Parameter: Treatment Value: Drought vs. No Drought
  misc_feature: MA Experiment ID: 20000627 Result: Up-regulated in Transcription
  misc_feature: MA Experiment 20000627 PARAMETER Experiment Name: Zm_Herbicide-Treatments_P Parameter: Timepoint (hr) Value: 12
  misc_feature: MA Experiment 20000627 PARAMETER Experiment Name: Zm_Herbicide-Treatments_P Parameter: Tissue Value: Aerial
  misc_feature: MA Experiment 20000627 PARAMETER Experiment Name: Zm_Herbicide-Treatments_P Parameter: Treatment Value: Finale vs. No Treatment
gcacgagaccattacctagaacatcctaatcgaaaaataggataggaggtggtaaagagagagagccagaagcgaacgaggaggattcgagatggaggtggtggtgcctgtcatggcgccaagtgcgccgtgcagcccaagaaccgcggccatcgccggcgaccacctcccggcctactgctacttctactccagcgcgccgacgagcccgtccagggcgagctgcgcggggggcgccgccacgacgacgacgccgggctcgggcgacgaggccacgttcgacttcacgctcggcttcagcgggcagctgcaggaggccacgccgaccctcgcggccgccgacgagctcttcgagggcggcaggatccggccgctgaacacgccgcacccgagcattccgctggccgacgacgcctcgagctcctcctattccggtggccctcggtggtccccgagaagagccggcggcgcggatcgtcgggcggaggcgccgttggagagaggcaggtcgggctacagacccgccgcctcgacggcggcggcggcggcggcggcctcgtcgaggagtaggagggccacgcggtctctgtccccgttcagggtcaggggcggcggcggaggaggaggaggcgtggacgacgacgaggagtcccctccgtctccccgaacctntatgatgcggggctgcggcagcggcagcaagaagtggcggctcaaggacctgttcctgttccgcagcgcgtcggagggccgcgccaccaccggcggcggcagcaaggacccgctgttcaagtacaccatgctgtcgtcgtcccagacgctgcggaccggcggcgacggcagcgcgtccatgcgcaaggggagaggctccgcggcgtccgccagcgacatgccgatgccgtacgccgtgccccggggggcggcggcggccgaggacgcgcggcgccggacgacggccaccacgccgctgccgttccaccgcaacagcctcttcggctacctgcgctccaacccggcgatccacagcatcagcaggaagctcgggggcgggggcgggggcggcagcggcagcagcaaccatcccgtaccacccgccgcctccaactccagtagtcgtggcaggccgacatgatccgtccgcataccgcaagcagtcccgaaaccttgacggcgatgcagctcgacgcagaagtggccgccggcggccgtttttatctccccaccccactcctttttgttcccttgtaatttaatttgatgcgtattctttcgtttcatgtgaaccaacaaggtactagtagttagtgtagatatgtacgtacgtacgtacacggcggtatgtatgtatccccaaggatttctttgaagaaagaaaagataattagcgt

SEQ ID NO: 19009 - protein, 346 aa, Zea mays subsp. mays
  peptide (1)..(346): Ceres Seq. ID no. 12420176
  misc_feature (33)..(315): Homolog of NCBI NO: 18397927 NR Description: Calmodulin-binding protein
  misc_feature (1)..(321): Homolog of NCBI NO: 34906768 NR Description: contains EST AU082121(R10455)~similar to
  misc_feature (194)..(194): Xaa is any aa, unknown or other
MEVVVPVMAPSAPCSPRTAAIAGDHLPAYCYFYSSAPTSPSRASCAGGAATTTTPGSGDEATFDFTLGFSGQLQEATPTLAAADELFEGGRIRPLNTPHPSIPLADDASSSSYSGGPRWSPRRAGGADRRAEAPLERGRSGYRPAASTAAAAAAASSRSRRATRSLSPFRVRGGGGGGGGVDDDEESPPSPRTXMMRGCGSGSKKWRLKDLFLFRSASEGRATTGGGSKDPLFKYTMLSSSQTLRTGGDGSASMRKGRGSAASASDMPMPYAVPRGAAAAEDARRRTTATTPLPFHRNSLFGYLRSNPAIHSISRKLGGGGGGGSGSSNHPVPPAASNSSSRGRPT

SEQ ID NO: 19010 - protein, 339 aa, Zea mays subsp. mays
  peptide (1)..(339): Ceres Seq. ID no. 12420177
  misc_feature (26)..(308): Homolog of NCBI NO: 18397927 NR Description: Calmodulin-binding protein
  misc_feature (1)..(314): Homolog of NCBI NO: 34906768 NR Description: contains EST AU082121(R10455)~similar to
  misc_feature (187)..(187): Xaa is any aa, unknown or other
MAPSAPCSPRTAAIAGDHLPAYCYFYSSAPTSPSRASCAGGAATTTTPGSGDEATFDFTLGFSGQLQEATPTLAAADELFEGGRIRPLNTPHPSIPLADDASSSSYSGGPRWSPRRAGGADRRAEAPLERGRSGYRPAASTAAAAAAASSRSRRATRSLSPFRVRGGGGGGGGVDDDEESPPSPRTXMMRGCGSGSKKWRLKDLFLFRSASEGRATTGGGSKDPLFKYTMLSSSQTLRTGGDGSASMRKGRGSAASASDMPMPYAVPRGAAAAEDARRRTTATTPLPFHRNSLFGYLRSNPAIHSISRKLGGGGGGGSGSSNHPVPPAASNSSSRGRPT

SEQ ID NO: 19011 - DNA, 1865 bp, Zea mays subsp. mays
  misc_feature (1)..(1865): Ceres Seq. ID no. 12417373
  misc_feature: MA Experiment ID: 108522 Result: Down-regulated in Transcription
  misc_feature: MA Experiment 108522 PARAMETER Experiment Name: Zm_42deg_Heat_P Parameter: Age (day) Value: 8
  misc_feature: MA Experiment 108522 PARAMETER Experiment Name: Zm_42deg_Heat_P Parameter: Organism Value: Zea mays
  misc_feature: MA Experiment 108522 PARAMETER Experiment Name: Zm_42deg_Heat_P Parameter: Plant Line Value: 35A19
  misc_feature: MA Experiment 108522 PARAMETER Experiment Name: Zm_42deg_Heat_P Parameter: Temperature (deg C) Value: 42 vs. 22
  misc_feature: MA Experiment 108522 PARAMETER Experiment Name: Zm_42deg_Heat_P Parameter: Timepoint (hr) Value: 1
  misc_feature: MA Experiment 108522 PARAMETER Experiment Name: Zm_42deg_Heat_P Parameter: Tissue Value: Aerial
  misc_feature: MA Experiment ID: 108523 Result: Down-regulated in Transcription
  misc_feature: MA Experiment 108523 PARAMETER Experiment Name: Zm_42deg_Heat_P Parameter: Age (day) Value: 8
  misc_feature: MA Experiment 108523 PARAMETER Experiment Name: Zm_42deg_Heat_P Parameter: Organism Value: Zea mays
  misc_feature: MA Experiment 108523 PARAMETER Experiment Name: Zm_42deg_Heat_P Parameter: Plant Line Value: 35A19
  misc_feature: MA Experiment 108523 PARAMETER Experiment Name: Zm_42deg_Heat_P Parameter: Temperature (deg C) Value: 42 vs. 22
  misc_feature: MA Experiment 108523 PARAMETER Experiment Name: Zm_42deg_Heat_P Parameter: Timepoint (hr) Value: 6
  misc_feature: MA Experiment 108523 PARAMETER Experiment Name: Zm_42deg_Heat_P Parameter: Tissue Value: Aerial
  misc_feature: MA Experiment ID: 108527 Result: Down-regulated in Transcription
  misc_feature: MA Experiment 108527 PARAMETER Experiment Name: Zm_5mM_NO_P Parameter: Age (day) Value: 8
  misc_feature: MA Experiment 108527 PARAMETER Experiment Name: Zm_5mM_NO_P Parameter: Organism Value: Zea mays
  misc_feature: MA Experiment 108527 PARAMETER Experiment Name: Zm_5mM_NO_P Parameter: Plant Line Value: 35A19
  misc_feature: MA Experiment 108527 PARAMETER Experiment Name: Zm_5mM_NO_P Parameter: Timepoint (hr) Value: 6
  misc_feature: MA Experiment 108527 PARAMETER Experiment Name: Zm_5mM_NO_P Parameter: Tissue Value: Aerial
  misc_feature: MA Experiment 108527 PARAMETER Experiment Name: Zm_5mM_NO_P Parameter: Treatment Value: 5mM NO vs. No Treatment
  misc_feature: MA Experiment ID: 108528 Result: Up-regulated in Transcription
  misc_feature: MA Experiment 108528 PARAMETER Experiment Name: Zm_Imbibed_Seeds_P Parameter: Age (day) Value: 5 vs. 2
  misc_feature: MA Experiment 108528 PARAMETER Experiment Name: Zm_Imbibed_Seeds_P Parameter: Organism Value: Zea mays
  misc_feature: MA Experiment 108528 PARAMETER Experiment Name: Zm_Imbibed_Seeds_P Parameter: Plant Line Value: 35A19
  misc_feature: MA Experiment 108528 PARAMETER Experiment Name: Zm_Imbibed_Seeds_P Parameter: Tissue Value: Aerial vs. Embryo
  misc_feature: MA Experiment ID: 108529 Result: Down-regulated in Transcription
  misc_feature: MA Experiment 108529 PARAMETER Experiment Name: Zm_Imbibed_Seeds_P Parameter: Age (day) Value: 5 vs. 2
  misc_feature: MA Experiment 108529 PARAMETER Experiment Name: Zm_Imbibed_Seeds_P Parameter: Organism Value: Zea mays
  misc_feature: MA Experiment 108529 PARAMETER Experiment Name: Zm_Imbibed_Seeds_P Parameter: Plant Line Value: 35A19
  misc_feature: MA Experiment 108529 PARAMETER Experiment Name: Zm_Imbibed_Seeds_P Parameter: Tissue Value: Roots vs. Embryo
  misc_feature: MA Experiment ID: 108530 Result: Up-regulated in Transcription
  misc_feature: MA Experiment 108530 PARAMETER Experiment Name: Zm_Imbibed_Seeds_P Parameter: Age (day) Value: 6 vs. 2
  misc_feature: MA Experiment 108530 PARAMETER Experiment Name: Zm_Imbibed_Seeds_P Parameter: Organism Value: Zea mays
  misc_feature: MA Experiment 108530 PARAMETER Experiment Name: Zm_Imbibed_Seeds_P Parameter: Plant Line Value: 35A19
  misc_feature: MA Experiment 108530 PARAMETER Experiment Name: Zm_Imbibed_Seeds_P Parameter: Tissue Value: Aerial vs. Embryo
  misc_feature: MA Experiment ID: 108536 Result: Down-regulated in Transcription
  misc_feature: MA Experiment 108536 PARAMETER Experiment Name: Zm_Meristem_P Parameter: Age (day) Value: 8
  misc_feature: MA Experiment 108536 PARAMETER Experiment Name: Zm_Meristem_P Parameter: Organism Value: Zea mays
  misc_feature: MA Experiment 108536 PARAMETER Experiment Name: Zm_Meristem_P Parameter: Plant Line Value: 35A19
  misc_feature: MA Experiment 108536 PARAMETER Experiment Name: Zm_Meristem_P Parameter: Tissue Value: Shoot Meristem vs. Above Shoot Meristem
  misc_feature: MA Experiment ID: 108543 Result: Up-regulated in Transcription
  misc_feature: MA Experiment ID: 108545 Result: Up-regulated in Transcription
  misc_feature: MA Experiment 108545 PARAMETER Experiment Name: Zm_Imbibed_Seeds_P Parameter: Age (day) Value: 3 vs. 2
  misc_feature: MA Experiment 108545 PARAMETER Experiment Name: Zm_Imbibed_Seeds_P Parameter: Organism Value: Zea mays
  misc_feature: MA Experiment 108545 PARAMETER Experiment Name: Zm_Imbibed_Seeds_P Parameter: Plant Line Value: 35A19
  misc_feature: MA Experiment 108545 PARAMETER Experiment Name: Zm_Imbibed_Seeds_P Parameter: Tissue Value: Aerial vs. Embryo
  misc_feature: MA Experiment ID: 108546 Result: Down-regulated in Transcription
  misc_feature: MA Experiment 108546 PARAMETER Experiment Name: Zm_Imbibed_Seeds_P Parameter: Age (day) Value: 3 vs. 2
  misc_feature: MA Experiment 108546 PARAMETER Experiment Name: Zm_Imbibed_Seeds_P Parameter: Organism Value: Zea mays
  misc_feature: MA Experiment 108546 PARAMETER Experiment Name: Zm_Imbibed_Seeds_P Parameter: Plant Line Value: 35A19
  misc_feature: MA Experiment 108546 PARAMETER Experiment Name: Zm_Imbibed_Seeds_P Parameter: Tissue Value: Roots vs. Embryo
  misc_feature: MA Experiment ID: 108547 Result: Up-regulated in Transcription
  misc_feature: MA Experiment 108547 PARAMETER Experiment Name: Zm_Imbibed_Seeds_P Parameter: Age (day) Value: 4 vs. 2
  misc_feature: MA Experiment 108547 PARAMETER Experiment Name: Zm_Imbibed_Seeds_P Parameter: Organism Value: Zea mays
  misc_feature: MA Experiment 108547 PARAMETER Experiment Name: Zm_Imbibed_Seeds_P Parameter: Plant Line Value: 35A19
  misc_feature: MA Experiment 108547 PARAMETER Experiment Name: Zm_Imbibed_Seeds_P Parameter: Tissue Value: Aerial vs. Embryo
  misc_feature: MA Experiment ID: 108597 Result: Down-regulated in Transcription
  misc_feature: MA Experiment 108597 PARAMETER Experiment Name: Zm_100uM_ABA_P Parameter: Age (day) Value: 9
  misc_feature: MA Experiment 108597 PARAMETER Experiment Name: Zm_100uM_ABA_P Parameter: Organism Value: Zea mays
  misc_feature: MA Experiment 108597 PARAMETER Experiment Name: Zm_100uM_ABA_P Parameter: Plant Line Value: 35A19
  misc_feature: MA Experiment 108597 PARAMETER Experiment Name: Zm_100uM_ABA_P Parameter: Timepoint (hr) Value: 24
  misc_feature: MA Experiment 108597 PARAMETER Experiment Name: Zm_100uM_ABA_P Parameter: Tissue Value: Aerial
  misc_feature: MA Experiment 108597 PARAMETER Experiment Name: Zm_100uM_ABA_P Parameter: Treatment Value: 100uM ABA vs. No Treatment
  misc_feature: MA Experiment ID: 108688 Result: Down-regulated in Transcription
  misc_feature: MA Experiment 108688 PARAMETER Experiment Name: Zm_Embryos-Flowers__P Parameter: Tissue Value: Immature Flowers vs. Aerial+
  misc_feature: MA Experiment ID: 20000477 Result: Down-regulated in Transcription
  misc_feature: MA Experiment 20000477 PARAMETER Experiment Name: Zm_5mM_SA_P Parameter: Age (day) Value: 10
  misc_feature: MA Experiment 20000477 PARAMETER Experiment Name: Zm_5mM_SA_P Parameter: Organism Value: Zea mays
  misc_feature: MA Experiment 20000477 PARAMETER Experiment Name: Zm_5mM_SA_P Parameter: Plant Line Value: 35A19
  misc_feature: MA Experiment 20000477 PARAMETER Experiment Name: Zm_5mM_SA_P Parameter: Timepoint (hr) Value: 48
  misc_feature: MA Experiment 20000477 PARAMETER Experiment Name: Zm_5mM_SA_P Parameter: Tissue Value: Aerial
  misc_feature: MA Experiment 20000477 PARAMETER Experiment Name: Zm_5mM_SA_P Parameter: Treatment Value: 5mM SA vs. No Treatment
  misc_feature: MA Experiment ID: 20000478 Result: Down-regulated in Transcription
  misc_feature: MA Experiment 20000478 PARAMETER Experiment Name: Zm_5mM_SA_P Parameter: Age (day) Value: 11
  misc_feature: MA Experiment 20000478 PARAMETER Experiment Name: Zm_5mM_SA_P Parameter: Organism Value: Zea mays
  misc_feature: MA Experiment 20000478 PARAMETER Experiment Name: Zm_5mM_SA_P Parameter: Plant Line Value: 35A19
  misc_feature: MA Experiment 20000478 PARAMETER Experiment Name: Zm_5mM_SA_P Parameter: Timepoint (hr) Value: 72
  misc_feature: MA Experiment 20000478 PARAMETER Experiment Name: Zm_5mM_SA_P Parameter: Tissue Value: Aerial
  misc_feature: MA Experiment 20000478 PARAMETER Experiment Name: Zm_5mM_SA_P Parameter: Treatment Value: 5mM SA vs. No Treatment
  misc_feature: MA Experiment ID: 20000480 Result: Down-regulated in Transcription
  misc_feature: MA Experiment 20000480 PARAMETER Experiment Name: Zm_Drought_P Parameter: Age (day) Value: 11
  misc_feature: MA Experiment 20000480 PARAMETER Experiment Name: Zm_Drought_P Parameter: Organism Value: Zea mays
  misc_feature: MA Experiment 20000480 PARAMETER Experiment Name: Zm_Drought_P Parameter: Plant Line Value: 35A19
  misc_feature: MA Experiment 20000480 PARAMETER Experiment Name: Zm_Drought_P Parameter: Timepoint (hr) Value: 72
  misc_feature: MA Experiment 20000480 PARAMETER Experiment Name: Zm_Drought_P Parameter: Tissue Value: Aerial
  misc_feature: MA Experiment 20000480 PARAMETER Experiment Name: Zm_Drought_P Parameter: Treatment Value: Drought vs. No Drought
  misc_feature: MA Experiment ID: 20000488 Result: Down-regulated in Transcription
  misc_feature: MA Experiment 20000488 PARAMETER Experiment Name: Zm_50mM_NH4NO3_L_to_H_P Parameter: Organism Value: Zea mays
  misc_feature: MA Experiment 20000488 PARAMETER Experiment Name: Zm_50mM_NH4NO3_L_to_H_P Parameter: Timepoint (hr) Value: 8
  misc_feature: MA Experiment 20000488 PARAMETER Experiment Name: Zm_50mM_NH4NO3_L_to_H_P Parameter: Tissue Value: Leaves
  misc_feature: MA Experiment 20000488 PARAMETER Experiment Name: Zm_50mM_NH4NO3_L_to_H_P Parameter: Treatment Value: 50mM NH4NO3 vs. 100mM Mannitol
  misc_feature: MA Experiment ID: 20000626 Result: Down-regulated in Transcription
  misc_feature: MA Experiment 20000626 PARAMETER Experiment Name: Zm_Herbicide-Treatments_P Parameter: Timepoint (hr) Value: 12
  misc_feature: MA Experiment 20000626 PARAMETER Experiment Name: Zm_Herbicide-Treatments_P Parameter: Tissue Value: Aerial
  misc_feature: MA Experiment 20000626 PARAMETER Experiment Name: Zm_Herbicide-Treatments_P Parameter: Treatment Value: Roundup vs. No Treatment
gcacgagaccattacctagaacatcctaatcgaaaaactctcacgcacacactccacagtgccactcgtctcgctcgctcgcgccagctggtccggcagcagacagcatgggttcgtcggcggcgcttcagccgaagcagctgtaccagctcgtggtgaacaacttcgtcgccgtgctcgctgcgccgctggccgtggcggccgtcgtcaatgcggcgcgcgtcgggccggacgagctgctcggcaggctgcaggcgctccgggcggtgcacgtatttctggccgtgttcgtcgcggccgccacggcgatactgtacgtcctgctgcggccccgggccgtgtacctggtggactacgcctgcttccgcacgcggcccaactgccgcgtccccttcgccaccttcctggagcacgcgaagctggtgacgttcgtggagggggcctccatcgacgagcgcagcgtccggttcatgacgcggctgctggagcggtccggcctcggcgaggagacctgcctgcccccggcccaccactacatcccgccgtaccggaacatggaggcctcgcgcgcggaggtggagctcgtcatcttctcggccatcgacgacctgctcgcgaagacgggcatcagccccagcgccatcgacatcctggtggtgaactgcagcctcttcgcgcccgtcccgtccttcacggacatggtgatcaacaggtacgggatgcggccggacgtccgcaatgtgcacctgtccgggatggggtgcagcgccgggctcatctccgtggggctggcgcgcaacctgctgcaggtggcgggccggggcgcgcacgcgctggtggtgtcgacggagaccatcacccccaactactacgtgggcaaggagcgcgccatgctcctgcccaactgcctcttccgcatcggcggcgccgccgtgctgctgtccacgtcccggtccagggcccggttccgcctggcccgcgtggtgcgcacgctgacgggcgcccaggacagcgcgtaccggtgcgtgttccaggaggaggacggcgagggccaccgcgggatcaacctgtccaaggacctgatgaccatcgcgggcgacgcgctcaaggccaacatcaccgccatcgggccgctggtgctgccggcctcggagcagctgctgttcgcgctgtccttcatcgcgcggcgcgtgctgaaccggcgcgtgaagccgtacctcccggacttccgcacggcgttcgagcacttctgcatccacgcggggggccgcgcggtgatcgacgagctgcagcgcagcctgggcctgtcggacgaggacgtggaggcgtcgcgcatggcgcctgcaccggttcggcaacacgtcgagcagctcggtgtggtacgagctggcgtacatcgaggccaagggccggatgcgccgcggcgaccgcgtgtggatgatcggattcggctccgggttcaagtgcaacagcgcggcctgggagtgcatcgcgccggcgcgcaccgccgaggggccctgggcggagagcgtcagccgctaccccgtggacatccccgaggtgctcaagcactagccgctatcccgtggacatcaggccgggcatgcatgtgaccggccgacgacgtgacagcgtgttttggacttgcttgtggtgctggccgggccggacgcgttgaatgccgagcctgacgcgtccatgtgtgcggtgcgctccagcccggacaggtggttgcgagagggtacaccgtgttaaatccgggccatttacacacgtatagtactcgtgctcctctagatcgtgtaccccttccttctcttcttgttcttcttctttttaccttccttttcaacatttgttttccc

SEQ ID NO: 19012 - protein, 501 aa, Zea mays subsp. mays
  peptide (1)..(501): Ceres Seq. ID no. 12417374
  misc_feature (322)..(410): Pfam Name: Chalcone and stilbene synthases, C-terminal domain Pfam Description: Chalcone and stilbene synthases, C-terminal
  misc_feature (13)..(410): Homolog of NCBI NO: 15226724 NR Description: putative beta-ketoacyl-CoA synthase; protein id:
  misc_feature (13)..(410): Homolog of NCBI NO: 15223556 NR Description: very-long-chain fatty acid condensing enzyme
  misc_feature (13)..(410): Homolog of NCBI NO: 32172502 NR Description: FAE1 [Marchantia polymorpha]
  misc_feature (3)..(410): Homolog of NCBI NO: 28393607 NR Description: putative fatty acid condensing enzyme CUT1
  misc_feature (3)..(410): Homolog of NCBI NO: 15222592 NR Description: fatty acid condensing enzyme CUT1, putative
  misc_feature (3)..(410): Homolog of NCBI NO: 21618184 NR Description: fatty acid condensing enzyme CUT1, putative
  misc_feature (3)..(410): Homolog of NCBI NO: 21593111 NR Description: very-long-chain fatty acid condensing enzyme CUT1
  misc_feature (1)..(410): Homolog of NCBI NO: 15221431 NR Description: very-long-chain fatty acid condensing enzyme
  misc_feature (1)..(410): Homolog of NCBI NO: 17979464 NR Description: At1g68530/T26J14_10 [Arabidopsis thaliana]
  misc_feature (10)..(410): Homolog of NCBI NO: 34913436 NR Description: putative fatty acid condensing enzyme CUT1
MGSSAALQPKQLYQLVVNNFVAVLAAPLAVAAVVNAARVGPDELLGRLQALRAVHVFLAVFVAAATAILYVLLRPRAVYLVDYACFRTRPNCRVPFATFLEHAKLVTFVEGASIDERSVRFMTRLLERSGLGEETCLPPAHHYIPPYRNMEASRAEVELVIFSAIDDLLAKTGISPSAIDILVVNCSLFAPVPSFTDMVINRYGMRPDVRNVHLSGMGCSAGLISVGLARNLLQVAGRGAHALVVSTETITPNYYVGKERAMLLPNCLFRIGGAAVLLSTSRSRARFRLARVVRTLTGAQDSAYRCVFQEEDGEGHRGINLSKDLMTIAGDALKANITAIGPLVLPASEQLLFALSFIARRVLNRRVKPYLPDFRTAFEHFCIHAGGRAVIDELQRSLGLSDEDVEASRMAPAPVRQHVEQLGVVRAGVHRGQGPDAPRRPRVDDRIRLRVQVQQRGLGVHRAGAHRRGALGGERQPLPRGHPRGAQALAAIPWTSGRACM

SEQ ID NO: 19013 - protein, 380 aa, Zea mays subsp. mays
  peptide (1)..(380): Ceres Seq. ID no. 12417375
  misc_feature (201)..(289): Pfam Name: Chalcone and stilbene synthases, C-terminal domain Pfam Description: Chalcone and stilbene synthases, C-terminal
  misc_feature (1)..(289): Homolog of NCBI NO: 15226724 NR Description: putative beta-ketoacyl-CoA synthase; protein id:
  misc_feature (1)..(289): Homolog of NCBI NO: 15223556 NR Description: very-long-chain fatty acid condensing enzyme
  misc_feature (1)..(289): Homolog of NCBI NO: 32172502 NR Description: FAE1 [Marchantia polymorpha]
  misc_feature (1)..(289): Homolog of NCBI NO: 28393607 NR Description: putative fatty acid condensing enzyme CUT1
  misc_feature (1)..(289): Homolog of NCBI NO: 15222592 NR Description: fatty acid condensing enzyme CUT1, putative
  misc_feature (1)..(289): Homolog of NCBI NO: 21618184 NR Description: fatty acid condensing enzyme CUT1, putative
  misc_feature (1)..(289): Homolog of NCBI NO: 21593111 NR Description: very-long-chain fatty acid condensing enzyme CUT1
  misc_feature (1)..(289): Homolog of NCBI NO: 15221431 NR Description: very-long-chain fatty acid condensing enzyme
  misc_feature (1)..(289): Homolog of NCBI NO: 17979464 NR Description: At1g68530/T26J14_10 [Arabidopsis thaliana]
  misc_feature (1)..(289): Homolog of NCBI NO: 34913436 NR Description: putative fatty acid condensing enzyme CUT1
MTRLLERSGLGEETCLPPAHHYIPPYRNMEASRAEVELVIFSAIDDLLAKTGISPSAIDILVVNCSLFAPVPSFTDMVINRYGMRPDVRNVHLSGMGCSAGLISVGLARNLLQVAGRGAHALVVSTETITPNYYVGKERAMLLPNCLFRIGGAAVLLSTSRSRARFRLARVVRTLTGAQDSAYRCVFQEEDGEGHRGINLSKDLMTIAGDALKANITAIGPLVLPASEQLLFALSFIARRVLNRRVKPYLPDFRTAFEHFCIHAGGRAVIDELQRSLGLSDEDVEASRMAPAPVRQHVEQLGVVRAGVHRGQGPDAPRRPRVDDRIRLRVQVQQRGLGVHRAGAHRRGALGGERQPLPRGHPRGAQALAAIPWTSGRACM

SEQ ID NO: 19014 - protein, 352 aa, Zea mays subsp. mays
  peptide (1)..(352): Ceres Seq. ID no. 12417376
  misc_feature (173)..(261): Pfam Name: Chalcone and stilbene synthases, C-terminal domain Pfam Description: Chalcone and stilbene synthases, C-terminal
  misc_feature (1)..(261): Homolog of NCBI NO: 15223556 NR Description: very-long-chain fatty acid condensing enzyme
  misc_feature (1)..(261): Homolog of NCBI NO: 32172502 NR Description: FAE1 [Marchantia polymorpha]
  misc_feature (1)..(261): Homolog of NCBI NO: 28393607 NR Description: putative fatty acid condensing enzyme CUT1
  misc_feature (1)..(261): Homolog of NCBI NO: 15222592 NR Description: fatty acid condensing enzyme CUT1, putative
  misc_feature (1)..(261): Homolog of NCBI NO: 21618184 NR Description: fatty acid condensing enzyme CUT1, putative
  misc_feature (1)..(261): Homolog of NCBI NO: 15226724 NR Description: putative beta-ketoacyl-CoA synthase; protein id:
  misc_feature (1)..(261): Homolog of NCBI NO: 21593111 NR Description: very-long-chain fatty acid condensing enzyme CUT1
  misc_feature (1)..(261): Homolog of NCBI NO: 15221431 NR Description: very-long-chain fatty acid condensing enzyme
  misc_feature (1)..(261): Homolog of NCBI NO: 17979464 NR Description: At1g68530/T26J14_10 [Arabidopsis thaliana]
  misc_feature (1)..(261): Homolog of NCBI NO: 34913436 NR Description: putative fatty acid condensing enzyme CUT1
MEASRAEVELVIFSAIDDLLAKTGISPSAIDILVVNCSLFAPVPSFTDMVINRYGMRPDVRNVHLSGMGCSAGLISVGLARNLLQVAGRGAHALVVSTETITPNYYVGKERAMLLPNCLFRIGGAAVLLSTSRSRARFRLARVVRTLTGAQDSAYRCVFQEEDGEGHRGINLSKDLMTIAGDALKANITAIGPLVLPASEQLLFALSFIARRVLNRRVKPYLPDFRTAFEHFCIHAGGRAVIDELQRSLGLSDEDVEASRMAPAPVRQHVEQLGVVRAGVHRGQGPDAPRRPRVDDRIRLRVQVQQRGLGVHRAGAHRRGALGGERQPLPRGHPRGAQALAAIPWTSGRACM

SEQ ID NO: 19015 - DNA, 2782 bp, Zea mays subsp. mays
  misc_feature (1)..(2782): Ceres Seq. ID no. 12361524
  misc_feature: MA Experiment ID: 108559 Result: Down-regulated in Transcription
  misc_feature: MA Experiment 108559 PARAMETER Experiment Name: Zm_5mM_NO_P Parameter: Age (day) Value: 8
  misc_feature: MA Experiment 108559 PARAMETER Experiment Name: Zm_5mM_NO_P Parameter: Organism Value: Zea mays
  misc_feature: MA Experiment 108559 PARAMETER Experiment Name: Zm_5mM_NO_P Parameter: Plant Line Value: 35A19
  misc_feature: MA Experiment 108559 PARAMETER Experiment Name: Zm_5mM_NO_P Parameter: Timepoint (hr) Value: 12
  misc_feature: MA Experiment 108559 PARAMETER Experiment Name: Zm_5mM_NO_P Parameter: Tissue Value: Aerial
  misc_feature: MA Experiment 108559 PARAMETER Experiment Name: Zm_5mM_NO_P Parameter: Treatment Value: 5mM NO vs. No Treatment
gaaaaatcccaccccccctccactccactaccacggcggcacggcctgcctctgcagctctgccctgctccgcacccctcgctctccaaccccaacgcgcggcgttgctaaaattcaccgcagcgcttactccagtttggccacctcaccacccgccgccgctgtttaagaaggccccgcgcccgatcggggatcacgaaccttggccgccgctgccggagtgggggcgtagatttccggcggccatggggggcgccgtgatggtcgccatcgcggcctctatcggcaacttgctgcagggctgggacaatgcgacaattgctggagccgtcctgtacataaagaaggaattcaacctgcagagcgagcctctgatcgagggcctcatcgtcgccatgtccctcattggggcaacagtcatcacgacgttctccggggcagcggccgactgcgttggtaggaggcccatgctggtcgcctcggctgtcctctacttcgtcagtgggctggtgatgctttgggcgccaagtgtgtacatcttgctcctcgcaaggctcattgatgggttcggtatcggtttggcggtcacacttgttcctctctacatctccgagactgcaccgacagacattcgtgggctgttgaacacgttgccgcagttcagtgggtcaggagggatgttcctctcctactgcatggtgtttgggatgtccctcatgcccaaacctgattggaggctcatgcttggagttctgtcgatcccgtcacttatttactttggactgactgtcttctacttgcctgaatcaccaaggtggcttgtgagcaaaggaaggatggcggaggcgaagagagtgttgcaaaggctgcggggaagagaagatgtctcaggggagatggctcttctagttgaaggtttgggggtcggtaaagatacacgtattgaagaatacataattggtcccgatgatgaacttgctgatgaagggctggctccagatccagagaagatcaaactatatggacctgaagaaggcctatcttgggttgcccgacctgttcggggacaaagtgctcttggaagcgcgttaggtctcatctctcgtcatgggagtatggcggctagtcagggtaagcccctcgtggatcctatggtcactcttttcggaagtgttcatgaaaagatgcctgagatcatggggagcatgaggagcacattgtttcccaactttggcagcatgtttagtgttgccgaccagcagcaggtgaaagctgactgggacgccgagagtcaaagggaaggtgaagattatgcttcggatcatggtggcgatgacatcgaggataacctccaaagcccacttatttctcgtcaggcaacaagtgtggaaggaaaggagatcgctgcacctcatggtagcatattgggtgctgtgggaaggagcagtagcttgcagggaggggaggcagtaagcagcatgggcattggcggaggatggcagttggcgtggaaatggaccgagagagagggcgaagatgggcaaaaggaaggtggcttccagcgtatttacttgcatgaggagggcgtacaaggcaacaggggttctatattgtcattaccaggcggggatgttcctcctggtggtgagttcatccaggctgcagctcttgtgagccaaccagctctttactctaaggaactgctggagcaacgtgctgctggtcctgcgatgatgcatccatctgaagcagttactaaaggtccaagatgggccgacctatttgagcctggggtgaagcatgcactgtttgttggcataggaatacagatcctgcaacagtttgctggcatcaacggcgttctctactacactcctcaaattcttgagcaagcaggcgttggtgttcttctgtcgaacctcggccttaacgcttcttcggcatcaatcctcattagcgccctgacgaccttactgatgctcccaagcatcggcattgcgatgaggctcatggatatgtccggaaggaggtttctcctcctcgcgacgatcccagtcctaatagtcgcgctactcgtcctggtggtgtccaacatcgtggacgtgggggacgtggcgcacgcggcgctctccacggccagcgtcatagtctacttctgcttcttcgtcatggggttcgggcccgtccccaacatcctctgcgcagagatcttccccaccacggtccgcggtgtctgcatcgccatctgcgccctggccttctggctcggtgacatcatcgtgacgtacactctccccgtgatgctgaacgtcgtcgggctcgccggcgtctttggggtgtacgccgtcgtgtgcgtcctagccctcgcgttcgtgttcgtcaaggtgcccgagacgaagggcatgcctctcgaggtcatcaccgagttcttctccgttggggcaaagcaagccaaggaagaggaggaggaggaggccagggaaggttgatcacccggacggccggacccagttaccggcaccgcctgtggggatttttgtggtctgcacacttcactgtggttggtcctgtgatgatgtatttgtgaaaaaaaaaactttgggtagggggcagagatgatttggctgtacaatgtgaggcttgattctgccaaaggctggccttcagaactaggaagggtgtctgttatcttcttttgttgcttggagaccttgtgcttgtgttggttggaattttgttgcctatgtaactagtggtgtatgacagttatgctattggtttc

SEQ ID NO: 19016 - protein, 828 aa, Zea mays subsp. mays
  peptide (1)..(828): Ceres Seq. ID no. 12361525
  misc_feature (488)..(535): Homolog of NCBI NO: 23306123 NR Description: Putative sugar transporter protein
  misc_feature (488)..(535): Homolog of NCBI NO: 6063538 NR Description: similar to sugar transporter protein. (AL022604)
  misc_feature (542)..(822): Homolog of NCBI NO: 23306123 NR Description: Putative sugar transporter protein
  misc_feature (542)..(822): Homolog of NCBI NO: 6063538 NR Description: similar to sugar transporter protein. (AL022604)
  misc_feature (85)..(401): Homolog of NCBI NO: 23306123 NR Description: Putative sugar transporter protein
  misc_feature (85)..(401): Homolog of NCBI NO: 6063538 NR Description: similar to sugar transporter protein. (AL022604)
  misc_feature (82)..(823): Homolog of NCBI NO: 11358863 NR Description: sugar transport protein [imported] - Arabidopsis
  misc_feature (82)..(823): Homolog of NCBI NO: 15218044 NR Description: putative sugar transporter protein; protein id:
  misc_feature (82)..(823): Homolog of NCBI NO: 25402933 NR Description: Sugar transporter [imported] - Arabidopsis
  misc_feature (156)..(828): Homolog of NCBI NO: 26986188 NR Description: sugar transporter [Hordeum vulgare subsp. vulgare]
KIPPPLHSTTTAARPASAALPCSAPLALQPQRAALLKFTAALTPVWPPHHPPPLFKKAPRPIGDHEPWPPLPEWGRRFPAAMGGAVMVAIAASIGNLLQGWDNATIAGAVLYIKKEFNLQSEPLIEGLIVAMSLIGATVITTFSGAAADCVGRRPMLVASAVLYFVSGLVMLWAPSVYILLLARLIDGFGIGLAVTLVPLYISETAPTDIRGLLNTLPQFSGSGGMFLSYCMVFGMSLMPKPDWRLMLGVLSIPSLIYFGLTVFYLPESPRWLVSKGRMAEAKRVLQRLRGREDVSGEMALLVEGLGVGKDTRIEEYIIGPDDELADEGLAPDPEKIKLYGPEEGLSWVARPVRGQSALGSALGLISRHGSMAASQGKPLVDPMVTLFGSVHEKMPEIMGSMRSTLFPNFGSMFSVADQQQVKADWDAESQREGEDYASDHGGDDIEDNLQSPLISRQATSVEGKEIAAPHGSILGAVGRSSSLQGGEAVSSMGIGGGWQLAWKWTEREGEDGQKEGGFQRIYLHEEGVQGNRGSILSLPGGDVPPGGEFIQAAALVSQPALYSKELLEQRAAGPAMMHPSEAVTKGPRWADLFEPGVKHALFVGIGIQILQQFAGINGVLYYTPQILEQAGVGVLLSNLGLNASSASILISALTTLLMLPSIGIAMRLMDMSGRRFLLLATIPVLIVALLVLVVSNIVDVGDVAHAALSTASVIVYFCFFVMGFGPVPNILCAEIFPTTVRGVCIAICALAFWLGDIIVTYTLPVMLNVVGLAGVFGVYAVVCVLALAFVFVKVPETKGMPLEVITEFFSVGAKQAKEEEEEEAREG

SEQ ID NO: 19017 - protein, 747 aa, Zea mays subsp. mays
  peptide (1)..(747): Ceres Seq. ID no. 12361526
  misc_feature (407)..(454): Homolog of NCBI NO: 23306123 NR Description: Putative sugar transporter protein
  misc_feature (407)..(454): Homolog of NCBI NO: 6063538 NR Description: similar to sugar transporter protein. (AL022604)
  misc_feature (461)..(741): Homolog of NCBI NO: 23306123 NR Description: Putative sugar transporter protein
  misc_feature (461)..(741): Homolog of NCBI NO: 6063538 NR Description: similar to sugar transporter protein. (AL022604)
  misc_feature (4)..(320): Homolog of NCBI NO: 23306123 NR Description: Putative sugar transporter protein
  misc_feature (4)..(320): Homolog of NCBI NO: 6063538 NR Description: similar to sugar transporter protein. (AL022604)
  misc_feature (1)..(742): Homolog of NCBI NO: 11358863 NR Description: sugar transport protein [imported] - Arabidopsis
  misc_feature (1)..(742): Homolog of NCBI NO: 15218044 NR Description: putative sugar transporter protein; protein id:
  misc_feature (1)..(742): Homolog of NCBI NO: 25402933 NR Description: Sugar transporter [imported] - Arabidopsis
  misc_feature (75)..(747): Homolog of NCBI NO: 26986188 NR Description: sugar transporter [Hordeum vulgare subsp. vulgare]
MGGAVMVAIAASIGNLLQGWDNATIAGAVLYIKKEFNLQSEPLIEGLIVAMSLIGATVITTFSGAAADCVGRRPMLVASAVLYFVSGLVMLWAPSVYILLLARLIDGFGIGLAVTLVPLYISETAPTDIRGLLNTLPQFSGSGGMFLSYCMVFGMSLMPKPDWRLMLGVLSIPSLIYFGLTVFYLPESPRWLVSKGRMAEAKRVLQRLRGREDVSGEMALLVEGLGVGKDTRIEEYIIGPDDELADEGLAPDPEKIKLYGPEEGLSWVARPVRGQSALGSALGLISRHGSMAASQGKPLVDPMVTLFGSVHEKMPEIMGSMRSTLFPNFGSMFSVADQQQVKADWDAESQREGEDYASDHGGDDIEDNLQSPLISRQATSVEGKEIAAPHGSILGAVGRSSSLQGGEAVSSMGIGGGWQLAWKWTEREGEDGQKEGGFQRIYLHEEGVQGNRGSILSLPGGDVPPGGEFIQAAALVSQPALYSKELLEQRAAGPAMMHPSEAVTKGPRWADLFEPGVKHALFVGIGIQILQQFAGINGVLYYTPQILEQAGVGVLLSNLGLNASSASILISALTTLLMLPSIGIAMRLMDMSGRRFLLLATIPVLIVALLVLVVSNIVDVGDVAHAALSTASVIVYFCFFVMGFGPVPNILCAEIFPTTVRGVCIAICALAFWLGDIIVTYTLPVMLNVVGLAGVFGVYAVVCVLALAFVFVKVPETKGMPLEVITEFFSVGAKQAKEEEEEEAREG

SEQ ID NO: 19018 - protein, 742 aa, Zea mays subsp. mays
  peptide (1)..(742): Ceres Seq. ID no. 12361527
  misc_feature (402)..(449): Homolog of NCBI NO: 23306123 NR Description: Putative sugar transporter protein
  misc_feature (402)..(449): Homolog of NCBI NO: 6063538 NR Description: similar to sugar transporter protein. (AL022604)
  misc_feature (456)..(736): Homolog of NCBI NO: 23306123 NR Description: Putative sugar transporter protein
  misc_feature (456)..(736): Homolog of NCBI NO: 6063538 NR Description: similar to sugar transporter protein. (AL022604)
  misc_feature (1)..(315): Homolog of NCBI NO: 23306123 NR Description: Putative sugar transporter protein
  misc_feature (1)..(315): Homolog of NCBI NO: 6063538 NR Description: similar to sugar transporter protein. (AL022604)
  misc_feature (1)..(737): Homolog of NCBI NO: 11358863 NR Description: sugar transport protein [imported] - Arabidopsis
  misc_feature (1)..(737): Homolog of NCBI NO: 15218044 NR Description: putative sugar transporter protein; protein id:
  misc_feature (1)..(737): Homolog of NCBI NO: 25402933 NR Description: Sugar transporter [imported] - Arabidopsis
  misc_feature (70)..(742): Homolog of NCBI NO: 26986188 NR Description: sugar transporter [Hordeum vulgare subsp. vulgare]
MVAIAASIGNLLQGWDNATIAGAVLYIKKEFNLQSEPLIEGLIVAMSLIGATVITTFSGAAADCVGRRPMLVASAVLYFVSGLVMLWAPSVYILLLARLIDGFGIGLAVTLVPLYISETAPTDIRGLLNTLPQFSGSGGMFLSYCMVFGMSLMPKPDWRLMLGVLSIPSLIYFGLTVFYLPESPRWLVSKGRMAEAKRVLQRLRGREDVSGEMALLVEGLGVGKDTRIEEYIIGPDDELADEGLAPDPEKIKLYGPEEGLSWVARPVRGQSALGSALGLISRHGSMAASQGKPLVDPMVTLFGSVHEKMPEIMGSMRSTLFPNFGSMFSVADQQQVKADWDAESQREGEDYASDHGGDDIEDNLQSPLISRQATSVEGKEIAAPHGSILGAVGRSSSLQGGEAVSSMGIGGGWQLAWKWTEREGEDGQKEGGFQRIYLHEEGVQGNRGSILSLPGGDVPPGGEFIQAAALVSQPALYSKELLEQRAAGPAMMHPSEAVTKGPRWADLFEPGVKHALFVGIGIQILQQFAGINGVLYYTPQILEQAGVGVLLSNLGLNASSASILISALTTLLMLPSIGIAMRLMDMSGRRFLLLATIPVLIVALLVLVVSNIVDVGDVAHAALSTASVIVYFCFFVMGFGPVPNILCAEIFPTTVRGVCIAICALAFWLGDIIVTYTLPVMLNVVGLAGVFGVYAVVCVLALAFVFVKVPETKGMPLEVITEFFSVGAKQAKEEEEEEAREG

SEQ ID NO: 19019 - DNA, 1315 bp, Zea mays subsp. mays
  misc_feature (1)..(1315): Ceres Seq. ID no. 13598890
  misc_feature: MA Experiment ID: 108529 Result: Up-regulated in Transcription
  misc_feature: MA Experiment 108529 PARAMETER Experiment Name: Zm_Imbibed_Seeds_P Parameter: Age (day) Value: 5 vs. 2
  misc_feature: MA Experiment 108529 PARAMETER Experiment Name: Zm_Imbibed_Seeds_P Parameter: Organism Value: Zea mays
  misc_feature: MA Experiment 108529 PARAMETER Experiment Name: Zm_Imbibed_Seeds_P Parameter: Plant Line Value: 35A19
  misc_feature: MA Experiment 108529 PARAMETER Experiment Name: Zm_Imbibed_Seeds_P Parameter: Tissue Value: Roots vs. Embryo
  misc_feature: MA Experiment ID: 108535 Result: Down-regulated in Transcription
  misc_feature: MA Experiment 108535 PARAMETER Experiment Name: Zm_Meristem_P Parameter: Age (day) Value: 8
  misc_feature: MA Experiment 108535 PARAMETER Experiment Name: Zm_Meristem_P Parameter: Organism Value: Zea mays
  misc_feature: MA Experiment 108535 PARAMETER Experiment Name: Zm_Meristem_P Parameter: Plant Line Value: 35A19
  misc_feature: MA Experiment 108535 PARAMETER Experiment Name: Zm_Meristem_P Parameter: Tissue Value: Root Meristem vs. Above Root Meristem
  misc_feature: MA Experiment ID: 108536 Result: Up-regulated in Transcription
  misc_feature: MA Experiment 108536 PARAMETER Experiment Name: Zm_Meristem_P Parameter: Age (day) Value: 8
  misc_feature: MA Experiment 108536 PARAMETER Experiment Name: Zm_Meristem_P Parameter: Organism Value: Zea mays
  misc_feature: MA Experiment 108536 PARAMETER Experiment Name: Zm_Meristem_P Parameter: Plant Line Value: 35A19
  misc_feature: MA Experiment 108536 PARAMETER Experiment Name: Zm_Meristem_P Parameter: Tissue Value: Shoot Meristem vs. Above Shoot Meristem
  misc_feature: MA Experiment ID: 108687 Result: Down-regulated in Transcription
  misc_feature: MA Experiment 108687 PARAMETER Experiment Name: Zm_Embryos-Flowers__P Parameter: Tissue Value: Embryo vs. Aerial+
  misc_feature: MA Experiment ID: 20000108 Result: Down-regulated in Transcription
  misc_feature: MA Experiment 20000108 PARAMETER Experiment Name: Zm_Root-Tips_P Parameter: Age (day) Value: 12
  misc_feature: MA Experiment 20000108 PARAMETER Experiment Name: Zm_Root-Tips_P Parameter: Organism Value: Zea mays
  misc_feature: MA Experiment 20000108 PARAMETER Experiment Name: Zm_Root-Tips_P Parameter: Tissue Value: Root tips vs. Root mid region    35
  misc_feature: MA Experiment 20000108 PARAMETER Experiment Name: Zm_Root-Tips_P Parameter: Tissue Value: Root tips vs. Root mid region   Sequence Listing-Misc Features (4)
  misc_feature: MA Experiment ID: 20000492 Result: Down-regulated in Transcription
  misc_feature: MA Experiment 20000492 PARAMETER Experiment Name: Zm_Hybrid_Seed_Dev_P Parameter: DAP Value: 12
  misc_feature: MA Experiment 20000492 PARAMETER Experiment Name: Zm_Hybrid_Seed_Dev_P Parameter: Organism Value: Zea mays
  misc_feature: MA Experiment 20000492 PARAMETER Experiment Name: Zm_Hybrid_Seed_Dev_P Parameter: Plant Line Value: 35A19
  misc_feature: MA Experiment 20000492 PARAMETER Experiment Name: Zm_Hybrid_Seed_Dev_P Parameter: Tissue Value: Fert Kernel vs. Unfert Floret
  misc_feature: MA Experiment ID: 20000535 Result: Down-regulated in Transcription
  misc_feature: MA Experiment 20000535 PARAMETER Experiment Name: Zm_Hybrid_Seed_Dev_P Parameter: DAP Value: 30 vs. 12
  misc_feature: MA Experiment 20000535 PARAMETER Experiment Name: Zm_Hybrid_Seed_Dev_P Parameter: Organism Value: Zea mays
  misc_feature: MA Experiment 20000535 PARAMETER Experiment Name: Zm_Hybrid_Seed_Dev_P Parameter: Plant Line Value: 35A19
  misc_feature: MA Experiment 20000535 PARAMETER Experiment Name: Zm_Hybrid_Seed_Dev_P Parameter: Tissue Value: Embryo vs. Unfert Floret
cacctggagttctctccgaggaaacaatcgagaagatggaatttgaggtcgagaggttaacaagactaaagaccagcagactgaaggaaatcgtcatgaaaaggagggcagagttagaagcgatctgccagaatgcacacatagaacctgatgtcagcacggcccctgaacagactgattctttgatcgattctggcctcatcgacccttctgagctcctggcgaatattgagtcacaaatattaaaagcgaaagaagagtctcttagtcggaaagatataatggacaggataaatagatggattgctgcttgcgatgaagaggcttggcttgaagaatataaccaggacccaaagaggtacagtgctggaaggggtgctcatataaaccttaaacgggcagaaaaggcacggattttggttagaaaaatcccaagtatggtggacgacttgataaaccgaacctttgcttgggaaaacgcaagaaataaaccctttctctatgatgggggacgcctaatatctgtactagaagagtacaggcttagccggcatcagaaagaagaggaaaatcgacggtaccgggaccagaagaagctggagagcatcctacttgcagagaaagaagcgatcttcggatctagaccaagcccaaggaagacgagcagcttaagtaggaaggcaaatgggtaccggccaaatgggaacaccaacggactcaagactccaactcctcgccgattgtctctcggcagtgctactcctgagcttttgacgcccagatcgtactctggccataatagatactttggcgatgtgaggcgtctatcgacttcccatctgaacttcggtgatgattcgctgtcaacgtttacatccatcagtggctctgaaccagaatccccctctattggatgaacaccgtactgctggatgactggatggtcagtattgcgtattgtaaatgggcaccatgttaccaagttcttgcactagcatgtacattcctgatgtcatatatttagctcatattggagtactaagtattggacgggttgacttggtttgggttgggtgtggagttgaattgtttcaagttgatggctttgtagattgacaattaggcggaaagatgtaggggagcgatctggatttgggcagtcagctgtaacatatcataacttatgtgtttggtttgtgtgtgcaaaaaaaaaaaaaaaaaaaaaaaaaaaaaaaaaaaaaaaaaaaaaaaaaaaaaaaaaaaaataaaaaaaaaaaaaaaaaatatcgataccgtcgacctcgagggggggccc

SEQ ID NO: 19020 - protein, 304 aa, Zea mays subsp. mays
  peptide (1)..(304): Ceres Seq. ID no. 13598891
  misc_feature (3)..(301): Pfam Name: Microtubule associated protein (MAP65/ASE1 family) Pfam Description: Microtubule associated protein (MAP65/ASE1
  misc_feature (1)..(251): Homolog of NCBI NO: 15240485 NR Description: microtubule associated protein (MAP65/ASE1)
  misc_feature (1)..(251): Homolog of NCBI NO: 28200790 NR Description: 65kD microtubule associated protein [Daucus
  misc_feature (1)..(301): Homolog of NCBI NO: 11558256 NR Description: microtubule-associated protein MAP65-1c
  misc_feature (1)..(251): Homolog of NCBI NO: 11558252 NR Description: microtubule-associated protein MAP65-1a
  misc_feature (2)..(278): Homolog of NCBI NO: 28301942 NR Description: unknown protein [Oryza sativa (japonica
  misc_feature (1)..(301): Homolog of NCBI NO: 8778239 NR Description: F10B6.9 [Arabidopsis thaliana]
  misc_feature (1)..(301): Homolog of NCBI NO: 21539547 NR Description: unknown protein [Arabidopsis thaliana]
  misc_feature (1)..(304): Homolog of NCBI NO: 30677965 NR Description: microtubule associated protein (MAP65/ASE1)
  misc_feature (1)..(304): Homolog of NCBI NO: 25410943 NR Description: hypothetical protein At2g01910 [imported] -
  misc_feature (3)..(303): Homolog of NCBI NO: 27357984 NR Description: Unknown protein [Oryza sativa (japonica
PGVLSEETIEKMEFEVERLTRLKTSRLKEIVMKRRAELEAICQNAHIEPDVSTAPEQTDSLIDSGLIDPSELLANIESQILKAKEESLSRKDIMDRINRWIAACDEEAWLEEYNQDPKRYSAGRGAHINLKRAEKARILVRKIPSMVDDLINRTFAWENARNKPFLYDGGRLISVLEEYRLSRHQKEEENRRYRDQKKLESILLAEKEAIFGSRPSPRKTSSLSRKANGYRPNGNTNGLKTPTPRRLSLGSATPELLTPRSYSGHNRYFGDVRRLSTSHLNFGDDSLSTFTSISGSEPESPSIG

SEQ ID NO: 19021 - protein, 293 aa, Zea mays subsp. mays
  peptide (1)..(293): Ceres Seq. ID no. 13598892
  misc_feature (1)..(290): Pfam Name: Microtubule associated protein (MAP65/ASE1 family) Pfam Description: Microtubule associated protein (MAP65/ASE1
  misc_feature (1)..(240): Homolog of NCBI NO: 15240485 NR Description: microtubule associated protein (MAP65/ASE1)
  misc_feature (1)..(240): Homolog of NCBI NO: 28200790 NR Description: 65kD microtubule associated protein [Daucus
  misc_feature (1)..(290): Homolog of NCBI NO: 11558256 NR Description: microtubule-associated protein MAP65-1c
  misc_feature (1)..(240): Homolog of NCBI NO: 11558252 NR Description: microtubule-associated protein MAP65-1a
  misc_feature (1)..(267): Homolog of NCBI NO: 28301942 NR Description: unknown protein [Oryza sativa (japonica
  misc_feature (1)..(290): Homolog of NCBI NO: 8778239 NR Description: F10B6.9 [Arabidopsis thaliana]
  misc_feature (1)..(290): Homolog of NCBI NO: 21539547 NR Description: unknown protein [Arabidopsis thaliana]
  misc_feature (1)..(293): Homolog of NCBI NO: 30677965 NR Description: microtubule associated protein (MAP65/ASE1)
  misc_feature (1)..(293): Homolog of NCBI NO: 25410943 NR Description: hypothetical protein At2g01910 [imported] -
  misc_feature (1)..(292): Homolog of NCBI NO: 27357984 NR Description: Unknown protein [Oryza sativa (japonica
MEFEVERLTRLKTSRLKEIVMKRRAELEAICQNAHIEPDVSTAPEQTDSLIDSGLIDPSELLANIESQILKAKEESLSRKDIMDRINRWIAACDEEAWLEEYNQDPKRYSAGRGAHINLKRAEKARILVRKIPSMVDDLINRTFAWENARNKPFLYDGGRLISVLEEYRLSRHQKEEENRRYRDQKKLESILLAEKEAIFGSRPSPRKTSSLSRKANGYRPNGNTNGLKTPTPRRLSLGSATPELLTPRSYSGHNRYFGDVRRLSTSHLNFGDDSLSTFTSISGSEPESPSIG

SEQ ID NO: 19022 - protein, 273 aa, Zea mays subsp. mays
  peptide (1)..(273): Ceres Seq. ID no. 13598893
  misc_feature (1)..(270): Pfam Name: Microtubule associated protein (MAP65/ASE1 family) Pfam Description: Microtubule associated protein (MAP65/ASE1
  misc_feature (1)..(220): Homolog of NCBI NO: 15240485 NR Description: microtubule associated protein (MAP65/ASE1)
  misc_feature (1)..(220): Homolog of NCBI NO: 28200790 NR Description: 65kD microtubule associated protein [Daucus
  misc_feature (1)..(270): Homolog of NCBI NO: 11558256 NR Description: microtubule-associated protein MAP65-1c
  misc_feature (1)..(220): Homolog of NCBI NO: 11558252 NR Description: microtubule-associated protein MAP65-1a
  misc_feature (1)..(247): Homolog of NCBI NO: 28301942 NR Description: unknown protein [Oryza sativa (japonica
  misc_feature (1)..(270): Homolog of NCBI NO: 8778239 NR Description: F10B6.9 [Arabidopsis thaliana]
  misc_feature (1)..(270): Homolog of NCBI NO: 21539547 NR Description: unknown protein [Arabidopsis thaliana]
  misc_feature (1)..(273): Homolog of NCBI NO: 30677965 NR Description: microtubule associated protein (MAP65/ASE1)
  misc_feature (1)..(273): Homolog of NCBI NO: 25410943 NR Description: hypothetical protein At2g01910 [imported] -
  misc_feature (1)..(272): Homolog of NCBI NO: 27357984 NR Description: Unknown protein [Oryza sativa (japonica
MKRRAELEAICQNAHIEPDVSTAPEQTDSLIDSGLIDPSELLANIESQILKAKEESLSRKDIMDRINRWIAACDEEAWLEEYNQDPKRYSAGRGAHINLKRAEKARILVRKIPSMVDDLINRTFAWENARNKPFLYDGGRLISVLEEYRLSRHQKEEENRRYRDQKKLESILLAEKEAIFGSRPSPRKTSSLSRKANGYRPNGNTNGLKTPTPRRLSLGSATPELLTPRSYSGHNRYFGDVRRLSTSHLNFGDDSLSTFTSISGSEPESPSIG

SEQ ID NO: 19023 - DNA, 1101 bp, Zea mays subsp. mays
  misc_feature (1)..(1101): Ceres Seq. ID no. 12375844
  misc_feature: MA Experiment ID: 108535 Result: Down-regulated in Transcription
  misc_feature: MA Experiment 108535 PARAMETER Experiment Name: Zm_Meristem_P Parameter: Age (day) Value: 8
  misc_feature: MA Experiment 108535 PARAMETER Experiment Name: Zm_Meristem_P Parameter: Organism Value: Zea mays
  misc_feature: MA Experiment 108535 PARAMETER Experiment Name: Zm_Meristem_P Parameter: Plant Line Value: 35A19
  misc_feature: MA Experiment 108535 PARAMETER Experiment Name: Zm_Meristem_P Parameter: Tissue Value: Root Meristem vs. Above Root Meristem
gcacgagaccattacctagaacatcctaatcgaaaaacatccctcaaccggtatgtgtttcgtgccaactgctgtaggaagtaggatccagcagtctgcaaggtgtccaaagaaaacaacacggcaggagtgaagatctctgataggatgacttcagtgtctgaatcaacacttgtgctggcttcaggtgcatcaatgttaccgcatcctgcgaaggtacggacaggtggtgaagatgcatattttatagcttgtgatggctggtttggtgtagcagatggagttggtcagtggtcatttgaagggatcaatgccggactttatgccagagaactaatggatggctgcaaaaagatcgtggaagagacccaaggagctccggggatgagaaccgaggaagttcttgccaaggctgcagatgaagcacggtcccctggttcttccactgttttagttgctcactttgatggcaaggtccttcacgcatcaaacatcggagattctggattcctcgtgattaggaacggaggggtccataagaaatcaaacccaatgacttacggtttcaatttcccgttgcagattgagaagggcgacgaccctctaaaacttgtacagaaatacgccatctgtctacaagaaggcgacgtcgttgtaacagcgtcagacggtcttttcgacaacgtctacgaggaagaagtagcaggcatcgtctccaaatcattagaagctgatctgaagcccacggaaatggccgatttactggttgcccgagcgaaggaggtggggcggtgtgggtttggaaggagcccgttctcggactcggctctcgcggctgggtacctgggctactccggcggcaagctggatgatgtaacggttgttgtatcgattgttcggaaatctgaagtttaataaactagaaacgaactctcaaagttgagcgcacttcttatttttttcttcttctttttctcttcttgcaacagctgcactcgctggcaaaatgcccgtgagcatttcgcacgtccctggcctacgcgcccaggcgcattgcgaaacgtgtattgtgtacacttgatacatactataaggttgtat

SEQ ID NO: 19024 - protein, 255 aa, Zea mays subsp. mays
  peptide (1)..(255): Ceres Seq. ID no. 12375845
  misc_feature (23)..(219): Pfam Name: Protein phosphatase 2C Pfam Description: Protein phosphatase 2C
  misc_feature (28)..(250): Homolog of NCBI NO: 17555536 NR Description: Protein phosphatase 2C (35.3 kD) [Caenorhabditis
  misc_feature (9)..(253): Homolog of NCBI NO: 18402284 NR Description: expressed protein
  misc_feature (10)..(251): Homolog of NCBI NO: 34896100 NR Description: B1189A09.35 [Oryza sativa (japonica
  misc_feature (1)..(254): Homolog of NCBI NO: 30683717 NR Description: expressed protein [Arabidopsis thaliana]
  misc_feature (1)..(254): Homolog of NCBI NO: 25366932 NR Description: hypothetical protein dl4315c [imported] -
  misc_feature (1)..(253): Homolog of NCBI NO: 15240071 NR Description: putative protein; protein id: At5g66720.1
  misc_feature (1)..(251): Homolog of NCBI NO: 7485658 NR Description: hypothetical protein F17M5.260 - Arabidopsis
  misc_feature (1)..(251): Homolog of NCBI NO: 18418226 NR Description: putative protein
  misc_feature (1)..(24): Homolog of NCBI NO: 37533570 NR Description: putative protein phosphatase 2C
  misc_feature (23)..(255): Homolog of NCBI NO: 37533570 NR Description: putative protein phosphatase 2C
MTSVSESTLVLASGASMLPHPAKVRTGGEDAYFIACDGWFGVADGVGQWSFEGINAGLYARELMDGCKKIVEETQGAPGMRTEEVLAKAADEARSPGSSTVLVAHFDGKVLHASNIGDSGFLVIRNGGVHKKSNPMTYGFNFPLQIEKGDDPLKLVQKYAICLQEGDVVVTASDGLFDNVYEEEVAGIVSKSLEADLKPTEMADLLVARAKEVGRCGFGRSPFSDSALAAGYLGYSGGKLDDVTVVVSIVRKSEV

SEQ ID NO: 19025 - protein, 239 aa, Zea mays subsp. mays
  peptide (1)..(239): Ceres Seq. ID no. 12375846
  misc_feature (7)..(203): Pfam Name: Protein phosphatase 2C Pfam Description: Protein phosphatase 2C
  misc_feature (12)..(234): Homolog of NCBI NO: 39591835 NR Description: Hypothetical protein CBG18323 [Caenorhabditis
  misc_feature (12)..(234): Homolog of NCBI NO: 17555536 NR Description: Protein phosphatase 2C (35.3 kD) [Caenorhabditis
  misc_feature (1)..(237): Homolog of NCBI NO: 18402284 NR Description: expressed protein
  misc_feature (1)..(235): Homolog of NCBI NO: 34896100 NR Description: B1189A09.35 [Oryza sativa (japonica
  misc_feature (1)..(238): Homolog of NCBI NO: 30683717 NR Description: expressed protein [Arabidopsis thaliana]
  misc_feature (1)..(238): Homolog of NCBI NO: 25366932 NR Description: hypothetical protein dl4315c [imported] -
  misc_feature (1)..(237): Homolog of NCBI NO: 15240071 NR Description: putative protein; protein id: At5g66720.1
  misc_feature (1)..(235): Homolog of NCBI NO: 7485658 NR Description: hypothetical protein F17M5.260 - Arabidopsis
  misc_feature (1)..(235): Homolog of NCBI NO: 18418226 NR Description: putative protein
  misc_feature (7)..(239): Homolog of NCBI NO: 37533570 NR Description: putative protein phosphatase 2C
MLPHPAKVRTGGEDAYFIACDGWFGVADGVGQWSFEGINAGLYARELMDGCKKIVEETQGAPGMRTEEVLAKAADEARSPGSSTVLVAHFDGKVLHASNIGDSGFLVIRNGGVHKKSNPMTYGFNFPLQIEKGDDPLKLVQKYAICLQEGDVVVTASDGLFDNVYEEEVAGIVSKSLEADLKPTEMADLLVARAKEVGRCGFGRSPFSDSALAAGYLGYSGGKLDDVTVVVSIVRKSEV

SEQ ID NO: 19026 - protein, 192 aa, Zea mays subsp. mays
  peptide (1)..(192): Ceres Seq. ID no. 12375847
  misc_feature (1)..(156): Pfam Name: Protein phosphatase 2C Pfam Description: Protein phosphatase 2C
  misc_feature (1)..(190): Homolog of NCBI NO: 15240071 NR Description: putative protein; protein id: At5g66720.1
  misc_feature (1)..(188): Homolog of NCBI NO: 7485658 NR Description: hypothetical protein F17M5.260 - Arabidopsis
  misc_feature (1)..(187): Homolog of NCBI NO: 39591835 NR Description: Hypothetical protein CBG18323 [Caenorhabditis
  misc_feature (1)..(190): Homolog of NCBI NO: 18402284 NR Description: expressed protein
  misc_feature (1)..(191): Homolog of NCBI NO: 30683717 NR Description: expressed protein [Arabidopsis thaliana]
  misc_feature (1)..(191): Homolog of NCBI NO: 25366932 NR Description: hypothetical protein dl4315c [imported] -
  misc_feature (1)..(188): Homolog of NCBI NO: 34896100 NR Description: B1189A09.35 [Oryza sativa (japonica
  misc_feature (1)..(187): Homolog of NCBI NO: 17555536 NR Description: Protein phosphatase 2C (35.3 kD) [Caenorhabditis
  misc_feature (1)..(188): Homolog of NCBI NO: 18418226 NR Description: putative protein
  misc_feature (1)..(192): Homolog of NCBI NO: 37533570 NR Description: putative protein phosphatase 2C
MDGCKKIVEETQGAPGMRTEEVLAKAADEARSPGSSTVLVAHFDGKVLHASNIGDSGFLVIRNGGVHKKSNPMTYGFNFPLQIEKGDDPLKLVQKYAICLQEGDVVVTASDGLFDNVYEEEVAGIVSKSLEADLKPTEMADLLVARAKEVGRCGFGRSPFSDSALAAGYLGYSGGKLDDVTVVVSIVRKSEV

SEQ ID NO: 19027 - DNA, 1298 bp, Zea mays subsp. mays
  misc_feature (1)..(1298): Ceres Seq. ID no. 12384330
  misc_feature: MA Experiment ID: 108528 Result: Down-regulated in Transcription
  misc_feature: MA Experiment 108528 PARAMETER Experiment Name: Zm_Imbibed_Seeds_P Parameter: Age (day) Value: 5 vs. 2
  misc_feature: MA Experiment 108528 PARAMETER Experiment Name: Zm_Imbibed_Seeds_P Parameter: Organism Value: Zea mays
  misc_feature: MA Experiment 108528 PARAMETER Experiment Name: Zm_Imbibed_Seeds_P Parameter: Plant Line Value: 35A19
  misc_feature: MA Experiment 108528 PARAMETER Experiment Name: Zm_Imbibed_Seeds_P Parameter: Tissue Value: Aerial vs. Embryo
  misc_feature: MA Experiment ID: 108529 Result: Up-regulated in Transcription
  misc_feature: MA Experiment 108529 PARAMETER Experiment Name: Zm_Imbibed_Seeds_P Parameter: Age (day) Value: 5 vs. 2
  misc_feature: MA Experiment 108529 PARAMETER Experiment Name: Zm_Imbibed_Seeds_P Parameter: Organism Value: Zea mays
  misc_feature: MA Experiment 108529 PARAMETER Experiment Name: Zm_Imbibed_Seeds_P Parameter: Plant Line Value: 35A19
  misc_feature: MA Experiment 108529 PARAMETER Experiment Name: Zm_Imbibed_Seeds_P Parameter: Tissue Value: Roots vs. Embryo
  misc_feature: MA Experiment ID: 108530 Result: Down-regulated in Transcription
  misc_feature: MA Experiment 108530 PARAMETER Experiment Name: Zm_Imbibed_Seeds_P Parameter: Age (day) Value: 6 vs. 2
  misc_feature: MA Experiment 108530 PARAMETER Experiment Name: Zm_Imbibed_Seeds_P Parameter: Organism Value: Zea mays
  misc_feature: MA Experiment 108530 PARAMETER Experiment Name: Zm_Imbibed_Seeds_P Parameter: Plant Line Value: 35A19
  misc_feature: MA Experiment 108530 PARAMETER Experiment Name: Zm_Imbibed_Seeds_P Parameter: Tissue Value: Aerial vs. Embryo
  misc_feature: MA Experiment ID: 108535 Result: Down-regulated in Transcription
  misc_feature: MA Experiment 108535 PARAMETER Experiment Name: Zm_Meristem_P Parameter: Age (day) Value: 8
  misc_feature: MA Experiment 108535 PARAMETER Experiment Name: Zm_Meristem_P Parameter: Organism Value: Zea mays
  misc_feature: MA Experiment 108535 PARAMETER Experiment Name: Zm_Meristem_P Parameter: Plant Line Value: 35A19
  misc_feature: MA Experiment 108535 PARAMETER Experiment Name: Zm_Meristem_P Parameter: Tissue Value: Root Meristem vs. Above Root Meristem
  misc_feature: MA Experiment ID: 108543 Result: Up-regulated in Transcription
  misc_feature: MA Experiment ID: 108545 Result: Down-regulated in Transcription
  misc_feature: MA Experiment 108545 PARAMETER Experiment Name: Zm_Imbibed_Seeds_P Parameter: Age (day) Value: 3 vs. 2
  misc_feature: MA Experiment 108545 PARAMETER Experiment Name: Zm_Imbibed_Seeds_P Parameter: Organism Value: Zea mays
  misc_feature: MA Experiment 108545 PARAMETER Experiment Name: Zm_Imbibed_Seeds_P Parameter: Plant Line Value: 35A19
  misc_feature: MA Experiment 108545 PARAMETER Experiment Name: Zm_Imbibed_Seeds_P Parameter: Tissue Value: Aerial vs. Embryo
  misc_feature: MA Experiment ID: 108546 Result: Up-regulated in Transcription
  misc_feature: MA Experiment 108546 PARAMETER Experiment Name: Zm_Imbibed_Seeds_P Parameter: Age (day) Value: 3 vs. 2
  misc_feature: MA Experiment 108546 PARAMETER Experiment Name: Zm_Imbibed_Seeds_P Parameter: Organism Value: Zea mays
  misc_feature: MA Experiment 108546 PARAMETER Experiment Name: Zm_Imbibed_Seeds_P Parameter: Plant Line Value: 35A19
  misc_feature: MA Experiment 108546 PARAMETER Experiment Name: Zm_Imbibed_Seeds_P Parameter: Tissue Value: Roots vs. Embryo
  misc_feature: MA Experiment ID: 108547 Result: Down-regulated in Transcription
  misc_feature: MA Experiment 108547 PARAMETER Experiment Name: Zm_Imbibed_Seeds_P Parameter: Age (day) Value: 4 vs. 2
  misc_feature: MA Experiment 108547 PARAMETER Experiment Name: Zm_Imbibed_Seeds_P Parameter: Organism Value: Zea mays
  misc_feature: MA Experiment 108547 PARAMETER Experiment Name: Zm_Imbibed_Seeds_P Parameter: Plant Line Value: 35A19
  misc_feature: MA Experiment 108547 PARAMETER Experiment Name: Zm_Imbibed_Seeds_P Parameter: Tissue Value: Aerial vs. Embryo
  misc_feature: MA Experiment ID: 108689 Result: Down-regulated in Transcription
  misc_feature: MA Experiment 108689 PARAMETER Experiment Name: Zm_Drought_Roots_P Parameter: Age (day) Value: 9
  misc_feature: MA Experiment 108689 PARAMETER Experiment Name: Zm_Drought_Roots_P Parameter: Organism Value: Zea mays
  misc_feature: MA Experiment 108689 PARAMETER Experiment Name: Zm_Drought_Roots_P Parameter: Plant Line Value: 35A19
  misc_feature: MA Experiment 108689 PARAMETER Experiment Name: Zm_Drought_Roots_P Parameter: Timepoint (hr) Value: 24
  misc_feature: MA Experiment 108689 PARAMETER Experiment Name: Zm_Drought_Roots_P Parameter: Tissue Value: Roots
  misc_feature: MA Experiment 108689 PARAMETER Experiment Name: Zm_Drought_Roots_P Parameter: Treatment Value: Drought vs. No Drought
  misc_feature: MA Experiment ID: 20000535 Result: Down-regulated in Transcription
  misc_feature: MA Experiment 20000535 PARAMETER Experiment Name: Zm_Hybrid_Seed_Dev_P Parameter: DAP Value: 30 vs. 12
  misc_feature: MA Experiment 20000535 PARAMETER Experiment Name: Zm_Hybrid_Seed_Dev_P Parameter: Organism Value: Zea mays
  misc_feature: MA Experiment 20000535 PARAMETER Experiment Name: Zm_Hybrid_Seed_Dev_P Parameter: Plant Line Value: 35A19
  misc_feature: MA Experiment 20000535 PARAMETER Experiment Name: Zm_Hybrid_Seed_Dev_P Parameter: Tissue Value: Embryo vs. Unfert Floret
  misc_feature: MA Experiment ID: 20000626 Result: Up-regulated in Transcription
  misc_feature: MA Experiment 20000626 PARAMETER Experiment Name: Zm_Herbicide-Treatments_P Parameter: Timepoint (hr) Value: 12
  misc_feature: MA Experiment 20000626 PARAMETER Experiment Name: Zm_Herbicide-Treatments_P Parameter: Tissue Value: Aerial
  misc_feature: MA Experiment 20000626 PARAMETER Experiment Name: Zm_Herbicide-Treatments_P Parameter: Treatment Value: Roundup vs. No Treatment
gcacgagaccattacctagaacatcctaatcaaaaatctcattctacagggaagacgaaaacacactgcagctggagcagcactgatatcgaccatggctccagcagcacctgcatctgcgacaaaatgcagcagcggcatcgtcatctctgtgctcttgcccctcgcgctgctaatggcggccgccggcacctcgtcggcgcagctgtccacgggcttctactcttcctcgtgtcccggcgtgtacgacgccgtcaagtcggtggtgcagtccgccgtcgccagcgagcagcgcatgggcgcctccatcgtccgcctcttcttccacgactgcttcgtccagggctgcgacgcgtcgctgctgctggacgacacgcctagcttccagggagagaagatggccaaccctaacaacggctccgtgaggggattcgaggtcatcgacgccgtcaagtccgccgtcgagaaggtgtgccccggcgtcgtctcctgcgccgacatcctcgccatcgccgccagggacagcgtcgtcatcctgggtggtccgacctgggacgtgaaggtcgggcggcgggactccacgacggcgagcttcagcggcgccaacaacaacatcccgccgccgacgtcgggcctcgccaacctcacgtcgctcttcgccgcccaaggcctctcccaaaaggacatggtcgcgctctccggagctcacaccatcggccaagcacgctgcaccaacttcagagcccacgtgtacaacgacaccaacatcgacggcagcttcgcaagaacaaggcagtcaggctgccctagatcgtcctcaggctcatcaggcgacaacaacctggcgccattggaccttcaaaccccgaccgtcttcgacaacaactactacaagaaccttgtctgcaagaaggggctcctgcactccgaccaggagctcttcaatggcggagccaccgacgcgctggtccagtcctacgccagtggccagagcgagttcttctcggactttgtgacgggcatggtgaagatgggtgacatcactccgttaactggctcccggtgggcagattaggaagaactgcagaagggtcaattaattaaccaattaataacaaggtcggccggcggtgcacactatctaacagggggcttgctttcagtcgttaattaagtttgtaatctttctacttcgtccacaaaattgtgagatcatcatgcatgttgtaccagccaaccaaggtgttgagacgatgttgttcgtcgtttgaataagtaatccatcatttgttcttctt

SEQ ID NO: 19028 - protein, 326 aa, Zea mays subsp. mays
  peptide (1)..(326): Ceres Seq. ID no. 12384331
  misc_feature (54)..(297): Pfam Name: Peroxidase Pfam Description: Peroxidase
  misc_feature (37)..(322): Homolog of NCBI NO: 464365 NR Description: Peroxidase P7 (TP7)
  misc_feature (13)..(322): Homolog of NCBI NO: 7433048 NR Description: probable peroxidase (EC 1.11.1.7) (clone PC44) -
  misc_feature (13)..(322): Homolog of NCBI NO: 15239075 NR Description: peroxidase, putative
  misc_feature (20)..(322): Homolog of NCBI NO: 19698446 NR Description: gaiacol peroxidase [Gossypium hirsutum]
  misc_feature (4)..(322): Homolog of NCBI NO: 39777532 NR Description: peroxidase precursor [Quercus suber]
  misc_feature (4)..(322): Homolog of NCBI NO: 39777536 NR Description: peroxidase precursor [Quercus suber]
  misc_feature (14)..(322): Homolog of NCBI NO: 5381253 NR Description: peroxidase [Nicotiana tabacum]
  misc_feature (32)..(323): Homolog of NCBI NO: 28400796 NR Description: peroxidase [Asparagus officinalis]
  misc_feature (23)..(322): Homolog of NCBI NO: 28400794 NR Description: peroxidase [Asparagus officinalis]
  misc_feature (21)..(321): Homolog of NCBI NO: 28400798 NR Description: peroxidase [Asparagus officinalis]
MAPAAPASATKCSSGIVISVLLPLALLMAAAGTSSAQLSTGFYSSSCPGVYDAVKSVVQSAVASEQRMGASIVRLFFHDCFVQGCDASLLLDDTPSFQGEKMANPNNGSVRGFEVIDAVKSAVEKVCPGVVSCADILAIAARDSVVILGGPTWDVKVGRRDSTTASFSGANNNIPPPTSGLANLTSLFAAQGLSQKDMVALSGAHTIGQARCTNFRAHVYNDTNIDGSFARTRQSGCPRSSSGSSGDNNLAPLDLQTPTVFDNNYYKNLVCKKGLLHSDQELFNGGATDALVQSYASGQSEFFSDFVTGMVKMGDITPLTGSRWAD

SEQ ID NO: 19029 - protein, 299 aa, Zea mays subsp. mays
  peptide (1)..(299): Ceres Seq. ID no. 12384332
  misc_feature (27)..(270): Pfam Name: Peroxidase Pfam Description: Peroxidase
  misc_feature (10)..(295): Homolog of NCBI NO: 464365 NR Description: Peroxidase P7 (TP7)
  misc_feature (1)..(295): Homolog of NCBI NO: 7433048 NR Description: probable peroxidase (EC 1.11.1.7) (clone PC44) -
  misc_feature (1)..(295): Homolog of NCBI NO: 15239075 NR Description: peroxidase, putative
  misc_feature (1)..(295): Homolog of NCBI NO: 19698446 NR Description: gaiacol peroxidase [Gossypium hirsutum]
  misc_feature (1)..(295): Homolog of NCBI NO: 39777532 NR Description: peroxidase precursor [Quercus suber]
  misc_feature (1)..(295): Homolog of NCBI NO: 39777536 NR Description: peroxidase precursor [Quercus suber]
  misc_feature (1)..(295): Homolog of NCBI NO: 5381253 NR Description: peroxidase [Nicotiana tabacum]
  misc_feature (5)..(296): Homolog of NCBI NO: 28400796 NR Description: peroxidase [Asparagus officinalis]
  misc_feature (1)..(295): Homolog of NCBI NO: 28400794 NR Description: peroxidase [Asparagus officinalis]
  misc_feature (1)..(294): Homolog of NCBI NO: 28400798 NR Description: peroxidase [Asparagus officinalis]
MAAAGTSSAQLSTGFYSSSCPGVYDAVKSVVQSAVASEQRMGASIVRLFFHDCFVQGCDASLLLDDTPSFQGEKMANPNNGSVRGFEVIDAVKSAVEKVCPGVVSCADILAIAARDSVVILGGPTWDVKVGRRDSTTASFSGANNNIPPPTSGLANLTSLFAAQGLSQKDMVALSGAHTIGQARCTNFRAHVYNDTNIDGSFARTRQSGCPRSSSGSSGDNNLAPLDLQTPTVFDNNYYKNLVCKKGLLHSDQELFNGGATDALVQSYASGQSEFFSDFVTGMVKMGDITPLTGSRWAD

SEQ ID NO: 19030 - protein, 259 aa, Zea mays subsp. mays
  peptide (1)..(259): Ceres Seq. ID no. 12384333
  misc_feature (1)..(230): Pfam Name: Peroxidase Pfam Description: Peroxidase
  misc_feature (1)..(255): Homolog of NCBI NO: 464365 NR Description: Peroxidase P7 (TP7)
  misc_feature (1)..(255): Homolog of NCBI NO: 7433048 NR Description: probable peroxidase (EC 1.11.1.7) (clone PC44) -
  misc_feature (1)..(255): Homolog of NCBI NO: 15239075 NR Description: peroxidase, putative
  misc_feature (1)..(255): Homolog of NCBI NO: 19698446 NR Description: gaiacol peroxidase [Gossypium hirsutum]
  misc_feature (1)..(255): Homolog of NCBI NO: 39777532 NR Description: peroxidase precursor [Quercus suber]
  misc_feature (1)..(255): Homolog of NCBI NO: 39777536 NR Description: peroxidase precursor [Quercus suber]
  misc_feature (1)..(255): Homolog of NCBI NO: 5381253 NR Description: peroxidase [Nicotiana tabacum]
  misc_feature (1)..(256): Homolog of NCBI NO: 28400796 NR Description: peroxidase [Asparagus officinalis]
  misc_feature (1)..(255): Homolog of NCBI NO: 28400794 NR Description: peroxidase [Asparagus officinalis]
  misc_feature (1)..(254): Homolog of NCBI NO: 28400798 NR Description: peroxidase [Asparagus officinalis]
MGASIVRLFFHDCFVQGCDASLLLDDTPSFQGEKMANPNNGSVRGFEVIDAVKSAVEKVCPGVVSCADILAIAARDSVVILGGPTWDVKVGRRDSTTASFSGANNNIPPPTSGLANLTSLFAAQGLSQKDMVALSGAHTIGQARCTNFRAHVYNDTNIDGSFARTRQSGCPRSSSGSSGDNNLAPLDLQTPTVFDNNYYKNLVCKKGLLHSDQELFNGGATDALVQSYASGQSEFFSDFVTGMVKMGDITPLTGSRWAD

SEQ ID NO: 19031 - DNA, 2440 bp, Zea mays subsp. mays
  misc_feature (1)..(2440): Ceres Seq. ID no. 12436117
  misc_feature: MA Experiment ID: 20000477 Result: Down-regulated in Transcription
  misc_feature: MA Experiment 20000477 PARAMETER Experiment Name: Zm_5mM_SA_P Parameter: Age (day) Value: 10
  misc_feature: MA Experiment 20000477 PARAMETER Experiment Name: Zm_5mM_SA_P Parameter: Organism Value: Zea mays
  misc_feature: MA Experiment 20000477 PARAMETER Experiment Name: Zm_5mM_SA_P Parameter: Plant Line Value: 35A19
  misc_feature: MA Experiment 20000477 PARAMETER Experiment Name: Zm_5mM_SA_P Parameter: Timepoint (hr) Value: 48
  misc_feature: MA Experiment 20000477 PARAMETER Experiment Name: Zm_5mM_SA_P Parameter: Tissue Value: Aerial
  misc_feature: MA Experiment 20000477 PARAMETER Experiment Name: Zm_5mM_SA_P Parameter: Treatment Value: 5mM SA vs. No Treatment
gcacgagaccattacctagaacatcctaatcgaaaaagctactctgtagattgacagagagacaagagcgctcttgctaccaatctcctcctcgtcgccgccgcggccgctctcgctcccacgatccggcgctgccacgagcttccagatccgccgcccgggcaatgctgtagctgcccgcgccgagatgggcggcgtcggcgccggctctctcgccctgctgcggctgctcctcctcctgctcctccgctccgaggcctccgctctccacggttgttctagttatatctgcaccgagccactgactgcaacaccaattggttccccttgtggctgtgtcgagcctattagtgttatcgttgatctggacttagctccttatctactgttcatgagcatagctgagttagaagttgaggttgcagctgggacatttcttaaacaaagccaggtgaagatcatggctgcagttgcaagtatccaggatgaccagaagacacgggtgaccatttatttggtgccgctaagagaacagttcgatacttatacggcatccctaatatctgataggttcatggagaaaaaggttcagataaattcatctatatttggagattataaagttatcaatatcagctatcatggattgcaatccccgccatcatctctgcctggaggatcggatccttcaggaactgaagaatatcctataactgcagaggtgcctgatcagaagaaaaagcacaataaatcagatattttggtcatcgtggtagtgttagggtcttctcttggacttctgatgacatgtgctgttgtgctgatcttactagtaagatggaagaaacttggacggcttcatgaggctatgacccctgcaactatcccagcagttaatagaagatatggcaccaggccaactttgtcaaccagcatggtgagctctgcgtcagcatcagtgttttcaacagtggctacttgcacaacatctgtaaagacattttcactagcccaacttcagaaggccacagatggttttgattcaagaagagttttgggtcaagggggctttgggcgtgtctaccatgggacgatagaggatggaaacgaaattgctgttaaattgcttacaagggaggacaggagtggtgaccgtgagtttattgcagaagtggaaatgctcagtcgattgcaccaccggaatcttgtcaaattgattggtatttgcattgagcggagtaaaaggtgtcttgtgtatgagctcatacgaaacggaagtgtggaatcccatcttcatggcgctgacaaggctaagggtaagctgaactgggatgttaggatgaaaattgctcttggcgctgctcgaggcttagcatatctgcatgaagattcaaaccctcatgtcatacaccgtgacttcaaggccagtaatatattattagaggaagatttcactcctaaagtgaccgattttggtttagcaagggaagcatccaatgcgactcaacctatatctaccagggtaatgggtactttcggttatgttgctccagaatatgcaatgacgggccatcttcttgttaaaagcgatgtttacagttatggggttgtcttgctggaacttatatcaggaaggaagcctgtaaacatctctgagtccaaggatcctgagaaccttgtaacttgggcccgtcctctgctaagccataaggagggcctggagaagttaattgatccgtctctggatggaaattttaacttcgacaatgtagcgaaggtggcatccatcgcttccatgtgtgtgcacacagatccatcgcagaggccgtttatgggtgaagttgtccaggcactgaagctgatctacaatgatccagatgaggcttgcgacgattcctacagtccaaggaattcatctgatcaagacggtgactacgaaggagacctggtctttgagagtggaagctggggctttggggcctctgggtgtctagactaccggaattccttaccgtttgtcactatggactacagttctggccgaatagaagggccgcacgaccctcgcgcggcattgtcagcgggatcccatgcccagtcaccagtgctgctgaatagatcaggccccttgcggatgaagaagaagctggcctccttctaccgctctagaggcagcattagtgagcatgggcacctgccgcgccattgatcagtcagtgaactagtgttaggctgttagcttcggttgactctgggattgaggctggcgggggttgtcactacctgattcgtgcctcatgttagtgtacagttcgtggtgacccttcacccttgggtatgggtgttttttttctctctttgccttctgcttcttccccggaagcaatgaggatggggttggcaggtgctctctaattttcgcaaattgcggttcatttct

SEQ ID NO: 19032 - protein, 673 aa, Zea mays subsp. mays
  peptide (1)..(673): Ceres Seq. ID no. 12436118
  misc_feature (284)..(485): Pfam Name: Protein kinase domain Pfam Description: Protein kinase domain
  misc_feature (155)..(557): Homolog of NCBI NO: 15221470 NR Description: protein kinase, putative
  misc_feature (117)..(606): Homolog of NCBI NO: 30679031 NR Description: protein kinase family [Arabidopsis thaliana]
  misc_feature (117)..(606): Homolog of NCBI NO: 7488203 NR Description: probable serine/threonine-specific protein kinase
  misc_feature (106)..(592): Homolog of NCBI NO: 34902828 NR Description: unnamed protein product [Oryza sativa (japonica
  misc_feature (73)..(565): Homolog of NCBI NO: 34910468 NR Description: putative protein kinase [Oryza sativa (japonica
  misc_feature (37)..(584): Homolog of NCBI NO: 34903544 NR Description: putative protein kinase APK1AArabidopsis thaliana
  misc_feature (247)..(668): Homolog of NCBI NO: 25287641 NR Description: probable protein kinase [imported] - Arabidopsis
  misc_feature (30)..(668): Homolog of NCBI NO: 22327898 NR Description: Expressed protein
  misc_feature (30)..(668): Homolog of NCBI NO: 20453162 NR Description: At5g56885 [Arabidopsis thaliana]
  misc_feature (20)..(668): Homolog of NCBI NO: 30680947 NR Description: protein kinase family [Arabidopsis thaliana]
MGGVGAGSLALLRLLLLLLLRSEASALHGCSSYICTEPLTATPIGSPCGCVEPISVIVDLDLAPYLLFMSIAELEVEVAAGTFLKQSQVKIMAAVASIQDDQKTRVTIYLVPLREQFDTYTASLISDRFMEKKVQINSSIFGDYKVINISYHGLQSPPSSLPGGSDPSGTEEYPITAEVPDQKKKHNKSDILVIVVVLGSSLGLLMTCAVVLILLVRWKKLGRLHEAMTPATIPAVNRRYGTRPTLSTSMVSSASASVFSTVATCTTSVKTFSLAQLQKATDGFDSRRVLGQGGFGRVYHGTIEDGNEIAVKLLTREDRSGDREFIAEVEMLSRLHHRNLVKLIGICIERSKRCLVYELIRNGSVESHLHGADKAKGKLNWDVRMKIALGAARGLAYLHEDSNPHVIHRDFKASNILLEEDFTPKVTDFGLAREASNATQPISTRVMGTFGYVAPEYAMTGHLLVKSDVYSYGVVLLELISGRKPVNISESKDPENLVTWARPLLSHKEGLEKLIDPSLDGNFNFDNVAKVASIASMCVHTDPSQRPFMGEVVQALKLIYNDPDEACDDSYSPRNSSDQDGDYEGDLVFESGSWGFGASGCLDYRNSLPFVTMDYSSGRIEGPHDPRAALSAGSHAQSPVLLNRSGPLRMKKKLASFYRSRGSISEHGHLPRH

SEQ ID NO: 19033 - protein, 605 aa, Zea mays subsp. mays
  peptide (1)..(605): Ceres Seq. ID no. 12436119
  misc_feature (216)..(417): Pfam Name: Protein kinase domain Pfam Description: Protein kinase domain
  misc_feature (87)..(489): Homolog of NCBI NO: 15221470 NR Description: protein kinase, putative
  misc_feature (49)..(538): Homolog of NCBI NO: 30679031 NR Description: protein kinase family [Arabidopsis thaliana]
  misc_feature (49)..(538): Homolog of NCBI NO: 7488203 NR Description: probable serine/threonine-specific protein kinase
  misc_feature (38)..(524): Homolog of NCBI NO: 34902828 NR Description: unnamed protein product [Oryza sativa (japonica
  misc_feature (5)..(497): Homolog of NCBI NO: 34910468 NR Description: putative protein kinase [Oryza sativa (japonica
  misc_feature (1)..(516): Homolog of NCBI NO: 34903544 NR Description: putative protein kinase APK1AArabidopsis thaliana
  misc_feature (179)..(600): Homolog of NCBI NO: 25287641 NR Description: probable protein kinase [imported] - Arabidopsis
  misc_feature (1)..(600): Homolog of NCBI NO: 22327898 NR Description: Expressed protein
  misc_feature (1)..(600): Homolog of NCBI NO: 20453162 NR Description: At5g56885 [Arabidopsis thaliana]
  misc_feature (1)..(600): Homolog of NCBI NO: 30680947 NR Description: protein kinase family [Arabidopsis thaliana]
MSIAELEVEVAAGTFLKQSQVKIMAAVASIQDDQKTRVTIYLVPLREQFDTYTASLISDRFMEKKVQINSSIFGDYKVINISYHGLQSPPSSLPGGSDPSGTEEYPITAEVPDQKKKHNKSDILVIVVVLGSSLGLLMTCAVVLILLVRWKKLGRLHEAMTPATIPAVNRRYGTRPTLSTSMVSSASASVFSTVATCTTSVKTFSLAQLQKATDGFDSRRVLGQGGFGRVYHGTIEDGNEIAVKLLTREDRSGDREFIAEVEMLSRLHHRNLVKLIGICIERSKRCLVYELIRNGSVESHLHGADKAKGKLNWDVRMKIALGAARGLAYLHEDSNPHVIHRDFKASNILLEEDFTPKVTDFGLAREASNATQPISTRVMGTFGYVAPEYAMTGHLLVKSDVYSYGVVLLELISGRKPVNISESKDPENLVTWARPLLSHKEGLEKLIDPSLDGNFNFDNVAKVASIASMCVHTDPSQRPFMGEVVQALKLIYNDPDEACDDSYSPRNSSDQDGDYEGDLVFESGSWGFGASGCLDYRNSLPFVTMDYSSGRIEGPHDPRAALSAGSHAQSPVLLNRSGPLRMKKKLASFYRSRGSISEHGHLPRH

SEQ ID NO: 19034 - protein, 582 aa, Zea mays subsp. mays
  peptide (1)..(582): Ceres Seq. ID no. 12436120
  misc_feature (193)..(394): Pfam Name: Protein kinase domain Pfam Description: Protein kinase domain
  misc_feature (64)..(466): Homolog of NCBI NO: 15221470 NR Description: protein kinase, putative
  misc_feature (26)..(515): Homolog of NCBI NO: 30679031 NR Description: protein kinase family [Arabidopsis thaliana]
  misc_feature (26)..(515): Homolog of NCBI NO: 7488203 NR Description: probable serine/threonine-specific protein kinase
  misc_feature (15)..(501): Homolog of NCBI NO: 34902828 NR Description: unnamed protein product [Oryza sativa (japonica
  misc_feature (1)..(474): Homolog of NCBI NO: 34910468 NR Description: putative protein kinase [Oryza sativa (japonica
  misc_feature (1)..(493): Homolog of NCBI NO: 34903544 NR Description: putative protein kinase APK1AArabidopsis thaliana
  misc_feature (156)..(577): Homolog of NCBI NO: 25287641 NR Description: probable protein kinase [imported] - Arabidopsis
  misc_feature (1)..(577): Homolog of NCBI NO: 22327898 NR Description: Expressed protein
  misc_feature (1)..(577): Homolog of NCBI NO: 20453162 NR Description: At5g56885 [Arabidopsis thaliana]
  misc_feature (1)..(577): Homolog of NCBI NO: 30680947 NR Description: protein kinase family [Arabidopsis thaliana]
MAAVASIQDDQKTRVTIYLVPLREQFDTYTASLISDRFMEKKVQINSSIFGDYKVINISYHGLQSPPSSLPGGSDPSGTEEYPITAEVPDQKKKHNKSDILVIVVVLGSSLGLLMTCAVVLILLVRWKKLGRLHEAMTPATIPAVNRRYGTRPTLSTSMVSSASASVFSTVATCTTSVKTFSLAQLQKATDGFDSRRVLGQGGFGRVYHGTIEDGNEIAVKLLTREDRSGDREFIAEVEMLSRLHHRNLVKLIGICIERSKRCLVYELIRNGSVESHLHGADKAKGKLNWDVRMKIALGAARGLAYLHEDSNPHVIHRDFKASNILLEEDFTPKVTDFGLAREASNATQPISTRVMGTFGYVAPEYAMTGHLLVKSDVYSYGVVLLELISGRKPVNISESKDPENLVTWARPLLSHKEGLEKLIDPSLDGNFNFDNVAKVASIASMCVHTDPSQRPFMGEVVQALKLIYNDPDEACDDSYSPRNSSDQDGDYEGDLVFESGSWGFGASGCLDYRNSLPFVTMDYSSGRIEGPHDPRAALSAGSHAQSPVLLNRSGPLRMKKKLASFYRSRGSISEHGHLPRH

SEQ ID NO: 19035 - DNA, 1796 bp, Zea mays subsp. mays
  misc_feature (1)..(1796): Ceres Seq. ID no. 13586203
  misc_feature: MA Experiment ID: 108523 Result: Down-regulated in Transcription
  misc_feature: MA Experiment 108523 PARAMETER Experiment Name: Zm_42deg_Heat_P Parameter: Age (day) Value: 8
  misc_feature: MA Experiment 108523 PARAMETER Experiment Name: Zm_42deg_Heat_P Parameter: Organism Value: Zea mays
  misc_feature: MA Experiment 108523 PARAMETER Experiment Name: Zm_42deg_Heat_P Parameter: Plant Line Value: 35A19
  misc_feature: MA Experiment 108523 PARAMETER Experiment Name: Zm_42deg_Heat_P Parameter: Temperature (deg C) Value: 42 vs. 22
  misc_feature: MA Experiment 108523 PARAMETER Experiment Name: Zm_42deg_Heat_P Parameter: Timepoint (hr) Value: 6
  misc_feature: MA Experiment 108523 PARAMETER Experiment Name: Zm_42deg_Heat_P Parameter: Tissue Value: Aerial
  misc_feature: MA Experiment ID: 108527 Result: Down-regulated in Transcription
  misc_feature: MA Experiment 108527 PARAMETER Experiment Name: Zm_5mM_NO_P Parameter: Age (day) Value: 8
  misc_feature: MA Experiment 108527 PARAMETER Experiment Name: Zm_5mM_NO_P Parameter: Organism Value: Zea mays
  misc_feature: MA Experiment 108527 PARAMETER Experiment Name: Zm_5mM_NO_P Parameter: Plant Line Value: 35A19
  misc_feature: MA Experiment 108527 PARAMETER Experiment Name: Zm_5mM_NO_P Parameter: Timepoint (hr) Value: 6
  misc_feature: MA Experiment 108527 PARAMETER Experiment Name: Zm_5mM_NO_P Parameter: Tissue Value: Aerial
  misc_feature: MA Experiment 108527 PARAMETER Experiment Name: Zm_5mM_NO_P Parameter: Treatment Value: 5mM NO vs. No Treatment
  misc_feature: MA Experiment ID: 108528 Result: Down-regulated in Transcription
  misc_feature: MA Experiment 108528 PARAMETER Experiment Name: Zm_Imbibed_Seeds_P Parameter: Age (day) Value: 5 vs. 2
  misc_feature: MA Experiment 108528 PARAMETER Experiment Name: Zm_Imbibed_Seeds_P Parameter: Organism Value: Zea mays
  misc_feature: MA Experiment 108528 PARAMETER Experiment Name: Zm_Imbibed_Seeds_P Parameter: Plant Line Value: 35A19
  misc_feature: MA Experiment 108528 PARAMETER Experiment Name: Zm_Imbibed_Seeds_P Parameter: Tissue Value: Aerial vs. Embryo
  misc_feature: MA Experiment ID: 108529 Result: Down-regulated in Transcription
  misc_feature: MA Experiment 108529 PARAMETER Experiment Name: Zm_Imbibed_Seeds_P Parameter: Age (day) Value: 5 vs. 2
  misc_feature: MA Experiment 108529 PARAMETER Experiment Name: Zm_Imbibed_Seeds_P Parameter: Organism Value: Zea mays
  misc_feature: MA Experiment 108529 PARAMETER Experiment Name: Zm_Imbibed_Seeds_P Parameter: Plant Line Value: 35A19
  misc_feature: MA Experiment 108529 PARAMETER Experiment Name: Zm_Imbibed_Seeds_P Parameter: Tissue Value: Roots vs. Embryo
  misc_feature: MA Experiment ID: 108530 Result: Down-regulated in Transcription
  misc_feature: MA Experiment 108530 PARAMETER Experiment Name: Zm_Imbibed_Seeds_P Parameter: Age (day) Value: 6 vs. 2
  misc_feature: MA Experiment 108530 PARAMETER Experiment Name: Zm_Imbibed_Seeds_P Parameter: Organism Value: Zea mays
  misc_feature: MA Experiment 108530 PARAMETER Experiment Name: Zm_Imbibed_Seeds_P Parameter: Plant Line Value: 35A19
  misc_feature: MA Experiment 108530 PARAMETER Experiment Name: Zm_Imbibed_Seeds_P Parameter: Tissue Value: Aerial vs. Embryo
  misc_feature: MA Experiment ID: 108536 Result: Up-regulated in Transcription
  misc_feature: MA Experiment 108536 PARAMETER Experiment Name: Zm_Meristem_P Parameter: Age (day) Value: 8
  misc_feature: MA Experiment 108536 PARAMETER Experiment Name: Zm_Meristem_P Parameter: Organism Value: Zea mays
  misc_feature: MA Experiment 108536 PARAMETER Experiment Name: Zm_Meristem_P Parameter: Plant Line Value: 35A19
  misc_feature: MA Experiment 108536 PARAMETER Experiment Name: Zm_Meristem_P Parameter: Tissue Value: Shoot Meristem vs. Above Shoot Meristem
  misc_feature: MA Experiment ID: 108543 Result: Up-regulated in Transcription
  misc_feature: MA Experiment ID: 108544 Result: Up-regulated in Transcription
  misc_feature: MA Experiment ID: 108559 Result: Down-regulated in Transcription
  misc_feature: MA Experiment 108559 PARAMETER Experiment Name: Zm_5mM_NO_P Parameter: Age (day) Value: 8
  misc_feature: MA Experiment 108559 PARAMETER Experiment Name: Zm_5mM_NO_P Parameter: Organism Value: Zea mays
  misc_feature: MA Experiment 108559 PARAMETER Experiment Name: Zm_5mM_NO_P Parameter: Plant Line Value: 35A19
  misc_feature: MA Experiment 108559 PARAMETER Experiment Name: Zm_5mM_NO_P Parameter: Timepoint (hr) Value: 12
  misc_feature: MA Experiment 108559 PARAMETER Experiment Name: Zm_5mM_NO_P Parameter: Tissue Value: Aerial
  misc_feature: MA Experiment 108559 PARAMETER Experiment Name: Zm_5mM_NO_P Parameter: Treatment Value: 5mM NO vs. No Treatment
  misc_feature: MA Experiment ID: 20000477 Result: Down-regulated in Transcription
  misc_feature: MA Experiment 20000477 PARAMETER Experiment Name: Zm_5mM_SA_P Parameter: Age (day) Value: 10
  misc_feature: MA Experiment 20000477 PARAMETER Experiment Name: Zm_5mM_SA_P Parameter: Organism Value: Zea mays
  misc_feature: MA Experiment 20000477 PARAMETER Experiment Name: Zm_5mM_SA_P Parameter: Plant Line Value: 35A19
  misc_feature: MA Experiment 20000477 PARAMETER Experiment Name: Zm_5mM_SA_P Parameter: Timepoint (hr) Value: 48
  misc_feature: MA Experiment 20000477 PARAMETER Experiment Name: Zm_5mM_SA_P Parameter: Tissue Value: Aerial
  misc_feature: MA Experiment 20000477 PARAMETER Experiment Name: Zm_5mM_SA_P Parameter: Treatment Value: 5mM SA vs. No Treatment
  misc_feature: MA Experiment ID: 20000479 Result: Down-regulated in Transcription
  misc_feature: MA Experiment 20000479 PARAMETER Experiment Name: Zm_Drought_P Parameter: Age (day) Value: 10
  misc_feature: MA Experiment 20000479 PARAMETER Experiment Name: Zm_Drought_P Parameter: Organism Value: Zea mays
  misc_feature: MA Experiment 20000479 PARAMETER Experiment Name: Zm_Drought_P Parameter: Plant Line Value: 35A19
  misc_feature: MA Experiment 20000479 PARAMETER Experiment Name: Zm_Drought_P Parameter: Timepoint (hr) Value: 48
  misc_feature: MA Experiment 20000479 PARAMETER Experiment Name: Zm_Drought_P Parameter: Tissue Value: Aerial
  misc_feature: MA Experiment 20000479 PARAMETER Experiment Name: Zm_Drought_P Parameter: Treatment Value: Drought vs. No Drought
  misc_feature: MA Experiment ID: 20000480 Result: Down-regulated in Transcription
  misc_feature: MA Experiment 20000480 PARAMETER Experiment Name: Zm_Drought_P Parameter: Age (day) Value: 11
  misc_feature: MA Experiment 20000480 PARAMETER Experiment Name: Zm_Drought_P Parameter: Organism Value: Zea mays
  misc_feature: MA Experiment 20000480 PARAMETER Experiment Name: Zm_Drought_P Parameter: Plant Line Value: 35A19
  misc_feature: MA Experiment 20000480 PARAMETER Experiment Name: Zm_Drought_P Parameter: Timepoint (hr) Value: 72
  misc_feature: MA Experiment 20000480 PARAMETER Experiment Name: Zm_Drought_P Parameter: Tissue Value: Aerial
  misc_feature: MA Experiment 20000480 PARAMETER Experiment Name: Zm_Drought_P Parameter: Treatment Value: Drought vs. No Drought
  misc_feature: MA Experiment ID: 20000492 Result: Up-regulated in Transcription
  misc_feature: MA Experiment 20000492 PARAMETER Experiment Name: Zm_Hybrid_Seed_Dev_P Parameter: DAP Value: 12
  misc_feature: MA Experiment 20000492 PARAMETER Experiment Name: Zm_Hybrid_Seed_Dev_P Parameter: Organism Value: Zea mays
  misc_feature: MA Experiment 20000492 PARAMETER Experiment Name: Zm_Hybrid_Seed_Dev_P Parameter: Plant Line Value: 35A19
  misc_feature: MA Experiment 20000492 PARAMETER Experiment Name: Zm_Hybrid_Seed_Dev_P Parameter: Tissue Value: Fert Kernel vs. Unfert Floret
  misc_feature: MA Experiment ID: 20000535 Result: Up-regulated in Transcription
  misc_feature: MA Experiment 20000535 PARAMETER Experiment Name: Zm_Hybrid_Seed_Dev_P Parameter: DAP Value: 30 vs. 12
  misc_feature: MA Experiment 20000535 PARAMETER Experiment Name: Zm_Hybrid_Seed_Dev_P Parameter: Organism Value: Zea mays
  misc_feature: MA Experiment 20000535 PARAMETER Experiment Name: Zm_Hybrid_Seed_Dev_P Parameter: Plant Line Value: 35A19
  misc_feature: MA Experiment 20000535 PARAMETER Experiment Name: Zm_Hybrid_Seed_Dev_P Parameter: Tissue Value: Embryo vs. Unfert Floret
ggctggcggttgctctcctcctctcccctgccctcgcaaacgcacgcaccacagcatcgtccttcgttccattcccatccataccccctcgatcggccgggatgctgggtgtggggatggccgcggcggtgctgctcggggccgtggcgttgctgctcgcggacgccgctgcgaggagagcgcactggtggtacagggaggcggctgaggcggtgctggtcggcgccgtggctttggtggtggtggacgccgcggcgcggagggcgcacgggtggtacagggaagcggcgctgggcgcggcgcggcgggcgcggctgccgccgggggagatggggtggcccttggtcggcggcatgtgggccttcctccgcgccttcaagtccggcaagcccgacgccttcatcgcctccttcgtccggcggttcggtcgcacgggcgtgtaccgaagcttcatgttcagcagcccgactgtgctggtgacgacggcggaggggtgcaagcaggtgctgatggacgacgacgcgttcgtgacggggtggcccaaggcgacggttgcgctggtcgggccgcggtcgttcgtggcgatgccgtacgacgagcaccggcgcatccgcaagctgactgccgcgcccatcaacggcttcgacgcgctgacggggtacctgcccttcatcgaccgcaccgtcacgtcgtcgctgcgcgcgtgggcggaccacggcggcagcgtcgagttcctgacggagctgcggcgcatgacgttcaagatcatcgtgcagatcttcctgggcggcgcggaccaggccaccacgcgcgcgctggagcgcagctacacggagctcaactacggcatgcgcgccatggccatcaacctgcccggcttcgcgtaccgcggggcgctgcgcgcgcgccgccgcctcgtggccgtgctgcagggcgtgctggacgagcgccgcgccgccagggccaagggggtctcgggcggaggagtggacatgatggaccggctgatcgaggcccaggacgagcgcgggcggcacctggacgacgacgagatcatcgacgtgctcgtcatgtacctcaacgccggccacgagtcgtccggccacatcaccatgtgggccaccgtgttcctgcaggagaacccggacatgttcgcgagagcaaaggcggagcaggaggcgatcatgaggagcatcccgtcgtcgcagcgggggctgacgctcagggacttcaggaagatggagtacctgtcgcaggtgatcgacgagacgctgcggctcgtcaacatctccttcgtctccttccgtcaggccaccagagacgtcttcgtgaacggatacctcatccccaaggggtggaaggttcagctctggtaccggagcgtgcacatggacccacaggtgtaccctgaccccaccaagttcgacccgtcgagatgggagggccactcgccgagagccggcacgttcctggcgttcgggctgggcgccaggctctgccccggcaacgacctcgccaagctggagatttccgtcttcctccaccacttcctcctcggctacaagctggcgaggacgaaccctaggtgccgggtgaggtacctcccgcacccgaggccggtggacaactgcttggccaagatcaccagagtcggtagctagctgctagattgtgatggaagtacgaatgaaaaaaaagcccagcagaaactctagcggctgggccggctggaaattatgggccgggccattgtggttgccccccctgtctgtgcaaaaataaaacaagcagaaagg

SEQ ID NO: 19036 - protein, 552 aa, Zea mays subsp. mays
  peptide (1)..(552): Ceres Seq. ID no. 13586204
  misc_feature (67)..(521): Homolog of NCBI NO: 34903584 NR Description: cytochrome P450-like protein
  misc_feature (97)..(490): Homolog of NCBI NO: 17980337 NR Description: DWARF3 [Zea mays subsp. mays]
  misc_feature (97)..(490): Homolog of NCBI NO: 17980335 NR Description: DWARF3 [Zea mays subsp. mays]
  misc_feature (97)..(490): Homolog of NCBI NO: 17980343 NR Description: DWARF3 [Zea mays subsp. mays]
  misc_feature (97)..(490): Homolog of NCBI NO: 17980396 NR Description: DWARF3 [Zea mays subsp. mays]
  misc_feature (97)..(490): Homolog of NCBI NO: 17980331 NR Description: DWARF3 [Zea mays subsp. mays]
  misc_feature (97)..(490): Homolog of NCBI NO: 17980355 NR Description: DWARF3 [Zea mays subsp. mays]
  misc_feature (97)..(490): Homolog of NCBI NO: 17980376 NR Description: DWARF3 [Zea mays subsp. mays]
  misc_feature (62)..(552): Homolog of NCBI NO: 13022042 NR Description: ent-kaurenoic acid oxidase [Hordeum vulgare]
  misc_feature (34)..(552): Homolog of NCBI NO: 5915847 NR Description: Cytochrome P450 88A1 (Dwarf3 protein)
LAVALLLSPALANARTTASSFVPFPSIPPRSAGMLGVGMAAAVLLGAVALLLADAAARRAHWWYREAAEAVLVGAVALVVVDAAARRAHGWYREAALGAARRARLPPGEMGWPLVGGMWAFLRAFKSGKPDAFIASFVRRFGRTGVYRSFMFSSPTVLVTTAEGCKQVLMDDDAFVTGWPKATVALVGPRSFVAMPYDEHRRIRKLTAAPINGFDALTGYLPFIDRTVTSSLRAWADHGGSVEFLTELRRMTFKIIVQIFLGGADQATTRALERSYTELNYGMRAMAINLPGFAYRGALRARRRLVAVLQGVLDERRAARAKGVSGGGVDMMDRLIEAQDERGRHLDDDEIIDVLVMYLNAGHESSGHITMWATVFLQENPDMFARAKAEQEAIMRSIPSSQRGLTLRDFRKMEYLSQVIDETLRLVNISFVSFRQATRDVFVNGYLIPKGWKVQLWYRSVHMDPQVYPDPTKFDPSRWEGHSPRAGTFLAFGLGARLCPGNDLAKLEISVFLHHFLLGYKLARTNPRCRVRYLPHPRPVDNCLAKITRVGS

SEQ ID NO: 19037 - protein, 519 aa, Zea mays subsp. mays
  peptide (1)..(519): Ceres Seq. ID no. 13586205
  misc_feature (34)..(488): Homolog of NCBI NO: 34903584 NR Description: cytochrome P450-like protein
  misc_feature (64)..(457): Homolog of NCBI NO: 17980337 NR Description: DWARF3 [Zea mays subsp. mays]
  misc_feature (64)..(457): Homolog of NCBI NO: 17980335 NR Description: DWARF3 [Zea mays subsp. mays]
  misc_feature (64)..(457): Homolog of NCBI NO: 17980343 NR Description: DWARF3 [Zea mays subsp. mays]
  misc_feature (64)..(457): Homolog of NCBI NO: 17980396 NR Description: DWARF3 [Zea mays subsp. mays]
  misc_feature (64)..(457): Homolog of NCBI NO: 17980331 NR Description: DWARF3 [Zea mays subsp. mays]
  misc_feature (64)..(457): Homolog of NCBI NO: 17980355 NR Description: DWARF3 [Zea mays subsp. mays]
  misc_feature (64)..(457): Homolog of NCBI NO: 17980376 NR Description: DWARF3 [Zea mays subsp. mays]
  misc_feature (29)..(519): Homolog of NCBI NO: 13022042 NR Description: ent-kaurenoic acid oxidase [Hordeum vulgare]
  misc_feature (1)..(519): Homolog of NCBI NO: 5915847 NR Description: Cytochrome P450 88A1 (Dwarf3 protein)
MLGVGMAAAVLLGAVALLLADAAARRAHWWYREAAEAVLVGAVALVVVDAAARRAHGWYREAALGAARRARLPPGEMGWPLVGGMWAFLRAFKSGKPDAFIASFVRRFGRTGVYRSFMFSSPTVLVTTAEGCKQVLMDDDAFVTGWPKATVALVGPRSFVAMPYDEHRRIRKLTAAPINGFDALTGYLPFIDRTVTSSLRAWADHGGSVEFLTELRRMTFKIIVQIFLGGADQATTRALERSYTELNYGMRAMAINLPGFAYRGALRARRRLVAVLQGVLDERRAARAKGVSGGGVDMMDRLIEAQDERGRHLDDDEIIDVLVMYLNAGHESSGHITMWATVFLQENPDMFARAKAEQEAIMRSIPSSQRGLTLRDFRKMEYLSQVIDETLRLVNISFVSFRQATRDVFVNGYLIPKGWKVQLWYRSVHMDPQVYPDPTKFDPSRWEGHSPRAGTFLAFGLGARLCPGNDLAKLEISVFLHHFLLGYKLARTNPRCRVRYLPHPRPVDNCLAKITRVGS

SEQ ID NO: 19038 - protein, 514 aa, Zea mays subsp. mays
  peptide (1)..(514): Ceres Seq. ID no. 13586206
  misc_feature (29)..(483): Homolog of NCBI NO: 34903584 NR Description: cytochrome P450-like protein
  misc_feature (59)..(452): Homolog of NCBI NO: 17980337 NR Description: DWARF3 [Zea mays subsp. mays]
  misc_feature (59)..(452): Homolog of NCBI NO: 17980335 NR Description: DWARF3 [Zea mays subsp. mays]
  misc_feature (59)..(452): Homolog of NCBI NO: 17980343 NR Description: DWARF3 [Zea mays subsp. mays]
  misc_feature (59)..(452): Homolog of NCBI NO: 17980396 NR Description: DWARF3 [Zea mays subsp. mays]
  misc_feature (59)..(452): Homolog of NCBI NO: 17980331 NR Description: DWARF3 [Zea mays subsp. mays]
  misc_feature (59)..(452): Homolog of NCBI NO: 17980355 NR Description: DWARF3 [Zea mays subsp. mays]
  misc_feature (59)..(452): Homolog of NCBI NO: 17980376 NR Description: DWARF3 [Zea mays subsp. mays]
  misc_feature (24)..(514): Homolog of NCBI NO: 13022042 NR Description: ent-kaurenoic acid oxidase [Hordeum vulgare]
  misc_feature (1)..(514): Homolog of NCBI NO: 5915847 NR Description: Cytochrome P450 88A1 (Dwarf3 protein)
MAAAVLLGAVALLLADAAARRAHWWYREAAEAVLVGAVALVVVDAAARRAHGWYREAALGAARRARLPPGEMGWPLVGGMWAFLRAFKSGKPDAFIASFVRRFGRTGVYRSFMFSSPTVLVTTAEGCKQVLMDDDAFVTGWPKATVALVGPRSFVAMPYDEHRRIRKLTAAPINGFDALTGYLPFIDRTVTSSLRAWADHGGSVEFLTELRRMTFKIIVQIFLGGADQATTRALERSYTELNYGMRAMAINLPGFAYRGALRARRRLVAVLQGVLDERRAARAKGVSGGGVDMMDRLIEAQDERGRHLDDDEIIDVLVMYLNAGHESSGHITMWATVFLQENPDMFARAKAEQEAIMRSIPSSQRGLTLRDFRKMEYLSQVIDETLRLVNISFVSFRQATRDVFVNGYLIPKGWKVQLWYRSVHMDPQVYPDPTKFDPSRWEGHSPRAGTFLAFGLGARLCPGNDLAKLEISVFLHHFLLGYKLARTNPRCRVRYLPHPRPVDNCLAKITRVGS

SEQ ID NO: 19039 - DNA, 1980 bp, Zea mays subsp. mays; identical to SEQ ID NO: 7985
  misc_feature (1)..(1980): Ceres Seq. ID no. 13567373
  misc_feature: MA Experiment ID: 108544 Result: Up-regulated in Transcription

SEQ ID NO: 19040 - protein, 474 aa, Zea mays subsp. mays; identical to SEQ ID NO: 7986
  peptide (1)..(474): Ceres Seq. ID no. 13567374
  misc_feature (43)..(461): Pfam Name: Serine carboxypeptidase Pfam Description: Serine carboxypeptidase
  misc_feature (39)..(474): Homolog of NCBI NO: 2493494 NR Description: Serine carboxypeptidase II-2 precursor (CP-MII.2)
  misc_feature (4)..(473): Homolog of NCBI NO: 18417667 NR Description: serine carboxypeptidase -related [Arabidopsis >gi|15293049|gb|AAK93635.1| putative serine carboxypeptidase II thaliana] >gi|22136958|gb|AAM91708.1| putative serine
  misc_feature (5)..(474): Homolog of NCBI NO: 34895992 NR Description: putative carboxypeptidase D [Oryza sativa
  misc_feature (1)..(467): Homolog of NCBI NO: 34908012 NR Description: putative carboxypeptidase D [Oryza sativa
  misc_feature (12)..(466): Homolog of NCBI NO: 15231911 NR Description: serine carboxypeptidase -related [Arabidopsis >gi|6648211|gb|AAF21209.1|AC013483_33 putative serine
  misc_feature (1)..(465): Homolog of NCBI NO: 7428204 NR Description: carboxypeptidase D (EC 3.4.16.6) precursor -
  misc_feature (1)..(465): Homolog of NCBI NO: 20455471 NR Description: Serine carboxypeptidase II precursor
  misc_feature (31)..(466): Homolog of NCBI NO: 15227493 NR Description: serine carboxypeptidase -related [Arabidopsis
  misc_feature (13)..(465): Homolog of NCBI NO: 13877871 NR Description: putative serine carboxypeptidase II [Arabidopsis
  misc_feature (13)..(465): Homolog of NCBI NO: 15234795 NR Description: serine carboxypeptidase -related [Arabidopsis

SEQ ID NO: 19041 - protein, 257 aa, Zea mays subsp. mays; identical to SEQ ID NO: 7987
  peptide (1)..(257): Ceres Seq. ID no. 13567375
  misc_feature (1)..(244): Pfam Name: Serine carboxypeptidase Pfam Description: Serine carboxypeptidase
  misc_feature (1)..(257): Homolog of NCBI NO: 2493494 NR Description: Serine carboxypeptidase II-2 precursor (CP-MII.2)
  misc_feature (1)..(256): Homolog of NCBI NO: 18417667 NR Description: serine carboxypeptidase -related [Arabidopsis >gi|15293049|gb|AAK93635.1| putative serine carboxypeptidase II thaliana] >gi|22136958|gb|AAM91708.1| putative serine
  misc_feature (1)..(257): Homolog of NCBI NO: 34895992 NR Description: putative carboxypeptidase D [Oryza sativa
  misc_feature (1)..(250): Homolog of NCBI NO: 34908012 NR Description: putative carboxypeptidase D [Oryza sativa
  misc_feature (1)..(249): Homolog of NCBI NO: 15231911 NR Description: serine carboxypeptidase -related [Arabidopsis >gi|6648211|gb|AAF21209.1|AC013483_33 putative serine
  misc_feature (1)..(248): Homolog of NCBI NO: 7428204 NR Description: carboxypeptidase D (EC 3.4.16.6) precursor -
  misc_feature (1)..(248): Homolog of NCBI NO: 20455471 NR Description: Serine carboxypeptidase II precursor
  misc_feature (1)..(249): Homolog of NCBI NO: 15227493 NR Description: serine carboxypeptidase -related [Arabidopsis
  misc_feature (1)..(248): Homolog of NCBI NO: 13877871 NR Description: putative serine carboxypeptidase II [Arabidopsis
  misc_feature (1)..(248): Homolog of NCBI NO: 15234795 NR Description: serine carboxypeptidase -related [Arabidopsis

SEQ ID NO: 19042 - protein, 238 aa, Zea mays subsp. mays; identical to SEQ ID NO: 7988
  peptide (1)..(238): Ceres Seq. ID no. 13567376
  misc_feature (1)..(225): Pfam Name: Serine carboxypeptidase Pfam Description: Serine carboxypeptidase
  misc_feature (1)..(238): Homolog of NCBI NO: 2493494 NR Description: Serine carboxypeptidase II-2 precursor (CP-MII.2)
  misc_feature (1)..(237): Homolog of NCBI NO: 18417667 NR Description: serine carboxypeptidase -related [Arabidopsis >gi|15293049|gb|AAK93635.1| putative serine carboxypeptidase II thaliana] >gi|22136958|gb|AAM91708.1| putative serine
  misc_feature (1)..(238): Homolog of NCBI NO: 34895992 NR Description: putative carboxypeptidase D [Oryza sativa
  misc_feature (1)..(231): Homolog of NCBI NO: 34908012 NR Description: putative carboxypeptidase D [Oryza sativa
  misc_feature (1)..(230): Homolog of NCBI NO: 15231911 NR Description: serine carboxypeptidase -related [Arabidopsis >gi|6648211|gb|AAF21209.1|AC013483_33 putative serine
  misc_feature (1)..(229): Homolog of NCBI NO: 7428204 NR Description: carboxypeptidase D (EC 3.4.16.6) precursor -
  misc_feature (1)..(229): Homolog of NCBI NO: 20455471 NR Description: Serine carboxypeptidase II precursor
  misc_feature (1)..(230): Homolog of NCBI NO: 15227493 NR Description: serine carboxypeptidase -related [Arabidopsis
  misc_feature (1)..(229): Homolog of NCBI NO: 13877871 NR Description: putative serine carboxypeptidase II [Arabidopsis
  misc_feature (1)..(229): Homolog of NCBI NO: 15234795 NR Description: serine carboxypeptidase -related [Arabidopsis

SEQ ID NO: 19043 - DNA, 1853 bp, Zea mays subsp. mays
  misc_feature (1)..(1853): Ceres Seq. ID no. 12419992
  misc_feature: MA Experiment ID: 108504 Result: Up-regulated in Transcription
  misc_feature: MA Experiment 108504 PARAMETER Experiment Name: Zm_Drought_P Parameter: Age (day) Value: 8
  misc_feature: MA Experiment 108504 PARAMETER Experiment Name: Zm_Drought_P Parameter: Organism Value: Zea mays
  misc_feature: MA Experiment 108504 PARAMETER Experiment Name: Zm_Drought_P Parameter: Plant Line Value: 35A19
  misc_feature: MA Experiment 108504 PARAMETER Experiment Name: Zm_Drought_P Parameter: Timepoint (hr) Value: 12
  misc_feature: MA Experiment 108504 PARAMETER Experiment Name: Zm_Drought_P Parameter: Tissue Value: Aerial
  misc_feature: MA Experiment 108504 PARAMETER Experiment Name: Zm_Drought_P Parameter: Treatment Value: Drought vs. No Drought
  misc_feature: MA Experiment ID: 108527 Result: Up-regulated in Transcription
  misc_feature: MA Experiment 108527 PARAMETER Experiment Name: Zm_5mM_NO_P Parameter: Age (day) Value: 8
  misc_feature: MA Experiment 108527 PARAMETER Experiment Name: Zm_5mM_NO_P Parameter: Organism Value: Zea mays
  misc_feature: MA Experiment 108527 PARAMETER Experiment Name: Zm_5mM_NO_P Parameter: Plant Line Value: 35A19
  misc_feature: MA Experiment 108527 PARAMETER Experiment Name: Zm_5mM_NO_P Parameter: Timepoint (hr) Value: 6
  misc_feature: MA Experiment 108527 PARAMETER Experiment Name: Zm_5mM_NO_P Parameter: Tissue Value: Aerial
  misc_feature: MA Experiment 108527 PARAMETER Experiment Name: Zm_5mM_NO_P Parameter: Treatment Value: 5mM NO vs. No Treatment
  misc_feature: MA Experiment ID: 108529 Result: Up-regulated in Transcription
  misc_feature: MA Experiment 108529 PARAMETER Experiment Name: Zm_Imbibed_Seeds_P Parameter: Age (day) Value: 5 vs. 2
  misc_feature: MA Experiment 108529 PARAMETER Experiment Name: Zm_Imbibed_Seeds_P Parameter: Organism Value: Zea mays
  misc_feature: MA Experiment 108529 PARAMETER Experiment Name: Zm_Imbibed_Seeds_P Parameter: Plant Line Value: 35A19
  misc_feature: MA Experiment 108529 PARAMETER Experiment Name: Zm_Imbibed_Seeds_P Parameter: Tissue Value: Roots vs. Embryo
  misc_feature: MA Experiment ID: 108556 Result: Up-regulated in Transcription
  misc_feature: MA Experiment 108556 PARAMETER Experiment Name: Zm_Drought_P Parameter: Age (day) Value: 9
  misc_feature: MA Experiment 108556 PARAMETER Experiment Name: Zm_Drought_P Parameter: Organism Value: Zea mays
  misc_feature: MA Experiment 108556 PARAMETER Experiment Name: Zm_Drought_P Parameter: Plant Line Value: 35A19
  misc_feature: MA Experiment 108556 PARAMETER Experiment Name: Zm_Drought_P Parameter: Timepoint (hr) Value: 24
  misc_feature: MA Experiment 108556 PARAMETER Experiment Name: Zm_Drought_P Parameter: Tissue Value: Aerial
  misc_feature: MA Experiment 108556 PARAMETER Experiment Name: Zm_Drought_P Parameter: Treatment Value: Drought vs. No Drought
  misc_feature: MA Experiment ID: 20000479 Result: Up-regulated in Transcription
  misc_feature: MA Experiment 20000479 PARAMETER Experiment Name: Zm_Drought_P Parameter: Age (day) Value: 10
  misc_feature: MA Experiment 20000479 PARAMETER Experiment Name: Zm_Drought_P Parameter: Organism Value: Zea mays
  misc_feature: MA Experiment 20000479 PARAMETER Experiment Name: Zm_Drought_P Parameter: Plant Line Value: 35A19
  misc_feature: MA Experiment 20000479 PARAMETER Experiment Name: Zm_Drought_P Parameter: Timepoint (hr) Value: 48
  misc_feature: MA Experiment 20000479 PARAMETER Experiment Name: Zm_Drought_P Parameter: Tissue Value: Aerial
  misc_feature: MA Experiment 20000479 PARAMETER Experiment Name: Zm_Drought_P Parameter: Treatment Value: Drought vs. No Drought
  misc_feature: MA Experiment ID: 20000480 Result: Up-regulated in Transcription
  misc_feature: MA Experiment 20000480 PARAMETER Experiment Name: Zm_Drought_P Parameter: Age (day) Value: 11
  misc_feature: MA Experiment 20000480 PARAMETER Experiment Name: Zm_Drought_P Parameter: Organism Value: Zea mays
  misc_feature: MA Experiment 20000480 PARAMETER Experiment Name: Zm_Drought_P Parameter: Plant Line Value: 35A19
  misc_feature: MA Experiment 20000480 PARAMETER Experiment Name: Zm_Drought_P Parameter: Timepoint (hr) Value: 72
  misc_feature: MA Experiment 20000480 PARAMETER Experiment Name: Zm_Drought_P Parameter: Tissue Value: Aerial
  misc_feature: MA Experiment 20000480 PARAMETER Experiment Name: Zm_Drought_P Parameter: Treatment Value: Drought vs. No Drought
  misc_feature: MA Experiment ID: 20000492 Result: Down-regulated in Transcription
  misc_feature: MA Experiment 20000492 PARAMETER Experiment Name: Zm_Hybrid_Seed_Dev_P Parameter: DAP Value: 12
  misc_feature: MA Experiment 20000492 PARAMETER Experiment Name: Zm_Hybrid_Seed_Dev_P Parameter: Organism Value: Zea mays
  misc_feature: MA Experiment 20000492 PARAMETER Experiment Name: Zm_Hybrid_Seed_Dev_P Parameter: Plant Line Value: 35A19
  misc_feature: MA Experiment 20000492 PARAMETER Experiment Name: Zm_Hybrid_Seed_Dev_P Parameter: Tissue Value: Fert Kernel vs. Unfert Floret
  misc_feature: MA Experiment ID: 20000626 Result: Down-regulated in Transcription
  misc_feature: MA Experiment 20000626 PARAMETER Experiment Name: Zm_Herbicide-Treatments_P Parameter: Timepoint (hr) Value: 12
  misc_feature: MA Experiment 20000626 PARAMETER Experiment Name: Zm_Herbicide-Treatments_P Parameter: Tissue Value: Aerial
  misc_feature: MA Experiment 20000626 PARAMETER Experiment Name: Zm_Herbicide-Treatments_P Parameter: Treatment Value: Roundup vs. No Treatment
atcgacgaacatttccacgaaaatctcgctgctctcgcgaaaaaaggacgccacccgcccttgcttgctctccagtttgcaccctggaggcaggtgcaggggcgctcctcgccagcgggcagtcaaccgcccgcgtcggccatggcggaggcggggaggcggacgcttgcgctggtgaacctggcggccatcatggagcgcgccgacgaggcgctgcngcccgcggtgtaccgggaggtgggcgcagcgctgggcgccacgcccgtggcactcggcgcgctcacgctctaccgctcagccgtgcaggccgcctgctacccgctggccgcctacgccgccgtgcgctacaaccgcgcccacgtagtcgccgttggggccgttctctgggccgccgccaccttcctcgtcgccgtctcagacacctttgcccagcaggtagcgatagctagatgtttgaatggtattggcctagcacttgtcaccccggcgatccaatctctggtggcagattgctctgatgacaacactcgaggcgccgcatttggatggcttcaacttacgggaaacattggttcaattattggtggtttgttttccctgatgcttgcacccaccacagtcatgggtattgccggctggcgtgttgcatttcacattgttgctgttataagcgttgtagtcggtgtgttggttggcctatttgcagtggaccctcatttcctccatgttgaaagtggcgagcagctgttacgcaagtctgcatgggcagagatgaaggatttggtgagagaagccaaggctgttgtgaagatctcatcgtttcagatcattgtggctcagggtgtcacaggctcgtttccatggtctgccctggcctttgccccaatgtggctggagttgatggggtttacgcacaacagaactgggctcctgatggtaacatttgcattggcaagctcacttggagggctgttaggtggaaagatgggggatcactttgctactcgcttcccgaattccggccgaatagtcctgtcgcagataagctcagcttctgctattccgttggctgctctgttgcttttggggctccctgataactcttctggttccttgcatggacttgtcatgtttatcatgggtctgagcatctcctggaatggtcctgcaactaacaacccgatatttgctgagattgtacctgagaggtcaaggacaagcatctatgcattggaccgttctttagagtcagttctagcttcattcgctccaccagttgttgggtttctagccgagcatgtctatgggtacaatcccgtcccctacggagctgcagataacaatgttggcagggataaatcaaatgctggcgccctagccaaagctctgtacacgtcgatcgccatccctatgctgctgtgctgcttcatctactccctgttgtaccggacgtacccacgagacagggagagggcaaggatggactctctgatcactccagagctccagcagattgaactggaaagatgtcatgggcaagcggattattattctggaaggaaggacaaggacggctctactgtcttcgatatggattacagaggaatcgacgcctatgatgacgagaagggattaatcgatcagcaggctaagcagagcggcaatgtcaagtggcacaggagtcattcacagaatttgtgacgtttttgccaaagtatcagtgctctcggatctgtacagaaaacgtgagtgagagtgagttacctctcgaaggacgattacatagggttgtttagatagactcagaagcatcagaacaattcggttatgttcagcattatatatatatatat

SEQ ID NO: 19044 - protein, 566 aa, Zea mays subsp. mays
  peptide (1)..(566): Ceres Seq. ID no. 12419993
  misc_feature (55)..(453): Pfam Name: Sugar (and other) transporter Pfam Description: Sugar (and other) transporter
  misc_feature (51)..(237): Homolog of NCBI NO: 7494336 NR Description: membrane transporter PFB0275w - malaria parasite
  misc_feature (259)..(501): Homolog of NCBI NO: 7494336 NR Description: membrane transporter PFB0275w - malaria parasite
  misc_feature (51)..(237): Homolog of NCBI NO: 23593282 NR Description: hypothetical protein, conserved [Plasmodium
  misc_feature (259)..(501): Homolog of NCBI NO: 23593282 NR Description: hypothetical protein, conserved [Plasmodium
  misc_feature (202)..(502): Homolog of NCBI NO: 34393426 NR Description: membrane transporter PFB0275w-like protein
  misc_feature (64)..(496): Homolog of NCBI NO: 15224194 NR Description: hypothetical protein; protein id: At2g18590.1
  misc_feature (55)..(496): Homolog of NCBI NO: 15234530 NR Description: putative protein; protein id: At4g36790.1
  misc_feature (89)..(516): Homolog of NCBI NO: 11358310 NR Description: hypothetical protein T31P16.180 - Arabidopsis
  misc_feature (55)..(516): Homolog of NCBI NO: 15238089 NR Description: putative protein
  misc_feature (50)..(505): Homolog of NCBI NO: 15218229 NR Description: putative transporter; protein id: At1g78130.1
  misc_feature (73)..(73): Xaa is any aa, unknown or other
IDEHFHENLAALAKKGRHPPLLALQFAPWRQVQGRSSPAGSQPPASAMAEAGRRTLALVNLAAIMERADEALXPAVYREVGAALGATPVALGALTLYRSAVQAACYPLAAYAAVRYNRAHVVAVGAVLWAAATFLVAVSDTFAQQVAIARCLNGIGLALVTPAIQSLVADCSDDNTRGAAFGWLQLTGNIGSIIGGLFSLMLAPTTVMGIAGWRVAFHIVAVISVVVGVLVGLFAVDPHFLHVESGEQLLRKSAWAEMKDLVREAKAVVKISSFQIIVAQGVTGSFPWSALAFAPMWLELMGFTHNRTGLLMVTFALASSLGGLLGGKMGDHFATRFPNSGRIVLSQISSASAIPLAALLLLGLPDNSSGSLHGLVMFIMGLSISWNGPATNNPIFAEIVPERSRTSIYALDRSLESVLASFAPPVVGFLAEHVYGYNPVPYGAADNNVGRDKSNAGALAKALYTSIAIPMLLCCFIYSLLYRTYPRDRERARMDSLITPELQQIELERCHGQADYYSGRKDKDGSTVFDMDYRGIDAYDDEKGLIDQQAKQSGNVKWHRSHSQNL

SEQ ID NO: 19045 - protein, 519 aa, Zea mays subsp. mays
  peptide (1)..(519): Ceres Seq. ID no. 12419994
  misc_feature (8)..(406): Pfam Name: Sugar (and other) transporter Pfam Description: Sugar (and other) transporter
  misc_feature (4)..(190): Homolog of NCBI NO: 7494336 NR Description: membrane transporter PFB0275w - malaria parasite
  misc_feature (212)..(454): Homolog of NCBI NO: 7494336 NR Description: membrane transporter PFB0275w - malaria parasite
  misc_feature (4)..(190): Homolog of NCBI NO: 23593282 NR Description: hypothetical protein, conserved [Plasmodium
  misc_feature (212)..(454): Homolog of NCBI NO: 23593282 NR Description: hypothetical protein, conserved [Plasmodium
  misc_feature (155)..(455): Homolog of NCBI NO: 34393426 NR Description: membrane transporter PFB0275w-like protein
  misc_feature (17)..(449): Homolog of NCBI NO: 15224194 NR Description: hypothetical protein; protein id: At2g18590.1
  misc_feature (8)..(449): Homolog of NCBI NO: 15234530 NR Description: putative protein; protein id: At4g36790.1
  misc_feature (42)..(469): Homolog of NCBI NO: 11358310 NR Description: hypothetical protein T31P16.180 - Arabidopsis
  misc_feature (8)..(469): Homolog of NCBI NO: 15238089 NR Description: putative protein
  misc_feature (3)..(458): Homolog of NCBI NO: 15218229 NR Description: putative transporter; protein id: At1g78130.1
  misc_feature (26)..(26): Xaa is any aa, unknown or other
MAEAGRRTLALVNLAAIMERADEALXPAVYREVGAALGATPVALGALTLYRSAVQAACYPLAAYAAVRYNRAHVVAVGAVLWAAATFLVAVSDTFAQQVAIARCLNGIGLALVTPAIQSLVADCSDDNTRGAAFGWLQLTGNIGSIIGGLFSLMLAPTTVMGIAGWRVAFHIVAVISVVVGVLVGLFAVDPHFLHVESGEQLLRKSAWAEMKDLVREAKAVVKISSFQIIVAQGVTGSFPWSALAFAPMWLELMGFTHNRTGLLMVTFALASSLGGLLGGKMGDHFATRFPNSGRIVLSQISSASAIPLAALLLLGLPDNSSGSLHGLVMFIMGLSISWNGPATNNPIFAEIVPERSRTSIYALDRSLESVLASFAPPVVGFLAEHVYGYNPVPYGAADNNVGRDKSNAGALAKALYTSIAIPMLLCCFIYSLLYRTYPRDRERARMDSLITPELQQIELERCHGQADYYSGRKDKDGSTVFDMDYRGIDAYDDEKGLIDQQAKQSGNVKWHRSHSQNL

SEQ ID NO: 19046 - protein, 502 aa, Zea mays subsp. mays
  peptide (1)..(502): Ceres Seq. ID no. 12419995
  misc_feature (1)..(389): Pfam Name: Sugar (and other) transporter Pfam Description: Sugar (and other) transporter
  misc_feature (1)..(173): Homolog of NCBI NO: 7494336 NR Description: membrane transporter PFB0275w - malaria parasite
  misc_feature (195)..(437): Homolog of NCBI NO: 7494336 NR Description: membrane transporter PFB0275w - malaria parasite
  misc_feature (1)..(173): Homolog of NCBI NO: 23593282 NR Description: hypothetical protein, conserved [Plasmodium
  misc_feature (195)..(437): Homolog of NCBI NO: 23593282 NR Description: hypothetical protein, conserved [Plasmodium
  misc_feature (138)..(438): Homolog of NCBI NO: 34393426 NR Description: membrane transporter PFB0275w-like protein
  misc_feature (1)..(432): Homolog of NCBI NO: 15224194 NR Description: hypothetical protein; protein id: At2g18590.1
  misc_feature (1)..(432): Homolog of NCBI NO: 15234530 NR Description: putative protein; protein id: At4g36790.1
  misc_feature (25)..(452): Homolog of NCBI NO: 11358310 NR Description: hypothetical protein T31P16.180 - Arabidopsis
  misc_feature (1)..(452): Homolog of NCBI NO: 15238089 NR Description: putative protein
  misc_feature (1)..(441): Homolog of NCBI NO: 15218229 NR Description: putative transporter; protein id: At1g78130.1
  misc_feature (9)..(9): Xaa is any aa, unknown or other
MERADEALXPAVYREVGAALGATPVALGALTLYRSAVQAACYPLAAYAAVRYNRAHVVAVGAVLWAAATFLVAVSDTFAQQVAIARCLNGIGLALVTPAIQSLVADCSDDNTRGAAFGWLQLTGNIGSIIGGLFSLMLAPTTVMGIAGWRVAFHIVAVISVVVGVLVGLFAVDPHFLHVESGEQLLRKSAWAEMKDLVREAKAVVKISSFQIIVAQGVTGSFPWSALAFAPMWLELMGFTHNRTGLLMVTFALASSLGGLLGGKMGDHFATRFPNSGRIVLSQISSASAIPLAALLLLGLPDNSSGSLHGLVMFIMGLSISWNGPATNNPIFAEIVPERSRTSIYALDRSLESVLASFAPPVVGFLAEHVYGYNPVPYGAADNNVGRDKSNAGALAKALYTSIAIPMLLCCFIYSLLYRTYPRDRERARMDSLITPELQQIELERCHGQADYYSGRKDKDGSTVFDMDYRGIDAYDDEKGLIDQQAKQSGNVKWHRSHSQNL

SEQ ID NO: 19047 - DNA, 454 bp, Zea mays subsp. mays
  misc_feature (1)..(454): Ceres Seq. ID no. 1851894
  misc_feature: MA Experiment ID: 108535 Result: Up-regulated in Transcription
  misc_feature: MA Experiment 108535 PARAMETER Experiment Name: Zm_Meristem_P Parameter: Age (day) Value: 8
  misc_feature: MA Experiment 108535 PARAMETER Experiment Name: Zm_Meristem_P Parameter: Organism Value: Zea mays
  misc_feature: MA Experiment 108535 PARAMETER Experiment Name: Zm_Meristem_P Parameter: Plant Line Value: 35A19
  misc_feature: MA Experiment 108535 PARAMETER Experiment Name: Zm_Meristem_P Parameter: Tissue Value: Root Meristem vs. Above Root Meristem
cgtttccagctccgatccaacccagcatctgtaccgcgccgscgagcacgtccggcgccggtgcggcaggcgaaatccgagagcgaggggatccggtacaagaagaatgaagtcttcttggatgtagtggagagtgttaacattctagttaacagcaatggccagattgtgagatcagatgtggttggggcactgaagatgcgaacatatttgagtggaatgccggagtgcaaacttggcttgaatgatagggttcttttggaggctcaaggcagagcaactaaaggcaaagcgatagacctcgatgatatcaaatttcatcagtgtgtacgtttggctagatttgagaatgatagaactatatcgttcatacctcctgatggatcttttgatctaatgacatacaggcttagcactcaggtaaaacctcttatctgggtcgaagcacagattg

SEQ ID NO: 19048 - protein, 151 aa, Zea mays subsp. mays
  peptide (1)..(151): Ceres Seq. ID no. 1851895
  misc_feature (18)..(150): Pfam Name: Adaptor complexes medium subunit family Pfam Description: Adaptor complexes medium subunit family
  misc_feature (18)..(150): Homolog of NCBI NO: 21913172 NR Description: mu1 adaptin [Toxoplasma gondii]
  misc_feature (5)..(150): Homolog of NCBI NO: 9506797 NR Description: adaptor-related protein complex 1, mu 2 subunit
  misc_feature (18)..(150): Homolog of NCBI NO: 31227815 NR Description: ENSANGP00000020532 [Anopheles gambiae]
  misc_feature (18)..(150): Homolog of NCBI NO: 24645407 NR Description: CG9388-PA [Drosophila melanogaster]
  misc_feature (15)..(150): Homolog of NCBI NO: 28949965 NR Description: probable clathrin assembly protein AP47
  misc_feature (5)..(150): Homolog of NCBI NO: 6753072 NR Description: adaptor-related protein complex AP-1, mu 2
  misc_feature (18)..(150): Homolog of NCBI NO: 6573741 NR Description: F20B24.16 [Arabidopsis thaliana]
  misc_feature (18)..(150): Homolog of NCBI NO: 15220202 NR Description: putative clathrin-coat assembly protein; protein
  misc_feature (18)..(150): Homolog of NCBI NO: 15219810 NR Description: clathrin adaptor medium chain protein MU1B,
  misc_feature (18)..(150): Homolog of NCBI NO: 34910334 NR Description: putative clathrin-associated protein
  misc_feature (14)..(14): Xaa is any aa, unknown or other
RFQLRSNPASVPRXRARPAPVRQAKSESEGIRYKKNEVFLDVVESVNILVNSNGQIVRSDVVGALKMRTYLSGMPECKLGLNDRVLLEAQGRATKGKAIDLDDIKFHQCVRLARFENDRTISFIPPDGSFDLMTYRLSTQVKPLIWVEAQI

SEQ ID NO: 19049 - protein, 85 aa, Zea mays subsp. mays
  peptide (1)..(85): Ceres Seq. ID no. 1851896
  misc_feature (1)..(84): Pfam Name: Adaptor complexes medium subunit family Pfam Description: Adaptor complexes medium subunit family
  misc_feature (1)..(84): Homolog of NCBI NO: 6753072 NR Description: adaptor-related protein complex AP-1, mu 2
  misc_feature (1)..(84): Homolog of NCBI NO: 21913172 NR Description: mu1 adaptin [Toxoplasma gondii]
  misc_feature (1)..(84): Homolog of NCBI NO: 9506797 NR Description: adaptor-related protein complex 1, mu 2 subunit
  misc_feature (1)..(84): Homolog of NCBI NO: 31227815 NR Description: ENSANGP00000020532 [Anopheles gambiae]
  misc_feature (1)..(84): Homolog of NCBI NO: 24645407 NR Description: CG9388-PA [Drosophila melanogaster]
  misc_feature (1)..(84): Homolog of NCBI NO: 28949965 NR Description: probable clathrin assembly protein AP47
  misc_feature (1)..(84): Homolog of NCBI NO: 6573741 NR Description: F20B24.16 [Arabidopsis thaliana]
  misc_feature (1)..(84): Homolog of NCBI NO: 15220202 NR Description: putative clathrin-coat assembly protein; protein
  misc_feature (1)..(84): Homolog of NCBI NO: 15219810 NR Description: clathrin adaptor medium chain protein MU1B,
  misc_feature (1)..(84): Homolog of NCBI NO: 34910334 NR Description: putative clathrin-associated protein
MRTYLSGMPECKLGLNDRVLLEAQGRATKGKAIDLDDIKFHQCVRLARFENDRTISFIPPDGSFDLMTYRLSTQVKPLIWVEAQI

SEQ ID NO: 19050 - protein, 78 aa, Zea mays subsp. mays
  peptide (1)..(78): Ceres Seq. ID no. 1851897
  misc_feature (1)..(77): Pfam Name: Adaptor complexes medium subunit family Pfam Description: Adaptor complexes medium subunit family
  misc_feature (1)..(77): Homolog of NCBI NO: 6753072 NR Description: adaptor-related protein complex AP-1, mu 2
  misc_feature (1)..(77): Homolog of NCBI NO: 21913172 NR Description: mu1 adaptin [Toxoplasma gondii]
  misc_feature (1)..(77): Homolog of NCBI NO: 9506797 NR Description: adaptor-related protein complex 1, mu 2 subunit
  misc_feature (1)..(77): Homolog of NCBI NO: 31227815 NR Description: ENSANGP00000020532 [Anopheles gambiae]
  misc_feature (1)..(77): Homolog of NCBI NO: 24645407 NR Description: CG9388-PA [Drosophila melanogaster]
  misc_feature (1)..(77): Homolog of NCBI NO: 28949965 NR Description: probable clathrin assembly protein AP47
  misc_feature (1)..(77): Homolog of NCBI NO: 6573741 NR Description: F20B24.16 [Arabidopsis thaliana]
  misc_feature (1)..(77): Homolog of NCBI NO: 15220202 NR Description: putative clathrin-coat assembly protein; protein
  misc_feature (1)..(77): Homolog of NCBI NO: 15219810 NR Description: clathrin adaptor medium chain protein MU1B,
  misc_feature (1)..(77): Homolog of NCBI NO: 34910334 NR Description: putative clathrin-associated protein
MPECKLGLNDRVLLEAQGRATKGKAIDLDDIKFHQCVRLARFENDRTISFIPPDGSFDLMTYRLSTQVKPLIWVEAQI

SEQ ID NO: 19051 - DNA, 1707 bp, Zea mays subsp. mays
  misc_feature (1)..(1707): Ceres Seq. ID no. 12363479
  misc_feature: MA Experiment ID: 20000477 Result: Down-regulated in Transcription
  misc_feature: MA Experiment 20000477 PARAMETER Experiment Name: Zm_5mM_SA_P Parameter: Age (day) Value: 10
  misc_feature: MA Experiment 20000477 PARAMETER Experiment Name: Zm_5mM_SA_P Parameter: Organism Value: Zea mays
  misc_feature: MA Experiment 20000477 PARAMETER Experiment Name: Zm_5mM_SA_P Parameter: Plant Line Value: 35A19
  misc_feature: MA Experiment 20000477 PARAMETER Experiment Name: Zm_5mM_SA_P Parameter: Timepoint (hr) Value: 48
  misc_feature: MA Experiment 20000477 PARAMETER Experiment Name: Zm_5mM_SA_P Parameter: Tissue Value: Aerial
  misc_feature: MA Experiment 20000477 PARAMETER Experiment Name: Zm_5mM_SA_P Parameter: Treatment Value: 5mM SA vs. No Treatment
  misc_feature: MA Experiment ID: 20000492 Result: Up-regulated in Transcription
  misc_feature: MA Experiment 20000492 PARAMETER Experiment Name: Zm_Hybrid_Seed_Dev_P Parameter: DAP Value: 12
  misc_feature: MA Experiment 20000492 PARAMETER Experiment Name: Zm_Hybrid_Seed_Dev_P Parameter: Organism Value: Zea mays
  misc_feature: MA Experiment 20000492 PARAMETER Experiment Name: Zm_Hybrid_Seed_Dev_P Parameter: Plant Line Value: 35A19
  misc_feature: MA Experiment 20000492 PARAMETER Experiment Name: Zm_Hybrid_Seed_Dev_P Parameter: Tissue Value: Fert Kernel vs. Unfert Floret
  misc_feature: MA Experiment ID: 20000535 Result: Up-regulated in Transcription
  misc_feature: MA Experiment 20000535 PARAMETER Experiment Name: Zm_Hybrid_Seed_Dev_P Parameter: DAP Value: 30 vs. 12
  misc_feature: MA Experiment 20000535 PARAMETER Experiment Name: Zm_Hybrid_Seed_Dev_P Parameter: Organism Value: Zea mays
  misc_feature: MA Experiment 20000535 PARAMETER Experiment Name: Zm_Hybrid_Seed_Dev_P Parameter: Plant Line Value: 35A19
  misc_feature: MA Experiment 20000535 PARAMETER Experiment Name: Zm_Hybrid_Seed_Dev_P Parameter: Tissue Value: Embryo vs. Unfert Floret
gcacgagaccattacctagaacatcctaatcgaaaacacaagaggctcaggctgagctcatctgcggcagtagccaaggagtggagtgaggtagctcgctctgtgagcagaaaacaatggagacgatggcggcggctcccgcgccgcagcaaaggacggggggcatcgcgcggaggctggccaggctgctccgccgcaagagctccccggcaggtgcggggatggcgtactccgtcgccggggacgagttcgacgactcgcttgacagctcaatcaactcgctcagcaagctcaagctgtccggcaacctggctgctgcctacacgctggacgccatcttcaagaatgccacggagaagaaggcagcggcggcggcgccgcagacgcagaagcagccgtcgccggcgaaggacgccgcgaagcacgcgttcttggcgaccctattcgcgagggcgtccgcggtgaaggcggcctacgcgcagctgcagctctcgctgcatccctacgacgccgagtccatccaggccgccggacgccggcctggtggcagagcttaccaagctgacgagcctcaagcggcggtacacaagggacccggccgccgcggccaggggcgccggtgccctcgcggcgcacgccgacgagcagctccacctcctgcggacctacgagatcacggcgcgcaagctggaggcggagctccgtgcgcgggacgccgaggccgagcgcgcacgcgccgcgctggccgacgagctccgcgccgtgcggggcctggaggagcgcgaccacccgggccgccgcaccctggacggcctccacctctccggcctcaacgccacccacttcctcaccgcgctgcaacacgccgtgaagtccgtccgcgccttcgccagggcaatggtcgacgcgatgcggccggccggttgggatcccgcggcggcggcggcggcggccgtgcacccgggcgccaggctgtgggaccccgcaggcgacgccaggttcgcgctcgagtcctacgtggcgctgaggatgttcgcgggcttccaccgcaaggacttgggcctgagctccctgcacgggcggggctcccacgaccggcgccgcttcttccaggagttcgcggaggcgagggccgcggctgcggcggatcagctccaggacgcgagcgacgcgcggtgggatgcgctccgggagttcctgcgggacaggtacgtgtccgtggtgcacgagagcatggaggcggccttcttcgggcgcggcggggacgcgctgccgcgcgccgcgtggctccgcgagttcgcggagatggcgcgccgcgtgtggctgctgcactgcctgttctgggcgttcgacggcgccgcgtccgtcttccaggcgcgccctggggagcggttctcggaggtgttcatggtgagcgtccgcgacgcggacgccggcaggagcgggcacgtctccgtcgggttcaccgtggtgccggggttcaagctcggcgcgacggtgatacaatgccgggtatacctttcacacccggagcgccgtccctgaggaccgtcacacttgggcggccttgtcgcacaccggcacacgagggaggcggtggggtttaagggtggcaggcaggcagcaatgacccctgtgcaatttgttatgtttatgtatgtatggatggatccaagtatatgtatctagtatgagcattccatttcc

SEQ ID NO: 19052 - protein, 496 aa, Zea mays subsp. mays
  peptide (1)..(496): Ceres Seq. ID no. 12363480
  misc_feature (149)..(495): Homolog of NCBI NO: 79833 NR Description: hypothetical 119.5K protein (uvrA region) -
  misc_feature (136)..(488): Homolog of NCBI NO: 29247944 NR Description: GLP_26_54603_52153 [Giardia lamblia ATCC 50803]
  misc_feature (139)..(496): Homolog of NCBI NO: 29247944 NR Description: GLP_26_54603_52153 [Giardia lamblia ATCC 50803]
  misc_feature (88)..(140): Homolog of NCBI NO: 15225441 NR Description: hypothetical protein
  misc_feature (100)..(138): Homolog of NCBI NO: 20466324 NR Description: unknown protein [Arabidopsis thaliana]
  misc_feature (100)..(138): Homolog of NCBI NO: 22329840 NR Description: unknown protein
  misc_feature (81)..(138): Homolog of NCBI NO: 15231944 NR Description: hypothetical protein; protein id: At3g14870.1
  misc_feature (81)..(138): Homolog of NCBI NO: 8777470 NR Description: gb|AAB82637.1~gene_id:K15M2.1~similar to unknown
  misc_feature (104)..(138): Homolog of NCBI NO: 15219282 NR Description: unknown protein; protein id: At1g53380.1
  misc_feature (37)..(138): Homolog of NCBI NO: 34903732 NR Description: unnamed protein product [Oryza sativa (japonica
METMAAAPAPQQRTGGIARRLARLLRRKSSPAGAGMAYSVAGDEFDDSLDSSINSLSKLKLSGNLAAAYTLDAIFKNATEKKAAAAAPQTQKQPSPAKDAAKHAFLATLFARASAVKAAYAQLQLSLHPYDAESIQAAGRRPGGRAYQADEPQAAVHKGPGRRGQGRRCPRGARRRAAPPPADLRDHGAQAGGGAPCAGRRGRARTRRAGRRAPRRAGPGGARPPGPPHPGRPPPLRPQRHPLPHRAATRREVRPRLRQGNGRRDAAGRLGSRGGGGGGRAPGRQAVGPRRRRQVRARVLRGAEDVRGLPPQGLGPELPARAGLPRPAPLLPGVRGGEGRGCGGSAPGRERRAVGCAPGVPAGQVRVRGAREHGGGLLRARRGRAAARRVAPRVRGDGAPRVAAALPVLGVRRRRVRLPGAPWGAVLGGVHGERPRRGRRQERARLRRVHRGAGVQARRDGDTMPGIPFTPGAPSLRTVTLGRPCRTPAHEGGGGV

SEQ ID NO: 19053 - protein, 493 aa, Zea mays subsp. mays
  peptide (1)..(493): Ceres Seq. ID no. 12363481
  misc_feature (146)..(492): Homolog of NCBI NO: 79833 NR Description: hypothetical 119.5K protein (uvrA region) -
  misc_feature (133)..(485): Homolog of NCBI NO: 29247944 NR Description: GLP_26_54603_52153 [Giardia lamblia ATCC 50803]
  misc_feature (136)..(493): Homolog of NCBI NO: 29247944 NR Description: GLP_26_54603_52153 [Giardia lamblia ATCC 50803]
  misc_feature (85)..(137): Homolog of NCBI NO: 15225441 NR Description: hypothetical protein
  misc_feature (97)..(135): Homolog of NCBI NO: 20466324 NR Description: unknown protein [Arabidopsis thaliana]
  misc_feature (97)..(135): Homolog of NCBI NO: 22329840 NR Description: unknown protein
  misc_feature (78)..(135): Homolog of NCBI NO: 15231944 NR Description: hypothetical protein; protein id: At3g14870.1
  misc_feature (78)..(135): Homolog of NCBI NO: 8777470 NR Description: gb|AAB82637.1~gene_id:K15M2.1~similar to unknown
  misc_feature (101)..(135): Homolog of NCBI NO: 15219282 NR Description: unknown protein; protein id: At1g53380.1
  misc_feature (34)..(135): Homolog of NCBI NO: 34903732 NR Description: unnamed protein product [Oryza sativa (japonica
MAAAPAPQQRTGGIARRLARLLRRKSSPAGAGMAYSVAGDEFDDSLDSSINSLSKLKLSGNLAAAYTLDAIFKNATEKKAAAAAPQTQKQPSPAKDAAKHAFLATLFARASAVKAAYAQLQLSLHPYDAESIQAAGRRPGGRAYQADEPQAAVHKGPGRRGQGRRCPRGARRRAAPPPADLRDHGAQAGGGAPCAGRRGRARTRRAGRRAPRRAGPGGARPPGPPHPGRPPPLRPQRHPLPHRAATRREVRPRLRQGNGRRDAAGRLGSRGGGGGGRAPGRQAVGPRRRRQVRARVLRGAEDVRGLPPQGLGPELPARAGLPRPAPLLPGVRGGEGRGCGGSAPGRERRAVGCAPGVPAGQVRVRGAREHGGGLLRARRGRAAARRVAPRVRGDGAPRVAAALPVLGVRRRRVRLPGAPWGAVLGGVHGERPRRGRRQERARLRRVHRGAGVQARRDGDTMPGIPFTPGAPSLRTVTLGRPCRTPAHEGGGGV

SEQ ID NO: 19054 - protein, 461 aa, Zea mays subsp. mays
  peptide (1)..(461): Ceres Seq. ID no. 12363482
  misc_feature (114)..(460): Homolog of NCBI NO: 79833 NR Description: hypothetical 119.5K protein (uvrA region) -
  misc_feature (101)..(453): Homolog of NCBI NO: 29247944 NR Description: GLP_26_54603_52153 [Giardia lamblia ATCC 50803]
  misc_feature (104)..(461): Homolog of NCBI NO: 29247944 NR Description: GLP_26_54603_52153 [Giardia lamblia ATCC 50803]
  misc_feature (53)..(105): Homolog of NCBI NO: 15225441 NR Description: hypothetical protein
  misc_feature (65)..(103): Homolog of NCBI NO: 20466324 NR Description: unknown protein [Arabidopsis thaliana]
  misc_feature (65)..(103): Homolog of NCBI NO: 22329840 NR Description: unknown protein
  misc_feature (46)..(103): Homolog of NCBI NO: 15231944 NR Description: hypothetical protein; protein id: At3g14870.1
  misc_feature (46)..(103): Homolog of NCBI NO: 8777470 NR Description: gb|AAB82637.1~gene_id:K15M2.1~similar to unknown
  misc_feature (69)..(103): Homolog of NCBI NO: 15219282 NR Description: unknown protein; protein id: At1g53380.1
  misc_feature (2)..(103): Homolog of NCBI NO: 34903732 NR Description: unnamed protein product [Oryza sativa (japonica
MAYSVAGDEFDDSLDSSINSLSKLKLSGNLAAAYTLDAIFKNATEKKAAAAAPQTQKQPSPAKDAAKHAFLATLFARASAVKAAYAQLQLSLHPYDAESIQAAGRRPGGRAYQADEPQAAVHKGPGRRGQGRRCPRGARRRAAPPPADLRDHGAQAGGGAPCAGRRGRARTRRAGRRAPRRAGPGGARPPGPPHPGRPPPLRPQRHPLPHRAATRREVRPRLRQGNGRRDAAGRLGSRGGGGGGRAPGRQAVGPRRRRQVRARVLRGAEDVRGLPPQGLGPELPARAGLPRPAPLLPGVRGGEGRGCGGSAPGRERRAVGCAPGVPAGQVRVRGAREHGGGLLRARRGRAAARRVAPRVRGDGAPRVAAALPVLGVRRRRVRLPGAPWGAVLGGVHGERPRRGRRQERARLRRVHRGAGVQARRDGDTMPGIPFTPGAPSLRTVTLGRPCRTPAHEGGGGV

SEQ ID NO: 19055 - DNA, 1424 bp, Zea mays subsp. mays
  misc_feature (1)..(1424): Ceres Seq. ID no. 12359128
  misc_feature: MA Experiment ID: 108523 Result: Down-regulated in Transcription
  misc_feature: MA Experiment 108523 PARAMETER Experiment Name: Zm_42deg_Heat_P Parameter: Age (day) Value: 8
  misc_feature: MA Experiment 108523 PARAMETER Experiment Name: Zm_42deg_Heat_P Parameter: Organism Value: Zea mays
  misc_feature: MA Experiment 108523 PARAMETER Experiment Name: Zm_42deg_Heat_P Parameter: Plant Line Value: 35A19
  misc_feature: MA Experiment 108523 PARAMETER Experiment Name: Zm_42deg_Heat_P Parameter: Temperature (deg C) Value: 42 vs. 22
  misc_feature: MA Experiment 108523 PARAMETER Experiment Name: Zm_42deg_Heat_P Parameter: Timepoint (hr) Value: 6
  misc_feature: MA Experiment 108523 PARAMETER Experiment Name: Zm_42deg_Heat_P Parameter: Tissue Value: Aerial
  misc_feature: MA Experiment ID: 108559 Result: Down-regulated in Transcription
  misc_feature: MA Experiment 108559 PARAMETER Experiment Name: Zm_5mM_NO_P Parameter: Age (day) Value: 8
  misc_feature: MA Experiment 108559 PARAMETER Experiment Name: Zm_5mM_NO_P Parameter: Organism Value: Zea mays
  misc_feature: MA Experiment 108559 PARAMETER Experiment Name: Zm_5mM_NO_P Parameter: Plant Line Value: 35A19
  misc_feature: MA Experiment 108559 PARAMETER Experiment Name: Zm_5mM_NO_P Parameter: Timepoint (hr) Value: 12
  misc_feature: MA Experiment 108559 PARAMETER Experiment Name: Zm_5mM_NO_P Parameter: Tissue Value: Aerial
  misc_feature: MA Experiment 108559 PARAMETER Experiment Name: Zm_5mM_NO_P Parameter: Treatment Value: 5mM NO vs. No Treatment
ctcccgcgatcgccaccggggaaggggcaatagaataaagtgagggcagccaatgcaggccgccgtcaacaccaccactgtcggcgctcacccgcacccaacaaagtcctcgttcctccgtccgtcccctccttgccgcgtctacttccacgcttctccacgcccgaaccttagggcgatcgccatggccagcaagtcgcagctgcaggaccaactgatcatcactcgccccgacgactggcacctccatcttcgcgaaggcggtgtcctcgaggctgtagtgccacacagcgcgaggcattttgggagggccatcatcatgcccaacctgaagccgccggtgaccacaacggcacgggccgtggagtacagggaggagataatgagggcgctgccgccagggagtagcttcgagccgctcatgacactatacctcacagacaacacaagcccagaggagatcaagctcgcaagaaagagtggtataatttttgctgtgaagttgtatcctgctggagcaactaccaattcccaagatggtgtcactgatatatttgggaagtgcttgccggtcctcgaggagatggtcaggcaggaaatgccgttgcttgttcatggagaagtcacagatccacatgttgacacatttgaccgcgagaaggttttcattgacaaaatattagcaccacttgtacaaaaacttccgcagctgaaaattgtcatggaacatatcacaactatggatgcagtgaacttcatagaatcatgtgaagaaggtcatgttgctgcaacagtgactccccagcatctcctcctcaataggaatgctttatttcagggtggcttgcagccacacaattattgcttgccagtactgaaaagagagactcatagacaagctattgtgtctgctgtaacaaatgggagtagacggtacttccttggtactgacagcgctccccatgataaacggaacaaagagtgttcctgtggatgtgctggaatatatagcgctcctgttgccttgtctctttatgtgaaggtatttgaagaggctggtgcccttgataaactagaagcatttacaagcttcaatggccctgatttttatggcctcccaaggaacacttcaaagattatcttgagaaagaatgcctggaaagttcctgctacttataaacacagttcaggggagattgtgcctatgtttaatggcagcacccttgaatggcttccatctgatcagcctaaagagtaaacagtatacattattggacccagcacttgggggaatcaataggtggagttttctagttctttttcccgtttccactagaatcagcatagcgaaactattctgcttgttgaaagcaacggtggaggatctgcttgttgagttgttatatccatttgcattgcagtgc

SEQ ID NO: 19056 - protein, 401 aa, Zea mays subsp. mays
  peptide (1)..(401): Ceres Seq. ID no. 12359129
  misc_feature (54)..(395): Pfam Name: Amidohydrolase family Pfam Description: Amidohydrolase family
  misc_feature (46)..(393): Homolog of NCBI NO: 33598272 NR Description: dihydroorotase [Bordetella parapertussis]
  misc_feature (55)..(393): Homolog of NCBI NO: 15676580 NR Description: dihydroorotase [Neisseria meningitidis MC58]
  misc_feature (53)..(393): Homolog of NCBI NO: 17545206 NR Description: PROBABLE DIHYDROOROTASE PROTEIN [Ralstonia
  misc_feature (53)..(393): Homolog of NCBI NO: 16331133 NR Description: dihydroorotase [Synechocystis sp. PCC 6803]
  misc_feature (48)..(393): Homolog of NCBI NO: 34499785 NR Description: dihydroorotase [Chromobacterium violaceum ATCC
  misc_feature (46)..(393): Homolog of NCBI NO: 22988480 NR Description: hypothetical protein [Burkholderia fungorum]
  misc_feature (53)..(393): Homolog of NCBI NO: 30248736 NR Description: Dihydroorotase homodimeric type
  misc_feature (54)..(396): Homolog of NCBI NO: 17977977 NR Description: dihydroorotase [Beta vulgaris]
  misc_feature (54)..(395): Homolog of NCBI NO: 15235865 NR Description: dihydroorotase
  misc_feature (44)..(401): Homolog of NCBI NO: 34909480 NR Description: putative dihydroorotase [Oryza sativa (japonica
MQAAVNTTTVGAHPHPTKSSFLRPSPPCRVYFHASPRPNLRAIAMASKSQLQDQLIITRPDDWHLHLREGGVLEAVVPHSARHFGRAIIMPNLKPPVTTTARAVEYREEIMRALPPGSSFEPLMTLYLTDNTSPEEIKLARKSGIIFAVKLYPAGATTNSQDGVTDIFGKCLPVLEEMVRQEMPLLVHGEVTDPHVDTFDREKVFIDKILAPLVQKLPQLKIVMEHITTMDAVNFIESCEEGHVAATVTPQHLLLNRNALFQGGLQPHNYCLPVLKRETHRQAIVSAVTNGSRRYFLGTDSAPHDKRNKECSCGCAGIYSAPVALSLYVKVFEEAGALDKLEAFTSFNGPDFYGLPRNTSKIILRKNAWKVPATYKHSSGEIVPMFNGSTLEWLPSDQPKE

SEQ ID NO: 19057 - protein, 357 aa, Zea mays subsp. mays
  peptide (1)..(357): Ceres Seq. ID no. 12359130
  misc_feature (10)..(351): Pfam Name: Amidohydrolase family Pfam Description: Amidohydrolase family
  misc_feature (2)..(349): Homolog of NCBI NO: 33598272 NR Description: dihydroorotase [Bordetella parapertussis]
  misc_feature (11)..(349): Homolog of NCBI NO: 15676580 NR Description: dihydroorotase [Neisseria meningitidis MC58]
  misc_feature (9)..(349): Homolog of NCBI NO: 17545206 NR Description: PROBABLE DIHYDROOROTASE PROTEIN [Ralstonia
  misc_feature (9)..(349): Homolog of NCBI NO: 16331133 NR Description: dihydroorotase [Synechocystis sp. PCC 6803]
  misc_feature (4)..(349): Homolog of NCBI NO: 34499785 NR Description: dihydroorotase [Chromobacterium violaceum ATCC
  misc_feature (2)..(349): Homolog of NCBI NO: 22988480 NR Description: hypothetical protein [Burkholderia fungorum]
  misc_feature (9)..(349): Homolog of NCBI NO: 30248736 NR Description: Dihydroorotase homodimeric type
  misc_feature (10)..(352): Homolog of NCBI NO: 17977977 NR Description: dihydroorotase [Beta vulgaris]
  misc_feature (10)..(351): Homolog of NCBI NO: 15235865 NR Description: dihydroorotase
  misc_feature (1)..(357): Homolog of NCBI NO: 34909480 NR Description: putative dihydroorotase [Oryza sativa (japonica
MASKSQLQDQLIITRPDDWHLHLREGGVLEAVVPHSARHFGRAIIMPNLKPPVTTTARAVEYREEIMRALPPGSSFEPLMTLYLTDNTSPEEIKLARKSGIIFAVKLYPAGATTNSQDGVTDIFGKCLPVLEEMVRQEMPLLVHGEVTDPHVDTFDREKVFIDKILAPLVQKLPQLKIVMEHITTMDAVNFIESCEEGHVAATVTPQHLLLNRNALFQGGLQPHNYCLPVLKRETHRQAIVSAVTNGSRRYFLGTDSAPHDKRNKECSCGCAGIYSAPVALSLYVKVFEEAGALDKLEAFTSFNGPDFYGLPRNTSKIILRKNAWKVPATYKHSSGEIVPMFNGSTLEWLPSDQPKE

SEQ ID NO: 19058 - protein, 312 aa, Zea mays subsp. mays
  peptide (1)..(312): Ceres Seq. ID no. 12359131
  misc_feature (1)..(306): Pfam Name: Amidohydrolase family Pfam Description: Amidohydrolase family
  misc_feature (1)..(307): Homolog of NCBI NO: 17977977 NR Description: dihydroorotase [Beta vulgaris]
  misc_feature (1)..(306): Homolog of NCBI NO: 15235865 NR Description: dihydroorotase
  misc_feature (1)..(304): Homolog of NCBI NO: 15676580 NR Description: dihydroorotase [Neisseria meningitidis MC58]
  misc_feature (1)..(304): Homolog of NCBI NO: 16331133 NR Description: dihydroorotase [Synechocystis sp. PCC 6803]
  misc_feature (1)..(304): Homolog of NCBI NO: 22988480 NR Description: hypothetical protein [Burkholderia fungorum]
  misc_feature (1)..(304): Homolog of NCBI NO: 30248736 NR Description: Dihydroorotase homodimeric type
  misc_feature (1)..(304): Homolog of NCBI NO: 34499785 NR Description: dihydroorotase [Chromobacterium violaceum ATCC
  misc_feature (1)..(304): Homolog of NCBI NO: 17545206 NR Description: PROBABLE DIHYDROOROTASE PROTEIN [Ralstonia
  misc_feature (1)..(304): Homolog of NCBI NO: 33598272 NR Description: dihydroorotase [Bordetella parapertussis]
  misc_feature (1)..(312): Homolog of NCBI NO: 34909480 NR Description: putative dihydroorotase [Oryza sativa (japonica
MPNLKPPVTTTARAVEYREEIMRALPPGSSFEPLMTLYLTDNTSPEEIKLARKSGIIFAVKLYPAGATTNSQDGVTDIFGKCLPVLEEMVRQEMPLLVHGEVTDPHVDTFDREKVFIDKILAPLVQKLPQLKIVMEHITTMDAVNFIESCEEGHVAATVTPQHLLLNRNALFQGGLQPHNYCLPVLKRETHRQAIVSAVTNGSRRYFLGTDSAPHDKRNKECSCGCAGIYSAPVALSLYVKVFEEAGALDKLEAFTSFNGPDFYGLPRNTSKIILRKNAWKVPATYKHSSGEIVPMFNGSTLEWLPSDQPKE

SEQ ID NO: 19059 - DNA, 1364 bp, Zea mays subsp. mays
  misc_feature (1)..(1364): Ceres Seq. ID no. 12368136
  misc_feature: MA Experiment ID: 108523 Result: Down-regulated in Transcription
  misc_feature: MA Experiment 108523 PARAMETER Experiment Name: Zm_42deg_Heat_P Parameter: Age (day) Value: 8
  misc_feature: MA Experiment 108523 PARAMETER Experiment Name: Zm_42deg_Heat_P Parameter: Organism Value: Zea mays
  misc_feature: MA Experiment 108523 PARAMETER Experiment Name: Zm_42deg_Heat_P Parameter: Plant Line Value: 35A19
  misc_feature: MA Experiment 108523 PARAMETER Experiment Name: Zm_42deg_Heat_P Parameter: Temperature (deg C) Value: 42 vs. 22
  misc_feature: MA Experiment 108523 PARAMETER Experiment Name: Zm_42deg_Heat_P Parameter: Timepoint (hr) Value: 6
  misc_feature: MA Experiment 108523 PARAMETER Experiment Name: Zm_42deg_Heat_P Parameter: Tissue Value: Aerial
  misc_feature: MA Experiment ID: 108527 Result: Down-regulated in Transcription
  misc_feature: MA Experiment 108527 PARAMETER Experiment Name: Zm_5mM_NO_P Parameter: Age (day) Value: 8
  misc_feature: MA Experiment 108527 PARAMETER Experiment Name: Zm_5mM_NO_P Parameter: Organism Value: Zea mays
  misc_feature: MA Experiment 108527 PARAMETER Experiment Name: Zm_5mM_NO_P Parameter: Plant Line Value: 35A19
  misc_feature: MA Experiment 108527 PARAMETER Experiment Name: Zm_5mM_NO_P Parameter: Timepoint (hr) Value: 6
  misc_feature: MA Experiment 108527 PARAMETER Experiment Name: Zm_5mM_NO_P Parameter: Tissue Value: Aerial
  misc_feature: MA Experiment 108527 PARAMETER Experiment Name: Zm_5mM_NO_P Parameter: Treatment Value: 5mM NO vs. No Treatment
  misc_feature: MA Experiment ID: 108528 Result: Up-regulated in Transcription
  misc_feature: MA Experiment 108528 PARAMETER Experiment Name: Zm_Imbibed_Seeds_P Parameter: Age (day) Value: 5 vs. 2
  misc_feature: MA Experiment 108528 PARAMETER Experiment Name: Zm_Imbibed_Seeds_P Parameter: Organism Value: Zea mays
  misc_feature: MA Experiment 108528 PARAMETER Experiment Name: Zm_Imbibed_Seeds_P Parameter: Plant Line Value: 35A19
  misc_feature: MA Experiment 108528 PARAMETER Experiment Name: Zm_Imbibed_Seeds_P Parameter: Tissue Value: Aerial vs. Embryo
  misc_feature: MA Experiment ID: 108529 Result: Up-regulated in Transcription
  misc_feature: MA Experiment 108529 PARAMETER Experiment Name: Zm_Imbibed_Seeds_P Parameter: Age (day) Value: 5 vs. 2
  misc_feature: MA Experiment 108529 PARAMETER Experiment Name: Zm_Imbibed_Seeds_P Parameter: Organism Value: Zea mays
  misc_feature: MA Experiment 108529 PARAMETER Experiment Name: Zm_Imbibed_Seeds_P Parameter: Plant Line Value: 35A19
  misc_feature: MA Experiment 108529 PARAMETER Experiment Name: Zm_Imbibed_Seeds_P Parameter: Tissue Value: Roots vs. Embryo
  misc_feature: MA Experiment ID: 108530 Result: Up-regulated in Transcription
  misc_feature: MA Experiment 108530 PARAMETER Experiment Name: Zm_Imbibed_Seeds_P Parameter: Age (day) Value: 6 vs. 2
  misc_feature: MA Experiment 108530 PARAMETER Experiment Name: Zm_Imbibed_Seeds_P Parameter: Organism Value: Zea mays
  misc_feature: MA Experiment 108530 PARAMETER Experiment Name: Zm_Imbibed_Seeds_P Parameter: Plant Line Value: 35A19
  misc_feature: MA Experiment 108530 PARAMETER Experiment Name: Zm_Imbibed_Seeds_P Parameter: Tissue Value: Aerial vs. Embryo
  misc_feature: MA Experiment ID: 108535 Result: Down-regulated in Transcription
  misc_feature: MA Experiment 108535 PARAMETER Experiment Name: Zm_Meristem_P Parameter: Age (day) Value: 8
  misc_feature: MA Experiment 108535 PARAMETER Experiment Name: Zm_Meristem_P Parameter: Organism Value: Zea mays
  misc_feature: MA Experiment 108535 PARAMETER Experiment Name: Zm_Meristem_P Parameter: Plant Line Value: 35A19
  misc_feature: MA Experiment 108535 PARAMETER Experiment Name: Zm_Meristem_P Parameter: Tissue Value: Root Meristem vs. Above Root Meristem
  misc_feature: MA Experiment ID: 108546 Result: Up-regulated in Transcription
  misc_feature: MA Experiment 108546 PARAMETER Experiment Name: Zm_Imbibed_Seeds_P Parameter: Age (day) Value: 3 vs. 2
  misc_feature: MA Experiment 108546 PARAMETER Experiment Name: Zm_Imbibed_Seeds_P Parameter: Organism Value: Zea mays
  misc_feature: MA Experiment 108546 PARAMETER Experiment Name: Zm_Imbibed_Seeds_P Parameter: Plant Line Value: 35A19
  misc_feature: MA Experiment 108546 PARAMETER Experiment Name: Zm_Imbibed_Seeds_P Parameter: Tissue Value: Roots vs. Embryo
  misc_feature: MA Experiment ID: 108559 Result: Down-regulated in Transcription
  misc_feature: MA Experiment 108559 PARAMETER Experiment Name: Zm_5mM_NO_P Parameter: Age (day) Value: 8
  misc_feature: MA Experiment 108559 PARAMETER Experiment Name: Zm_5mM_NO_P Parameter: Organism Value: Zea mays
  misc_feature: MA Experiment 108559 PARAMETER Experiment Name: Zm_5mM_NO_P Parameter: Plant Line Value: 35A19
  misc_feature: MA Experiment 108559 PARAMETER Experiment Name: Zm_5mM_NO_P Parameter: Timepoint (hr) Value: 12
  misc_feature: MA Experiment 108559 PARAMETER Experiment Name: Zm_5mM_NO_P Parameter: Tissue Value: Aerial
  misc_feature: MA Experiment 108559 PARAMETER Experiment Name: Zm_5mM_NO_P Parameter: Treatment Value: 5mM NO vs. No Treatment
  misc_feature: MA Experiment ID: 108687 Result: Down-regulated in Transcription
  misc_feature: MA Experiment 108687 PARAMETER Experiment Name: Zm_Embryos-Flowers__P Parameter: Tissue Value: Embryo vs. Aerial+
  misc_feature: MA Experiment ID: 108688 Result: Down-regulated in Transcription
  misc_feature: MA Experiment 108688 PARAMETER Experiment Name: Zm_Embryos-Flowers__P Parameter: Tissue Value: Immature Flowers vs. Aerial+
  misc_feature: MA Experiment ID: 108689 Result: Down-regulated in Transcription
  misc_feature: MA Experiment 108689 PARAMETER Experiment Name: Zm_Drought_Roots_P Parameter: Age (day) Value: 9
  misc_feature: MA Experiment 108689 PARAMETER Experiment Name: Zm_Drought_Roots_P Parameter: Organism Value: Zea mays
  misc_feature: MA Experiment 108689 PARAMETER Experiment Name: Zm_Drought_Roots_P Parameter: Plant Line Value: 35A19
  misc_feature: MA Experiment 108689 PARAMETER Experiment Name: Zm_Drought_Roots_P Parameter: Timepoint (hr) Value: 24
  misc_feature: MA Experiment 108689 PARAMETER Experiment Name: Zm_Drought_Roots_P Parameter: Tissue Value: Roots
  misc_feature: MA Experiment 108689 PARAMETER Experiment Name: Zm_Drought_Roots_P Parameter: Treatment Value: Drought vs. No Drought
  misc_feature: MA Experiment ID: 20000478 Result: Down-regulated in Transcription
  misc_feature: MA Experiment 20000478 PARAMETER Experiment Name: Zm_5mM_SA_P Parameter: Age (day) Value: 11
  misc_feature: MA Experiment 20000478 PARAMETER Experiment Name: Zm_5mM_SA_P Parameter: Organism Value: Zea mays
  misc_feature: MA Experiment 20000478 PARAMETER Experiment Name: Zm_5mM_SA_P Parameter: Plant Line Value: 35A19
  misc_feature: MA Experiment 20000478 PARAMETER Experiment Name: Zm_5mM_SA_P Parameter: Timepoint (hr) Value: 72
  misc_feature: MA Experiment 20000478 PARAMETER Experiment Name: Zm_5mM_SA_P Parameter: Tissue Value: Aerial
  misc_feature: MA Experiment 20000478 PARAMETER Experiment Name: Zm_5mM_SA_P Parameter: Treatment Value: 5mM SA vs. No Treatment
atcctttgggaattaatagtaagtgtttgggacttgggagagggagaggcgtcatgtacctgaacccaagaatcgtaggctctggggagaggacactggttctctcccatggctatggaggcagccaggctatctgggacaaggtgctgccgcacctctcacggacgaacaaggtactactcttcgactgggacttctcgagtaccgccgccggagaggaggaggaggacgcggagcacagctgctacacgttctcgaggttcgccgaagagctggtggcgctcatggacaagatgaagctgagcggcgccgtgtacgtggggcactccatggccggcatggtcggctgcattgcgtccatcacgcgccccgacctcttcacccacctcgtcctcgtcggcgcatccccgaggtacatgaactcggaggactacgagggcgggttcgacgagcccgacatcaaggcgatgctgtcgaggatctcgtcggacttccgcggctgggccgagggcttcgtgccgctcgccatcggcggcagcgcggacgaccaaccctcggcggtggagctgctggcgcggagcttcttcgccatggacccgcgcgtggcgcacggcctggcgcgcatgatcttcctgggcgaccagcgcgagctgctgggtgacgtggccgtgccgtgcacgctggtgcacgtctccggcgacttcgcggcgcccccctgcgtcgggcgctacatgcaggcccgcatgcgcaccgcctccatgtataccatcgactcggtgggacacttcccgcagctcgtcacgcccgacgagatgctcaggatactcgaccgcattctcgtcggctccgctgcttcccaagaggaggagactaccgcggcggcggcggctgccgccaagaccgagacgacgagtagcgaggtcgtatcctctggtggtgttgccgatgcgctggagtccaagggccgtatcgacgtggcgacatagtgctcctgctgctctggtgcaacatccctctcgaagtctcgatctatcagccttggctggctcttgtgctggtctcagttgatttgcttcggtccacactccacacgtttaacttacattattgcgcttttggattttctaatgcgtagaaacattaccatggttcgttcggaatttttagccatcacgtcacccaaactgcgtgtattattggtttgatcatggattgaattaaatgaaacactgagtgttaaagcattgtaaatgacatgcatggtttgcagccttgcaggattctagcttcctagaattatttatttttttggaaaatatttcatggattgaattaaatgaaacacttgagtgttaaagcattgt

SEQ ID NO: 19060 - protein, 327 aa, Zea mays subsp. mays
  peptide (1)..(327): Ceres Seq. ID no. 12368137
  misc_feature (56)..(276): Pfam Name: alpha/beta hydrolase fold Pfam Description: alpha/beta hydrolase fold
  misc_feature (23)..(275): Homolog of NCBI NO: 16080463 NR Description: similar to hydrolase [Bacillus subtilis]
  misc_feature (21)..(268): Homolog of NCBI NO: 22987307 NR Description: hypothetical protein [Burkholderia fungorum]
  misc_feature (21)..(273): Homolog of NCBI NO: 24216360 NR Description: Predicted hydrolases or acyltransferases,
  misc_feature (21)..(139): Homolog of NCBI NO: 40736991 NR Description: putative hydrolases [Oryza sativa (japonica
  misc_feature (138)..(277): Homolog of NCBI NO: 40736991 NR Description: putative hydrolases [Oryza sativa (japonica
  misc_feature (20)..(279): Homolog of NCBI NO: 21593927 NR Description: unknown [Arabidopsis thaliana]
  misc_feature (20)..(279): Homolog of NCBI NO: 18396732 NR Description: expressed protein
  misc_feature (21)..(277): Homolog of NCBI NO: 15235567 NR Description: putative protein
  misc_feature (4)..(279): Homolog of NCBI NO: 15230110 NR Description: unknown protein; protein id: At3g24420.1
  misc_feature (20)..(327): Homolog of NCBI NO: 34912326 NR Description: P0451D05.26 [Oryza sativa (japonica
PLGINSKCLGLGRGRGVMYLNPRIVGSGERTLVLSHGYGGSQAIWDKVLPHLSRTNKVLLFDWDFSSTAAGEEEEDAEHSCYTFSRFAEELVALMDKMKLSGAVYVGHSMAGMVGCIASITRPDLFTHLVLVGASPRYMNSEDYEGGFDEPDIKAMLSRISSDFRGWAEGFVPLAIGGSADDQPSAVELLARSFFAMDPRVAHGLARMIFLGDQRELLGDVAVPCTLVHVSGDFAAPPCVGRYMQARMRTASMYTIDSVGHFPQLVTPDEMLRILDRILVGSAASQEEETTAAAAAAAKTETTSSEVVSSGGVADALESKGRIDVAT

SEQ ID NO: 19061 - protein, 310 aa, Zea mays subsp. mays
  peptide (1)..(310): Ceres Seq. ID no. 12368138
  misc_feature (39)..(259): Pfam Name: alpha/beta hydrolase fold Pfam Description: alpha/beta hydrolase fold
  misc_feature (6)..(258): Homolog of NCBI NO: 16080463 NR Description: similar to hydrolase [Bacillus subtilis]
  misc_feature (4)..(251): Homolog of NCBI NO: 22987307 NR Description: hypothetical protein [Burkholderia fungorum]
  misc_feature (4)..(256): Homolog of NCBI NO: 24216360 NR Description: Predicted hydrolases or acyltransferases,
  misc_feature (4)..(122): Homolog of NCBI NO: 40736991 NR Description: putative hydrolases [Oryza sativa (japonica
  misc_feature (121)..(260): Homolog of NCBI NO: 40736991 NR Description: putative hydrolases [Oryza sativa (japonica
  misc_feature (3)..(262): Homolog of NCBI NO: 21593927 NR Description: unknown [Arabidopsis thaliana]
  misc_feature (3)..(262): Homolog of NCBI NO: 18396732 NR Description: expressed protein
  misc_feature (4)..(260): Homolog of NCBI NO: 15235567 NR Description: putative protein
  misc_feature (1)..(262): Homolog of NCBI NO: 15230110 NR Description: unknown protein; protein id: At3g24420.1
  misc_feature (3)..(310): Homolog of NCBI NO: 34912326 NR Description: P0451D05.26 [Oryza sativa (japonica
MYLNPRIVGSGERTLVLSHGYGGSQAIWDKVLPHLSRTNKVLLFDWDFSSTAAGEEEEDAEHSCYTFSRFAEELVALMDKMKLSGAVYVGHSMAGMVGCIASITRPDLFTHLVLVGASPRYMNSEDYEGGFDEPDIKAMLSRISSDFRGWAEGFVPLAIGGSADDQPSAVELLARSFFAMDPRVAHGLARMIFLGDQRELLGDVAVPCTLVHVSGDFAAPPCVGRYMQARMRTASMYTIDSVGHFPQLVTPDEMLRILDRILVGSAASQEEETTAAAAAAAKTETTSSEVVSSGGVADALESKGRIDVAT

SEQ ID NO: 19062 - protein, 233 aa, Zea mays subsp. mays
  peptide (1)..(233): Ceres Seq. ID no. 12368139
  misc_feature (1)..(182): Pfam Name: alpha/beta hydrolase fold Pfam Description: alpha/beta hydrolase fold
  misc_feature (1)..(181): Homolog of NCBI NO: 16080463 NR Description: similar to hydrolase [Bacillus subtilis]
  misc_feature (1)..(174): Homolog of NCBI NO: 22987307 NR Description: hypothetical protein [Burkholderia fungorum]
  misc_feature (1)..(179): Homolog of NCBI NO: 24216360 NR Description: Predicted hydrolases or acyltransferases,
  misc_feature (1)..(45): Homolog of NCBI NO: 40736991 NR Description: putative hydrolases [Oryza sativa (japonica
  misc_feature (44)..(183): Homolog of NCBI NO: 40736991 NR Description: putative hydrolases [Oryza sativa (japonica
  misc_feature (1)..(185): Homolog of NCBI NO: 21593927 NR Description: unknown [Arabidopsis thaliana]
  misc_feature (1)..(185): Homolog of NCBI NO: 18396732 NR Description: expressed protein
  misc_feature (1)..(183): Homolog of NCBI NO: 15235567 NR Description: putative protein
  misc_feature (1)..(185): Homolog of NCBI NO: 15230110 NR Description: unknown protein; protein id: At3g24420.1
  misc_feature (1)..(233): Homolog of NCBI NO: 34912326 NR Description: P0451D05.26 [Oryza sativa (japonica
MDKMKLSGAVYVGHSMAGMVGCIASITRPDLFTHLVLVGASPRYMNSEDYEGGFDEPDIKAMLSRISSDFRGWAEGFVPLAIGGSADDQPSAVELLARSFFAMDPRVAHGLARMIFLGDQRELLGDVAVPCTLVHVSGDFAAPPCVGRYMQARMRTASMYTIDSVGHFPQLVTPDEMLRILDRILVGSAASQEEETTAAAAAAAKTETTSSEVVSSGGVADALESKGRIDVAT

SEQ ID NO: 19063 - DNA, 2090 bp, Zea mays subsp. mays
  misc_feature (1)..(2090): Ceres Seq. ID no. 12387564
  misc_feature: MA Experiment ID: 20000479 Result: Up-regulated in Transcription
  misc_feature: MA Experiment 20000479 PARAMETER Experiment Name: Zm_Drought_P Parameter: Age (day) Value: 10
  misc_feature: MA Experiment 20000479 PARAMETER Experiment Name: Zm_Drought_P Parameter: Organism Value: Zea mays
  misc_feature: MA Experiment 20000479 PARAMETER Experiment Name: Zm_Drought_P Parameter: Plant Line Value: 35A19
  misc_feature: MA Experiment 20000479 PARAMETER Experiment Name: Zm_Drought_P Parameter: Timepoint (hr) Value: 48
  misc_feature: MA Experiment 20000479 PARAMETER Experiment Name: Zm_Drought_P Parameter: Tissue Value: Aerial
  misc_feature: MA Experiment 20000479 PARAMETER Experiment Name: Zm_Drought_P Parameter: Treatment Value: Drought vs. No Drought
tcgcaccacaaccacctcctaccccttctcttcttcttctccccccttgcgaatcggagaccaagtgcaattgcccacccaagccccggaaccgggggccaagagcagtacagggggttggtttctgcgacggcgaggacgcgaagcggattcggatcgcgccgccatgccgctcgacgagctcgccgacaaagggccgtcgtcctccgaggaagttcagctcgcgccgtcggattccaagttccggagcctcagtccttcgccgattccgctcccaactcttccgagcatcagatcattggtccactcggtttctgacgagagtgtaaatgtagatgtcgcggcctcacatcaaagtgaaaatggatctatctctactgttagttcactagaatcagagagggcagcatatgaatttcttgctcaaactcctgtcaggtcaactgatgcacatcttcttgagttttcggaggctatgagaactgttgcaaaagccttacgacgagtggctgaagggaaggctgctgctcaagcagaggcagcggagtggaaacgtaagtatgaattagagacagcgcacaagcatcggagtaaaatcaaaggctacagcagttgtatcaataatgacttagacaaactggtcagccaactaaccctggagacacctacatctgatcaattaggatgttgcggaaagcatggtatatgtgcacatgagattctccaggacgaagttcctgggcctatcccaagatctaatcacaaggtggtggggagaaaggcatcatttaaactttcatggggatgtaatggggataaaaatggacaacataagcatgattttgtgtcctttgaaaaaggtgatataacaaccgcagaacgaagcaataagcagatcttactgaaatgggaatcgccaccacaaacagtgcttttcataaccaaaccgaattccaactctgttcgtgttctttgtgctgaaatgatcagatggcttagggagcataaaaatataaacatctttgttgagccacgtgttagcaaggaacttctaacagaggattcttactacaacttcgtccaaacatgggataatgatgaggagataaagatgctgcgcacaaaggttgatttaattataactcttggtggtgatggaactgttctgtgggctgcatcattgttcaaaggacctgttcctccggttgttgcatttgccctgggatcactgggcttcatgacgcctttcccaagcgagcaataccgtgagttgttggacaatgtgctgaatgggccatttagcatcacgctgagaaaccgcatacagtgtcatgtaatacgtgacgaggcaaaggatgaaatcgtgtctgaggagccattcttagtgttgaacgaagttacaatcgaccgaggaatatcatcctaccttaccaacctggaagtctactgtgacagctcttttgttacttgcgtacaaggggatggactaatcatatcaactacatctggaagtacagcatattcattagcagctggagggtccatggttcatcctcaggtcccagggatccttttcaccccaatctgcccgcactctctgtcattcagacctttgattctgcctgaatacgtgaccctccgcgttcaagtgccgttcaacagcaggggcaatgcctgggcatccttcgacggcaaagaccgacagcagctgtcgcccggtgacgccctgatctgcagcatttctccctggcccgtgcccacagcctgcctggtggactcgacgaccgatttcctccgcagcatccatgagggtctccactggaacttgaggaaatcccagtcatttgacggcccgcgtgattgatgcaacagctgttcagttatatttcagcccggtgccagaattcaagctgggaattctcaacaggaataactgtagctactccagggtgctctcacctttaccgttccatacttgcctatatacaaaggttgcgtgcgttagatgtgaggtatagatagatgtatagaatatggatggatgataacgactggacatgttgaataatacaacgccaacgtatgcacgc

SEQ ID NO: 19064 - protein, 620 aa, Zea mays subsp. mays
  peptide (1)..(620): Ceres Seq. ID no. 12387565
  misc_feature (309)..(591): Pfam Name: ATP-NAD kinase Pfam Description: ATP-NAD kinase
  misc_feature (301)..(613): Homolog of NCBI NO: 28573828 NR Description: CG33156-PA [Drosophila melanogaster]
  misc_feature (301)..(613): Homolog of NCBI NO: 28573832 NR Description: CG33156-PB [Drosophila melanogaster]
  misc_feature (301)..(613): Homolog of NCBI NO: 28573826 NR Description: CG33156-PC [Drosophila melanogaster]
  misc_feature (145)..(618): Homolog of NCBI NO: 11994267 NR Description: contains similarity to unknown
  misc_feature (120)..(618): Homolog of NCBI NO: 39843359 NR Description: NADK1 [Arabidopsis thaliana]
  misc_feature (93)..(618): Homolog of NCBI NO: 22331228 NR Description: unknown protein; protein id: At3g21070.1
  misc_feature (93)..(618): Homolog of NCBI NO: 20259322 NR Description: unknown protein [Arabidopsis thaliana]
  misc_feature (366)..(390): Homolog of NCBI NO: 34905734 NR Description: putative inorganic polyphosphate/ATP-NAD kinase
  misc_feature (418)..(620): Homolog of NCBI NO: 34905734 NR Description: putative inorganic polyphosphate/ATP-NAD kinase
  misc_feature (56)..(298): Homolog of NCBI NO: 34905734 NR Description: putative inorganic polyphosphate/ATP-NAD kinase
RTTTTSYPFSSSSPPLRIGDQVQLPTQAPEPGAKSSTGGWFLRRRGREADSDRAAMPLDELADKGPSSSEEVQLAPSDSKFRSLSPSPIPLPTLPSIRSLVHSVSDESVNVDVAASHQSENGSISTVSSLESERAAYEFLAQTPVRSTDAHLLEFSEAMRTVAKALRRVAEGKAAAQAEAAEWKRKYELETAHKHRSKIKGYSSCINNDLDKLVSQLTLETPTSDQLGCCGKHGICAHEILQDEVPGPIPRSNHKVVGRKASFKLSWGCNGDKNGQHKHDFVSFEKGDITTAERSNKQILLKWESPPQTVLFITKPNSNSVRVLCAEMIRWLREHKNINIFVEPRVSKELLTEDSYYNFVQTWDNDEEIKMLRTKVDLIITLGGDGTVLWAASLFKGPVPPVVAFALGSLGFMTPFPSEQYRELLDNVLNGPFSITLRNRIQCHVIRDEAKDEIVSEEPFLVLNEVTIDRGISSYLTNLEVYCDSSFVTCVQGDGLIISTTSGSTAYSLAAGGSMVHPQVPGILFTPICPHSLSFRPLILPEYVTLRVQVPFNSRGNAWASFDGKDRQQLSPGDALICSISPWPVPTACLVDSTTDFLRSIHEGLHWNLRKSQSFDGPRD

SEQ ID NO: 19065 - protein, 565 aa, Zea mays subsp. mays
  peptide (1)..(565): Ceres Seq. ID no. 12387566
  misc_feature (254)..(536): Pfam Name: ATP-NAD kinase Pfam Description: ATP-NAD kinase
  misc_feature (246)..(558): Homolog of NCBI NO: 28573832 NR Description: CG33156-PB [Drosophila melanogaster]
  misc_feature (246)..(558): Homolog of NCBI NO: 28573828 NR Description: CG33156-PA [Drosophila melanogaster]
  misc_feature (246)..(558): Homolog of NCBI NO: 28573826 NR Description: CG33156-PC [Drosophila melanogaster]
  misc_feature (90)..(563): Homolog of NCBI NO: 11994267 NR Description: contains similarity to unknown
  misc_feature (65)..(563): Homolog of NCBI NO: 39843359 NR Description: NADK1 [Arabidopsis thaliana]
  misc_feature (38)..(563): Homolog of NCBI NO: 22331228 NR Description: unknown protein; protein id: At3g21070.1
  misc_feature (38)..(563): Homolog of NCBI NO: 20259322 NR Description: unknown protein [Arabidopsis thaliana]
  misc_feature (311)..(335): Homolog of NCBI NO: 34905734 NR Description: putative inorganic polyphosphate/ATP-NAD kinase
  misc_feature (363)..(565): Homolog of NCBI NO: 34905734 NR Description: putative inorganic polyphosphate/ATP-NAD kinase
  misc_feature (1)..(243): Homolog of NCBI NO: 34905734 NR Description: putative inorganic polyphosphate/ATP-NAD kinase
MPLDELADKGPSSSEEVQLAPSDSKFRSLSPSPIPLPTLPSIRSLVHSVSDESVNVDVAASHQSENGSISTVSSLESERAAYEFLAQTPVRSTDAHLLEFSEAMRTVAKALRRVAEGKAAAQAEAAEWKRKYELETAHKHRSKIKGYSSCINNDLDKLVSQLTLETPTSDQLGCCGKHGICAHEILQDEVPGPIPRSNHKVVGRKASFKLSWGCNGDKNGQHKHDFVSFEKGDITTAERSNKQILLKWESPPQTVLFITKPNSNSVRVLCAEMIRWLREHKNINIFVEPRVSKELLTEDSYYNFVQTWDNDEEIKMLRTKVDLIITLGGDGTVLWAASLFKGPVPPVVAFALGSLGFMTPFPSEQYRELLDNVLNGPFSITLRNRIQCHVIRDEAKDEIVSEEPFLVLNEVTIDRGISSYLTNLEVYCDSSFVTCVQGDGLIISTTSGSTAYSLAAGGSMVHPQVPGILFTPICPHSLSFRPLILPEYVTLRVQVPFNSRGNAWASFDGKDRQQLSPGDALICSISPWPVPTACLVDSTTDFLRSIHEGLHWNLRKSQSFDGPRD

SEQ ID NO: 19066 - protein, 462 aa, Zea mays subsp. mays
  peptide (1)..(462): Ceres Seq. ID no. 12387567
  misc_feature (151)..(433): Pfam Name: ATP-NAD kinase Pfam Description: ATP-NAD kinase
  misc_feature (143)..(455): Homolog of NCBI NO: 28573832 NR Description: CG33156-PB [Drosophila melanogaster]
  misc_feature (143)..(455): Homolog of NCBI NO: 28573828 NR Description: CG33156-PA [Drosophila melanogaster]
  misc_feature (143)..(455): Homolog of NCBI NO: 28573826 NR Description: CG33156-PC [Drosophila melanogaster]
  misc_feature (1)..(460): Homolog of NCBI NO: 11994267 NR Description: contains similarity to unknown
  misc_feature (1)..(460): Homolog of NCBI NO: 39843359 NR Description: NADK1 [Arabidopsis thaliana]
  misc_feature (1)..(460): Homolog of NCBI NO: 22331228 NR Description: unknown protein; protein id: At3g21070.1
  misc_feature (1)..(460): Homolog of NCBI NO: 20259322 NR Description: unknown protein [Arabidopsis thaliana]
  misc_feature (208)..(232): Homolog of NCBI NO: 34905734 NR Description: putative inorganic polyphosphate/ATP-NAD kinase
  misc_feature (260)..(462): Homolog of NCBI NO: 34905734 NR Description: putative inorganic polyphosphate/ATP-NAD kinase
  misc_feature (1)..(140): Homolog of NCBI NO: 34905734 NR Description: putative inorganic polyphosphate/ATP-NAD kinase
MRTVAKALRRVAEGKAAAQAEAAEWKRKYELETAHKHRSKIKGYSSCINNDLDKLVSQLTLETPTSDQLGCCGKHGICAHEILQDEVPGPIPRSNHKVVGRKASFKLSWGCNGDKNGQHKHDFVSFEKGDITTAERSNKQILLKWESPPQTVLFITKPNSNSVRVLCAEMIRWLREHKNINIFVEPRVSKELLTEDSYYNFVQTWDNDEEIKMLRTKVDLIITLGGDGTVLWAASLFKGPVPPVVAFALGSLGFMTPFPSEQYRELLDNVLNGPFSITLRNRIQCHVIRDEAKDEIVSEEPFLVLNEVTIDRGISSYLTNLEVYCDSSFVTCVQGDGLIISTTSGSTAYSLAAGGSMVHPQVPGILFTPICPHSLSFRPLILPEYVTLRVQVPFNSRGNAWASFDGKDRQQLSPGDALICSISPWPVPTACLVDSTTDFLRSIHEGLHWNLRKSQSFDGPRD

SEQ ID NO: 19067 - DNA, 1917 bp, Zea mays subsp. mays
  misc_feature (1)..(1917): Ceres Seq. ID no. 13493155
  misc_feature: MA Experiment ID: 108527 Result: Up-regulated in Transcription
  misc_feature: MA Experiment 108527 PARAMETER Experiment Name: Zm_5mM_NO_P Parameter: Age (day) Value: 8
  misc_feature: MA Experiment 108527 PARAMETER Experiment Name: Zm_5mM_NO_P Parameter: Organism Value: Zea mays
  misc_feature: MA Experiment 108527 PARAMETER Experiment Name: Zm_5mM_NO_P Parameter: Plant Line Value: 35A19
  misc_feature: MA Experiment 108527 PARAMETER Experiment Name: Zm_5mM_NO_P Parameter: Timepoint (hr) Value: 6
  misc_feature: MA Experiment 108527 PARAMETER Experiment Name: Zm_5mM_NO_P Parameter: Tissue Value: Aerial
  misc_feature: MA Experiment 108527 PARAMETER Experiment Name: Zm_5mM_NO_P Parameter: Treatment Value: 5mM NO vs. No Treatment
  misc_feature: MA Experiment ID: 108528 Result: Up-regulated in Transcription
  misc_feature: MA Experiment 108528 PARAMETER Experiment Name: Zm_Imbibed_Seeds_P Parameter: Age (day) Value: 5 vs. 2
  misc_feature: MA Experiment 108528 PARAMETER Experiment Name: Zm_Imbibed_Seeds_P Parameter: Organism Value: Zea mays
  misc_feature: MA Experiment 108528 PARAMETER Experiment Name: Zm_Imbibed_Seeds_P Parameter: Plant Line Value: 35A19
  misc_feature: MA Experiment 108528 PARAMETER Experiment Name: Zm_Imbibed_Seeds_P Parameter: Tissue Value: Aerial vs. Embryo
  misc_feature: MA Experiment ID: 108530 Result: Up-regulated in Transcription
  misc_feature: MA Experiment 108530 PARAMETER Experiment Name: Zm_Imbibed_Seeds_P Parameter: Age (day) Value: 6 vs. 2
  misc_feature: MA Experiment 108530 PARAMETER Experiment Name: Zm_Imbibed_Seeds_P Parameter: Organism Value: Zea mays
  misc_feature: MA Experiment 108530 PARAMETER Experiment Name: Zm_Imbibed_Seeds_P Parameter: Plant Line Value: 35A19
  misc_feature: MA Experiment 108530 PARAMETER Experiment Name: Zm_Imbibed_Seeds_P Parameter: Tissue Value: Aerial vs. Embryo
  misc_feature: MA Experiment ID: 108534 Result: Up-regulated in Transcription
  misc_feature: MA Experiment 108534 PARAMETER Experiment Name: Zm_4deg_Cold_P Parameter: Age (hr) Value: 8
  misc_feature: MA Experiment 108534 PARAMETER Experiment Name: Zm_4deg_Cold_P Parameter: Organism Value: Zea mays
  misc_feature: MA Experiment 108534 PARAMETER Experiment Name: Zm_4deg_Cold_P Parameter: Plant Line Value: 35A19
  misc_feature: MA Experiment 108534 PARAMETER Experiment Name: Zm_4deg_Cold_P Parameter: Temperature (deg C) Value: 4 vs. 22
  misc_feature: MA Experiment 108534 PARAMETER Experiment Name: Zm_4deg_Cold_P Parameter: Timepoint (hr) Value: 6
  misc_feature: MA Experiment 108534 PARAMETER Experiment Name: Zm_4deg_Cold_P Parameter: Tissue Value: Aerial
  misc_feature: MA Experiment ID: 108535 Result: Down-regulated in Transcription
  misc_feature: MA Experiment 108535 PARAMETER Experiment Name: Zm_Meristem_P Parameter: Age (day) Value: 8
  misc_feature: MA Experiment 108535 PARAMETER Experiment Name: Zm_Meristem_P Parameter: Organism Value: Zea mays
  misc_feature: MA Experiment 108535 PARAMETER Experiment Name: Zm_Meristem_P Parameter: Plant Line Value: 35A19
  misc_feature: MA Experiment 108535 PARAMETER Experiment Name: Zm_Meristem_P Parameter: Tissue Value: Root Meristem vs. Above Root Meristem
  misc_feature: MA Experiment ID: 108547 Result: Up-regulated in Transcription
  misc_feature: MA Experiment 108547 PARAMETER Experiment Name: Zm_Imbibed_Seeds_P Parameter: Age (day) Value: 4 vs. 2
  misc_feature: MA Experiment 108547 PARAMETER Experiment Name: Zm_Imbibed_Seeds_P Parameter: Organism Value: Zea mays
  misc_feature: MA Experiment 108547 PARAMETER Experiment Name: Zm_Imbibed_Seeds_P Parameter: Plant Line Value: 35A19
  misc_feature: MA Experiment 108547 PARAMETER Experiment Name: Zm_Imbibed_Seeds_P Parameter: Tissue Value: Aerial vs. Embryo
  misc_feature: MA Experiment ID: 108688 Result: Down-regulated in Transcription
  misc_feature: MA Experiment 108688 PARAMETER Experiment Name: Zm_Embryos-Flowers__P Parameter: Tissue Value: Immature Flowers vs. Aerial+
  misc_feature: MA Experiment ID: 108689 Result: Up-regulated in Transcription
  misc_feature: MA Experiment 108689 PARAMETER Experiment Name: Zm_Drought_Roots_P Parameter: Age (day) Value: 9
  misc_feature: MA Experiment 108689 PARAMETER Experiment Name: Zm_Drought_Roots_P Parameter: Organism Value: Zea mays
  misc_feature: MA Experiment 108689 PARAMETER Experiment Name: Zm_Drought_Roots_P Parameter: Plant Line Value: 35A19
  misc_feature: MA Experiment 108689 PARAMETER Experiment Name: Zm_Drought_Roots_P Parameter: Timepoint (hr) Value: 24
  misc_feature: MA Experiment 108689 PARAMETER Experiment Name: Zm_Drought_Roots_P Parameter: Tissue Value: Roots
  misc_feature: MA Experiment 108689 PARAMETER Experiment Name: Zm_Drought_Roots_P Parameter: Treatment Value: Drought vs. No Drought
  misc_feature: MA Experiment ID: 20000535 Result: Down-regulated in Transcription
  misc_feature: MA Experiment 20000535 PARAMETER Experiment Name: Zm_Hybrid_Seed_Dev_P Parameter: DAP Value: 30 vs. 12
  misc_feature: MA Experiment 20000535 PARAMETER Experiment Name: Zm_Hybrid_Seed_Dev_P Parameter: Organism Value: Zea mays
  misc_feature: MA Experiment 20000535 PARAMETER Experiment Name: Zm_Hybrid_Seed_Dev_P Parameter: Plant Line Value: 35A19
  misc_feature: MA Experiment 20000535 PARAMETER Experiment Name: Zm_Hybrid_Seed_Dev_P Parameter: Tissue Value: Embryo vs. Unfert Floret
tagaacatcctaatcaaaaacacataagaggcgacatcacatcgcgttccgccgcctcacacgctagttggagctgtagtattagccaaccagccagcctccgatctccatccatatggaggaggctgcgcccgcggcggtcatggagcgggagcgcctcacggccgagatggccttccgcggcgcggacgaagctcggcgggaaggcggcgacccggcgcccagcatcgtcatcaagatccgccgccggctcccggacttcgcccgcaacatcaagctcaagtacgtgaagctcgggatccgccacggcggcagccccacgtcgctgctgccggcgctctgcgtgccggcggtcgccgccgccgcctactcgttcgtccgcctcgacgtcatctactactccgtcgacctgctcacctgcgtcgcctggctcggcaccgcgctgctgctgctcaccgtctactacctcaagcggccccgccccgtgtacctcgtcgagttcgcgtgctacaagccggaggagcggctcaagatctccaagtcggccttcctcgagatgaccgagagcaccggctccttcaatgaggcggctctggacttccagaccaagatcaccagccgctccgcgctcggggacgagacgtacctgcccccgggcgtccaggcgcgcccgcccaggctaaacatggcggaggcgcggaaggaggccgaggcggtcatgttcgggtgcctggacgcgctgttcgagtccacggggatcgacccgcgccgcgacgtgcgcatcctcatcgtcaactgcagcctcttcaacccgacgccgtcgctggcgtccatggtcatcaaccactacaggatgagggaggacgtcaagtcgttcaacctcggcggcatggggtgcagcgccggcctcatcgccgtcgacctcgccaaggacatgctccaggcgaaccccggatcgtacgccgtggtgctcagcaccgagaacatcaccctcaactggtacttcggcaacgaccgctccatgctcctctccaactgcatcttccgcatgggcggggccgcggcgctgctgtccaacaggcgcgcggacgccgggcgcgccaagtaccggctgctccacacggtgcgcacccacaaggcgccaccgacgagtgcttcaactgcgtgtaccagcgcgaggacgaggccggcaaggcgggcgtctcgctggcgcgggagctcatggcggtggccggcgacgcgctcaagaccaacatcacgacgctggggcccctggtgctgcccctgagcgagcagctcaagttcctcaggtcgctgatgatgcgccgcgtgttccgcgtcaggggcgtgcgcccctacatcccggacttccggcgcgcgttcgagcacttctgcgtgcacgccggcgggcgcgcggtgctggaggaggtgcagcgcagcctgagcctgcgggacacggacatggagcccagcaagtgctccctccaccggttcggcaacaccagcagcagctcgctgtggtacgagctggcgtacgccgaggccaagggccgggtaaggcgcggccaccgcgtgtggcagatcggcttcggctcggggttcaagtgcaacagcgccgtgtggcgcgctctacgcgacgtgccgccgctgccgtcgtcgcccggcgccgcggcggggccgggggccaggaagggcgcgccgcagagctgctgcaatccctgggtggacgacgtggacaggtaccctcccaaggcgtacgtctgatgggccacgtcacgtggccacaacaattgcatgatcccaatcccattcggatttcctcacgacgaattaatgaagaagggcgtgtgagtgtgagggagaaagttatacttgtatgtattttttttttcagttttattttgtcgtttcgttttc

SEQ ID NO: 19068 - protein, 390 aa, Zea mays subsp. mays
  peptide (1)..(390): Ceres Seq. ID no. 13493156
  misc_feature (179)..(320): Pfam Name: Chalcone and stilbene synthases, N-terminal domain Pfam Description: Chalcone and stilbene synthases, N-terminal
  misc_feature (44)..(347): Homolog of NCBI NO: 15219676 NR Description: beta-ketoacyl-CoA synthase, putative [Arabidopsis
  misc_feature (46)..(347): Homolog of NCBI NO: 15239981 NR Description: beta-ketoacyl-CoA synthase, putative [Arabidopsis
  misc_feature (44)..(364): Homolog of NCBI NO: 15225767 NR Description: beta-ketoacyl-CoA synthase, putative [Arabidopsis
  misc_feature (46)..(347): Homolog of NCBI NO: 14334714 NR Description: putative beta-ketoacyl-CoA synthase [Arabidopsis
  misc_feature (48)..(341): Homolog of NCBI NO: 9714501 NR Description: putative fatty acid elongase [Zea mays]
  misc_feature (27)..(344): Homolog of NCBI NO: 29417540 NR Description: beta-ketoacyl-CoA-synthase [Marchantia polymorpha]
  misc_feature (10)..(341): Homolog of NCBI NO: 22329274 NR Description: fatty acid elongase 3-ketoacyl-CoA synthase 1
  misc_feature (10)..(341): Homolog of NCBI NO: 4091810 NR Description: fatty acid elongase 3-ketoacyl-CoA synthase 1
  misc_feature (10)..(346): Homolog of NCBI NO: 3551960 NR Description: senescence-associated protein 15 [Hemerocallis
  misc_feature (23)..(341): Homolog of NCBI NO: 37531254 NR Description: putative senescence-associated protein 15
MEEAAPAAVMERERLTAEMAFRGADEARREGGDPAPSIVIKIRRRLPDFARNIKLKYVKLGIRHGGSPTSLLPALCVPAVAAAAYSFVRLDVIYYSVDLLTCVAWLGTALLLLTVYYLKRPRPVYLVEFACYKPEERLKISKSAFLEMTESTGSFNEAALDFQTKITSRSALGDETYLPPGVQARPPRLNMAEARKEAEAVMFGCLDALFESTGIDPRRDVRILIVNCSLFNPTPSLASMVINHYRMREDVKSFNLGGMGCSAGLIAVDLAKDMLQANPGSYAVVLSTENITLNWYFGNDRSMLLSNCIFRMGGAAALLSNRRADAGRAKYRLLHTVRTHKAPPTSASTACTSARTRPARRASRWRGSSWRWPATRSRPTSRRWGPWCCP

SEQ ID NO: 19069 - protein, 381 aa, Zea mays subsp. mays
  peptide (1)..(381): Ceres Seq. ID no. 13493157
  misc_feature (170)..(311): Pfam Name: Chalcone and stilbene synthases, N-terminal domain Pfam Description: Chalcone and stilbene synthases, N-terminal
  misc_feature (35)..(338): Homolog of NCBI NO: 15219676 NR Description: beta-ketoacyl-CoA synthase, putative [Arabidopsis
  misc_feature (37)..(338): Homolog of NCBI NO: 15239981 NR Description: beta-ketoacyl-CoA synthase, putative [Arabidopsis
  misc_feature (35)..(355): Homolog of NCBI NO: 15225767 NR Description: beta-ketoacyl-CoA synthase, putative [Arabidopsis
  misc_feature (37)..(338): Homolog of NCBI NO: 14334714 NR Description: putative beta-ketoacyl-CoA synthase [Arabidopsis
  misc_feature (39)..(332): Homolog of NCBI NO: 9714501 NR Description: putative fatty acid elongase [Zea mays]
  misc_feature (18)..(335): Homolog of NCBI NO: 29417540 NR Description: beta-ketoacyl-CoA-synthase [Marchantia polymorpha]
  misc_feature (1)..(332): Homolog of NCBI NO: 22329274 NR Description: fatty acid elongase 3-ketoacyl-CoA synthase 1
  misc_feature (1)..(332): Homolog of NCBI NO: 4091810 NR Description: fatty acid elongase 3-ketoacyl-CoA synthase 1
  misc_feature (1)..(337): Homolog of NCBI NO: 3551960 NR Description: senescence-associated protein 15 [Hemerocallis
  misc_feature (14)..(332): Homolog of NCBI NO: 37531254 NR Description: putative senescence-associated protein 15
MERERLTAEMAFRGADEARREGGDPAPSIVIKIRRRLPDFARNIKLKYVKLGIRHGGSPTSLLPALCVPAVAAAAYSFVRLDVIYYSVDLLTCVAWLGTALLLLTVYYLKRPRPVYLVEFACYKPEERLKISKSAFLEMTESTGSFNEAALDFQTKITSRSALGDETYLPPGVQARPPRLNMAEARKEAEAVMFGCLDALFESTGIDPRRDVRILIVNCSLFNPTPSLASMVINHYRMREDVKSFNLGGMGCSAGLIAVDLAKDMLQANPGSYAVVLSTENITLNWYFGNDRSMLLSNCIFRMGGAAALLSNRRADAGRAKYRLLHTVRTHKAPPTSASTACTSARTRPARRASRWRGSSWRWPATRSRPTSRRWGPWCCP

SEQ ID NO: 19070 - protein, 372 aa, Zea mays subsp. mays
  peptide (1)..(372): Ceres Seq. ID no. 13493158
  misc_feature (161)..(302): Pfam Name: Chalcone and stilbene synthases, N-terminal domain Pfam Description: Chalcone and stilbene synthases, N-terminal
  misc_feature (26)..(329): Homolog of NCBI NO: 15219676 NR Description: beta-ketoacyl-CoA synthase, putative [Arabidopsis
  misc_feature (28)..(329): Homolog of NCBI NO: 15239981 NR Description: beta-ketoacyl-CoA synthase, putative [Arabidopsis
  misc_feature (26)..(346): Homolog of NCBI NO: 15225767 NR Description: beta-ketoacyl-CoA synthase, putative [Arabidopsis
  misc_feature (28)..(329): Homolog of NCBI NO: 14334714 NR Description: putative beta-ketoacyl-CoA synthase [Arabidopsis
  misc_feature (30)..(323): Homolog of NCBI NO: 9714501 NR Description: putative fatty acid elongase [Zea mays]
  misc_feature (9)..(326): Homolog of NCBI NO: 29417540 NR Description: beta-ketoacyl-CoA-synthase [Marchantia polymorpha]
  misc_feature (1)..(323): Homolog of NCBI NO: 22329274 NR Description: fatty acid elongase 3-ketoacyl-CoA synthase 1
  misc_feature (1)..(323): Homolog of NCBI NO: 4091810 NR Description: fatty acid elongase 3-ketoacyl-CoA synthase 1
  misc_feature (1)..(328): Homolog of NCBI NO: 3551960 NR Description: senescence-associated protein 15 [Hemerocallis
  misc_feature (5)..(323): Homolog of NCBI NO: 37531254 NR Description: putative senescence-associated protein 15
MAFRGADEARREGGDPAPSIVIKIRRRLPDFARNIKLKYVKLGIRHGGSPTSLLPALCVPAVAAAAYSFVRLDVIYYSVDLLTCVAWLGTALLLLTVYYLKRPRPVYLVEFACYKPEERLKISKSAFLEMTESTGSFNEAALDFQTKITSRSALGDETYLPPGVQARPPRLNMAEARKEAEAVMFGCLDALFESTGIDPRRDVRILIVNCSLFNPTPSLASMVINHYRMREDVKSFNLGGMGCSAGLIAVDLAKDMLQANPGSYAVVLSTENITLNWYFGNDRSMLLSNCIFRMGGAAALLSNRRADAGRAKYRLLHTVRTHKAPPTSASTACTSARTRPARRASRWRGSSWRWPATRSRPTSRRWGPWCCP

SEQ ID NO: 19071 - DNA, 1297 bp, Zea mays subsp. mays
  misc_feature (1)..(1297): Ceres Seq. ID no. 12418944
  misc_feature: MA Experiment ID: 108515 Result: Up-regulated in Transcription
  misc_feature: MA Experiment 108515 PARAMETER Experiment Name: Zm_2mM_SA_P Parameter: Age (day) Value: 8
  misc_feature: MA Experiment 108515 PARAMETER Experiment Name: Zm_2mM_SA_P Parameter: Organism Value: Zea mays
  misc_feature: MA Experiment 108515 PARAMETER Experiment Name: Zm_2mM_SA_P Parameter: Plant Line Value: 35A19
  misc_feature: MA Experiment 108515 PARAMETER Experiment Name: Zm_2mM_SA_P Parameter: Timepoint (hr) Value: 12
  misc_feature: MA Experiment 108515 PARAMETER Experiment Name: Zm_2mM_SA_P Parameter: Tissue Value: Aerial
  misc_feature: MA Experiment 108515 PARAMETER Experiment Name: Zm_2mM_SA_P Parameter: Treatment Value: 2mM SA vs. No Treatment
  misc_feature: MA Experiment ID: 108689 Result: Up-regulated in Transcription
  misc_feature: MA Experiment 108689 PARAMETER Experiment Name: Zm_Drought_Roots_P Parameter: Age (day) Value: 9
  misc_feature: MA Experiment 108689 PARAMETER Experiment Name: Zm_Drought_Roots_P Parameter: Organism Value: Zea mays
  misc_feature: MA Experiment 108689 PARAMETER Experiment Name: Zm_Drought_Roots_P Parameter: Plant Line Value: 35A19
  misc_feature: MA Experiment 108689 PARAMETER Experiment Name: Zm_Drought_Roots_P Parameter: Timepoint (hr) Value: 24
  misc_feature: MA Experiment 108689 PARAMETER Experiment Name: Zm_Drought_Roots_P Parameter: Tissue Value: Roots
  misc_feature: MA Experiment 108689 PARAMETER Experiment Name: Zm_Drought_Roots_P Parameter: Treatment Value: Drought vs. No Drought
  misc_feature: MA Experiment ID: 20000478 Result: Up-regulated in Transcription
  misc_feature: MA Experiment 20000478 PARAMETER Experiment Name: Zm_5mM_SA_P Parameter: Age (day) Value: 11
  misc_feature: MA Experiment 20000478 PARAMETER Experiment Name: Zm_5mM_SA_P Parameter: Organism Value: Zea mays
  misc_feature: MA Experiment 20000478 PARAMETER Experiment Name: Zm_5mM_SA_P Parameter: Plant Line Value: 35A19
  misc_feature: MA Experiment 20000478 PARAMETER Experiment Name: Zm_5mM_SA_P Parameter: Timepoint (hr) Value: 72
  misc_feature: MA Experiment 20000478 PARAMETER Experiment Name: Zm_5mM_SA_P Parameter: Tissue Value: Aerial
  misc_feature: MA Experiment 20000478 PARAMETER Experiment Name: Zm_5mM_SA_P Parameter: Treatment Value: 5mM SA vs. No Treatment
  misc_feature: MA Experiment ID: 20000479 Result: Up-regulated in Transcription
  misc_feature: MA Experiment 20000479 PARAMETER Experiment Name: Zm_Drought_P Parameter: Age (day) Value: 10
  misc_feature: MA Experiment 20000479 PARAMETER Experiment Name: Zm_Drought_P Parameter: Organism Value: Zea mays
  misc_feature: MA Experiment 20000479 PARAMETER Experiment Name: Zm_Drought_P Parameter: Plant Line Value: 35A19
  misc_feature: MA Experiment 20000479 PARAMETER Experiment Name: Zm_Drought_P Parameter: Timepoint (hr) Value: 48
  misc_feature: MA Experiment 20000479 PARAMETER Experiment Name: Zm_Drought_P Parameter: Tissue Value: Aerial
  misc_feature: MA Experiment 20000479 PARAMETER Experiment Name: Zm_Drought_P Parameter: Treatment Value: Drought vs. No Drought
  misc_feature: MA Experiment ID: 20000480 Result: Up-regulated in Transcription
  misc_feature: MA Experiment 20000480 PARAMETER Experiment Name: Zm_Drought_P Parameter: Age (day) Value: 11
  misc_feature: MA Experiment 20000480 PARAMETER Experiment Name: Zm_Drought_P Parameter: Organism Value: Zea mays
  misc_feature: MA Experiment 20000480 PARAMETER Experiment Name: Zm_Drought_P Parameter: Plant Line Value: 35A19
  misc_feature: MA Experiment 20000480 PARAMETER Experiment Name: Zm_Drought_P Parameter: Timepoint (hr) Value: 72
  misc_feature: MA Experiment 20000480 PARAMETER Experiment Name: Zm_Drought_P Parameter: Tissue Value: Aerial
  misc_feature: MA Experiment 20000480 PARAMETER Experiment Name: Zm_Drought_P Parameter: Treatment Value: Drought vs. No Drought
  misc_feature: MA Experiment ID: 20000626 Result: Up-regulated in Transcription
  misc_feature: MA Experiment 20000626 PARAMETER Experiment Name: Zm_Herbicide-Treatments_P Parameter: Timepoint (hr) Value: 12
  misc_feature: MA Experiment 20000626 PARAMETER Experiment Name: Zm_Herbicide-Treatments_P Parameter: Tissue Value: Aerial
  misc_feature: MA Experiment 20000626 PARAMETER Experiment Name: Zm_Herbicide-Treatments_P Parameter: Treatment Value: Roundup vs. No Treatment
gcacgagaccattacctagaacatcctaatcgacttttcccaccaacacctccaaacctcctctctatttccaatttccacgccgccgccaacatgaccacctcagccgccgcctccgccaccgccgcgttgtccaccccatcctccgtcaatccccatcgatcgtcttctgcgctcaggctcccagcgtccctccgccgatcccatcccaacagattcttatcgtcgtcaccctcgcgctctccactcgtgccggtctccgccatggcctctcccgccgccgccggtgagacgtcctccaggaagaaactcatcatattcgatgcggaggacgacctcgcggcgtcactggccaagtacacgtctgagctgtcggcgaagttcgcggctgagaggggcgccttcaccgtcgtgctctccggcggctccctcgtcaaggccctcaggaaactagcggagccgccgtacctagaggcggtggattggagtaaatggcatgtgttctgggtggatgagagggtggtgcccaaggatcacgcggatagcaactacaggctcgcctcagatcagttcctctctaaggtgccgattcctgctgaccaagttcatgccatcaatgacgaactgtcatccgagggggctgcaggggactacgaaactcgtttaaagcagcttgttaagaacggtgtgatcgaactgtcgccggtgtccgggttccccaagtttgaccttatgcttatggggatggggcctgatggccacgttgcctcactcttccctggccaccctgttgtcaatgaataccagaagtgggtcacctttgtcaaggactccccgaagccgccgccggagagaataacgttcactttcccagtgatcaactcgtccgcacacatcgcacttgtggtcaccggtgctggcaaagctggtgctgtgcataaagcactttcagaagggcaaagtacatcagatttgctgcctgtcgagatggtttctcttcagaacggagagctcgtttggttcactgacaagccagcggtgtcaatgttgtcgagcatctgaagcccacgattgtataaatttgaagcttcaatttgatgggattcatacacgattgggtcttgttcggttgcatggtgattggaggggattagggatgattaaatctctttctattcaattttaaatggtaagagacttaatctcctctaattctcctcaatctagttttaaccgaacaagtccttgatggaaatctattcggttcgacatagaactccgagtgaatagattcggc

SEQ ID NO: 19072 - protein, 322 aa, Zea mays subsp. mays
  peptide (1)..(322): Ceres Seq. ID no. 12418945
  misc_feature (86)..(317): Pfam Name: Glucosamine-6-phosphate Pfam Description: Glucosamine-6-phosphate
  misc_feature (70)..(319): Homolog of NCBI NO: 15222922 NR Description: unknown protein; protein id: At1g13700.1
  misc_feature (75)..(319): Homolog of NCBI NO: 21536675 NR Description: 6-phosphogluconolactonase-like protein
  misc_feature (69)..(319): Homolog of NCBI NO: 15238526 NR Description: 6-phosphogluconolactonase-like protein
  misc_feature (75)..(319): Homolog of NCBI NO: 15229127 NR Description: 6-phosphogluconolactonase - like protein
  misc_feature (69)..(319): Homolog of NCBI NO: 21537412 NR Description: 6-phosphogluconolactonase-like protein
  misc_feature (62)..(321): Homolog of NCBI NO: 34394567 NR Description: putative 6-phosphogluconolactonase
  misc_feature (70)..(319): Homolog of NCBI NO: 10177901 NR Description: 6-phosphogluconolactonase-like protein
  misc_feature (55)..(319): Homolog of NCBI NO: 18420789 NR Description: 6-phosphogluconolactonase-like protein
  misc_feature (55)..(319): Homolog of NCBI NO: 21554291 NR Description: 6-phosphogluconolactonase-like protein
  misc_feature (59)..(319): Homolog of NCBI NO: 28140256 NR Description: putative 6-phosphogluconolactonase [Elaeis
MTTSAAASATAALSTPSSVNPHRSSSALRLPASLRRSHPNRFLSSSPSRSPLVPVSAMASPAAAGETSSRKKLIIFDAEDDLAASLAKYTSELSAKFAAERGAFTVVLSGGSLVKALRKLAEPPYLEAVDWSKWHVFWVDERVVPKDHADSNYRLASDQFLSKVPIPADQVHAINDELSSEGAAGDYETRLKQLVKNGVIELSPVSGFPKFDLMLMGMGPDGHVASLFPGHPVVNEYQKWVTFVKDSPKPPPERITFTFPVINSSAHIALVVTGAGKAGAVHKALSEGQSTSDLLPVEMVSLQNGELVWFTDKPAVSMLSSI

SEQ ID NO: 19073 - protein, 265 aa, Zea mays subsp. mays
  peptide (1)..(265): Ceres Seq. ID no. 12418946
  misc_feature (29)..(260): Pfam Name: Glucosamine-6-phosphate Pfam Description: Glucosamine-6-phosphate
  misc_feature (13)..(262): Homolog of NCBI NO: 15222922 NR Description: unknown protein; protein id: At1g13700.1
  misc_feature (18)..(262): Homolog of NCBI NO: 21536675 NR Description: 6-phosphogluconolactonase-like protein
  misc_feature (12)..(262): Homolog of NCBI NO: 15238526 NR Description: 6-phosphogluconolactonase-like protein
  misc_feature (18)..(262): Homolog of NCBI NO: 15229127 NR Description: 6-phosphogluconolactonase - like protein
  misc_feature (12)..(262): Homolog of NCBI NO: 21537412 NR Description: 6-phosphogluconolactonase-like protein
  misc_feature (5)..(264): Homolog of NCBI NO: 34394567 NR Description: putative 6-phosphogluconolactonase
  misc_feature (13)..(262): Homolog of NCBI NO: 10177901 NR Description: 6-phosphogluconolactonase-like protein
  misc_feature (1)..(262): Homolog of NCBI NO: 18420789 NR Description: 6-phosphogluconolactonase-like protein
  misc_feature (1)..(262): Homolog of NCBI NO: 21554291 NR Description: 6-phosphogluconolactonase-like protein
  misc_feature (2)..(262): Homolog of NCBI NO: 28140256 NR Description: putative 6-phosphogluconolactonase [Elaeis
MASPAAAGETSSRKKLIIFDAEDDLAASLAKYTSELSAKFAAERGAFTVVLSGGSLVKALRKLAEPPYLEAVDWSKWHVFWVDERVVPKDHADSNYRLASDQFLSKVPIPADQVHAINDELSSEGAAGDYETRLKQLVKNGVIELSPVSGFPKFDLMLMGMGPDGHVASLFPGHPVVNEYQKWVTFVKDSPKPPPERITFTFPVINSSAHIALVVTGAGKAGAVHKALSEGQSTSDLLPVEMVSLQNGELVWFTDKPAVSMLSSI

SEQ ID NO: 19074 - protein, 353 aa, Zea mays subsp. mays
  peptide (1)..(353): Ceres Seq. ID no. 12418947
  misc_feature (117)..(348): Pfam Name: Glucosamine-6-phosphate Pfam Description: Glucosamine-6-phosphate
  misc_feature (101)..(350): Homolog of NCBI NO: 15222922 NR Description: unknown protein; protein id: At1g13700.1
  misc_feature (106)..(350): Homolog of NCBI NO: 21536675 NR Description: 6-phosphogluconolactonase-like protein
  misc_feature (100)..(350): Homolog of NCBI NO: 15238526 NR Description: 6-phosphogluconolactonase-like protein
  misc_feature (106)..(350): Homolog of NCBI NO: 15229127 NR Description: 6-phosphogluconolactonase - like protein
  misc_feature (100)..(350): Homolog of NCBI NO: 21537412 NR Description: 6-phosphogluconolactonase-like protein
  misc_feature (93)..(352): Homolog of NCBI NO: 34394567 NR Description: putative 6-phosphogluconolactonase
  misc_feature (101)..(350): Homolog of NCBI NO: 10177901 NR Description: 6-phosphogluconolactonase-like protein
  misc_feature (86)..(350): Homolog of NCBI NO: 18420789 NR Description: 6-phosphogluconolactonase-like protein
  misc_feature (86)..(350): Homolog of NCBI NO: 21554291 NR Description: 6-phosphogluconolactonase-like protein
  misc_feature (90)..(350): Homolog of NCBI NO: 28140256 NR Description: putative 6-phosphogluconolactonase [Elaeis
ARDHYLEHPNRLFPPTPPNLLSISNFHAAANMTTSAAASATAALSTPSSVNPHRSSSALRLPASLRRSHPNRFLSSSPSRSPLVPVSAMASPAAAGETSSRKKLIIFDAEDDLAASLAKYTSELSAKFAAERGAFTVVLSGGSLVKALRKLAEPPYLEAVDWSKWHVFWVDERVVPKDHADSNYRLASDQFLSKVPIPADQVHAINDELSSEGAAGDYETRLKQLVKNGVIELSPVSGFPKFDLMLMGMGPDGHVASLFPGHPVVNEYQKWVTFVKDSPKPPPERITFTFPVINSSAHIALVVTGAGKAGAVHKALSEGQSTSDLLPVEMVSLQNGELVWFTDKPAVSMLSSI

SEQ ID NO: 19075 - DNA, 503 bp, Zea mays subsp. mays
  misc_feature (1)..(503): Ceres Seq. ID no. 11414974
  misc_feature: MA Experiment ID: 108522 Result: Up-regulated in Transcription
  misc_feature: MA Experiment 108522 PARAMETER Experiment Name: Zm_42deg_Heat_P Parameter: Age (day) Value: 8
  misc_feature: MA Experiment 108522 PARAMETER Experiment Name: Zm_42deg_Heat_P Parameter: Organism Value: Zea mays
  misc_feature: MA Experiment 108522 PARAMETER Experiment Name: Zm_42deg_Heat_P Parameter: Plant Line Value: 35A19
  misc_feature: MA Experiment 108522 PARAMETER Experiment Name: Zm_42deg_Heat_P Parameter: Temperature (deg C) Value: 42 vs. 22
  misc_feature: MA Experiment 108522 PARAMETER Experiment Name: Zm_42deg_Heat_P Parameter: Timepoint (hr) Value: 1
  misc_feature: MA Experiment 108522 PARAMETER Experiment Name: Zm_42deg_Heat_P Parameter: Tissue Value: Aerial
  misc_feature: MA Experiment ID: 108523 Result: Up-regulated in Transcription
  misc_feature: MA Experiment 108523 PARAMETER Experiment Name: Zm_42deg_Heat_P Parameter: Age (day) Value: 8
  misc_feature: MA Experiment 108523 PARAMETER Experiment Name: Zm_42deg_Heat_P Parameter: Organism Value: Zea mays
  misc_feature: MA Experiment 108523 PARAMETER Experiment Name: Zm_42deg_Heat_P Parameter: Plant Line Value: 35A19
  misc_feature: MA Experiment 108523 PARAMETER Experiment Name: Zm_42deg_Heat_P Parameter: Temperature (deg C) Value: 42 vs. 22
  misc_feature: MA Experiment 108523 PARAMETER Experiment Name: Zm_42deg_Heat_P Parameter: Timepoint (hr) Value: 6
  misc_feature: MA Experiment 108523 PARAMETER Experiment Name: Zm_42deg_Heat_P Parameter: Tissue Value: Aerial
  misc_feature: MA Experiment ID: 108527 Result: Down-regulated in Transcription
  misc_feature: MA Experiment 108527 PARAMETER Experiment Name: Zm_5mM_NO_P Parameter: Age (day) Value: 8
  misc_feature: MA Experiment 108527 PARAMETER Experiment Name: Zm_5mM_NO_P Parameter: Organism Value: Zea mays
  misc_feature: MA Experiment 108527 PARAMETER Experiment Name: Zm_5mM_NO_P Parameter: Plant Line Value: 35A19
  misc_feature: MA Experiment 108527 PARAMETER Experiment Name: Zm_5mM_NO_P Parameter: Timepoint (hr) Value: 6
  misc_feature: MA Experiment 108527 PARAMETER Experiment Name: Zm_5mM_NO_P Parameter: Tissue Value: Aerial
  misc_feature: MA Experiment 108527 PARAMETER Experiment Name: Zm_5mM_NO_P Parameter: Treatment Value: 5mM NO vs. No Treatment
  misc_feature: MA Experiment ID: 108529 Result: Down-regulated in Transcription
  misc_feature: MA Experiment 108529 PARAMETER Experiment Name: Zm_Imbibed_Seeds_P Parameter: Age (day) Value: 5 vs. 2
  misc_feature: MA Experiment 108529 PARAMETER Experiment Name: Zm_Imbibed_Seeds_P Parameter: Organism Value: Zea mays
  misc_feature: MA Experiment 108529 PARAMETER Experiment Name: Zm_Imbibed_Seeds_P Parameter: Plant Line Value: 35A19
  misc_feature: MA Experiment 108529 PARAMETER Experiment Name: Zm_Imbibed_Seeds_P Parameter: Tissue Value: Roots vs. Embryo
  misc_feature: MA Experiment ID: 108536 Result: Down-regulated in Transcription
  misc_feature: MA Experiment 108536 PARAMETER Experiment Name: Zm_Meristem_P Parameter: Age (day) Value: 8
  misc_feature: MA Experiment 108536 PARAMETER Experiment Name: Zm_Meristem_P Parameter: Organism Value: Zea mays
  misc_feature: MA Experiment 108536 PARAMETER Experiment Name: Zm_Meristem_P Parameter: Plant Line Value: 35A19
  misc_feature: MA Experiment 108536 PARAMETER Experiment Name: Zm_Meristem_P Parameter: Tissue Value: Shoot Meristem vs. Above Shoot Meristem
  misc_feature: MA Experiment ID: 108545 Result: Up-regulated in Transcription
  misc_feature: MA Experiment 108545 PARAMETER Experiment Name: Zm_Imbibed_Seeds_P Parameter: Age (day) Value: 3 vs. 2
  misc_feature: MA Experiment 108545 PARAMETER Experiment Name: Zm_Imbibed_Seeds_P Parameter: Organism Value: Zea mays
  misc_feature: MA Experiment 108545 PARAMETER Experiment Name: Zm_Imbibed_Seeds_P Parameter: Plant Line Value: 35A19
  misc_feature: MA Experiment 108545 PARAMETER Experiment Name: Zm_Imbibed_Seeds_P Parameter: Tissue Value: Aerial vs. Embryo
  misc_feature: MA Experiment ID: 108546 Result: Down-regulated in Transcription
  misc_feature: MA Experiment 108546 PARAMETER Experiment Name: Zm_Imbibed_Seeds_P Parameter: Age (day) Value: 3 vs. 2
  misc_feature: MA Experiment 108546 PARAMETER Experiment Name: Zm_Imbibed_Seeds_P Parameter: Organism Value: Zea mays
  misc_feature: MA Experiment 108546 PARAMETER Experiment Name: Zm_Imbibed_Seeds_P Parameter: Plant Line Value: 35A19
  misc_feature: MA Experiment 108546 PARAMETER Experiment Name: Zm_Imbibed_Seeds_P Parameter: Tissue Value: Roots vs. Embryo
  misc_feature: MA Experiment ID: 108547 Result: Up-regulated in Transcription
  misc_feature: MA Experiment 108547 PARAMETER Experiment Name: Zm_Imbibed_Seeds_P Parameter: Age (day) Value: 4 vs. 2
  misc_feature: MA Experiment 108547 PARAMETER Experiment Name: Zm_Imbibed_Seeds_P Parameter: Organism Value: Zea mays
  misc_feature: MA Experiment 108547 PARAMETER Experiment Name: Zm_Imbibed_Seeds_P Parameter: Plant Line Value: 35A19
  misc_feature: MA Experiment 108547 PARAMETER Experiment Name: Zm_Imbibed_Seeds_P Parameter: Tissue Value: Aerial vs. Embryo
  misc_feature: MA Experiment ID: 108597 Result: Up-regulated in Transcription
  misc_feature: MA Experiment 108597 PARAMETER Experiment Name: Zm_100uM_ABA_P Parameter: Age (day) Value: 9
  misc_feature: MA Experiment 108597 PARAMETER Experiment Name: Zm_100uM_ABA_P Parameter: Organism Value: Zea mays
  misc_feature: MA Experiment 108597 PARAMETER Experiment Name: Zm_100uM_ABA_P Parameter: Plant Line Value: 35A19
  misc_feature: MA Experiment 108597 PARAMETER Experiment Name: Zm_100uM_ABA_P Parameter: Timepoint (hr) Value: 24
  misc_feature: MA Experiment 108597 PARAMETER Experiment Name: Zm_100uM_ABA_P Parameter: Tissue Value: Aerial
  misc_feature: MA Experiment 108597 PARAMETER Experiment Name: Zm_100uM_ABA_P Parameter: Treatment Value: 100uM ABA vs. No Treatment
  misc_feature: MA Experiment ID: 20000487 Result: Up-regulated in Transcription
  misc_feature: MA Experiment 20000487 PARAMETER Experiment Name: Zm_50mM_NH4NO3_L_to_H_P Parameter: Organism Value: Zea mays
  misc_feature: MA Experiment 20000487 PARAMETER Experiment Name: Zm_50mM_NH4NO3_L_to_H_P Parameter: Timepoint (hr) Value: 4
  misc_feature: MA Experiment 20000487 PARAMETER Experiment Name: Zm_50mM_NH4NO3_L_to_H_P Parameter: Tissue Value: Leaves
  misc_feature: MA Experiment 20000487 PARAMETER Experiment Name: Zm_50mM_NH4NO3_L_to_H_P Parameter: Treatment Value: 50mM NH4NO3 vs. 100mM Mannitol
  misc_feature: MA Experiment ID: 20000535 Result: Up-regulated in Transcription
  misc_feature: MA Experiment 20000535 PARAMETER Experiment Name: Zm_Hybrid_Seed_Dev_P Parameter: DAP Value: 30 vs. 12
  misc_feature: MA Experiment 20000535 PARAMETER Experiment Name: Zm_Hybrid_Seed_Dev_P Parameter: Organism Value: Zea mays
  misc_feature: MA Experiment 20000535 PARAMETER Experiment Name: Zm_Hybrid_Seed_Dev_P Parameter: Plant Line Value: 35A19
  misc_feature: MA Experiment 20000535 PARAMETER Experiment Name: Zm_Hybrid_Seed_Dev_P Parameter: Tissue Value: Embryo vs. Unfert Floret
actgctcctttcttggaaaagctggttcagaaagatattgaggttctttacctcattgagccaattgatgaggttgccattcagaatttacagacatacaaagagaagaagtttgtagatattagcaaagaggatttggaattgggtgatgaagatgaggacaaggagaaagaaagcaagcaggagtatactcttctatgcgactggataaagcagcagcttggcgataaagtcgccaaggtccagatctcgaagcgactcagctcttctccatgtgttcttgtttctggtaaatttggctggtcagccaacatggaaaggctcatgaaggcacagacccttggtgacacatcaagcctggagttcatgagaggtagacgaatttttgagatcaaccctgaccatcctatcatcaaggacctgaacgctgcttgcaaaaacgagcctgaaagtactgaagccaagagggcggctgagtttgctatacgaggctgcgctgatct

SEQ ID NO: 19076 - protein, 167 aa, Zea mays subsp. mays
  peptide (1)..(167): Ceres Seq. ID no. 11414975
  misc_feature (1)..(159): Pfam Name: Hsp90 protein Pfam Description: Hsp90 protein
  misc_feature (2)..(159): Homolog of NCBI NO: 6863054 NR Description: heat shock protein 90 [Oryza sativa]
  misc_feature (2)..(155): Homolog of NCBI NO: 13812107 NR Description: heat shock protein 82 [Guillardia theta]
  misc_feature (2)..(159): Homolog of NCBI NO: 2262098 NR Description: HSP90 isolog [Arabidopsis thaliana]
  misc_feature (1)..(152): Homolog of NCBI NO: 28783995 NR Description: heat shock protein 90 [Streblomastix strix]
  misc_feature (2)..(159): Homolog of NCBI NO: 15231505 NR Description: putative heat-shock protein; protein id:
  misc_feature (1)..(159): Homolog of NCBI NO: 30678090 NR Description: heat shock protein, putative [Arabidopsis
  misc_feature (1)..(159): Homolog of NCBI NO: 20453106 NR Description: At2g04030/F3C11.14 [Arabidopsis thaliana]
  misc_feature (1)..(159): Homolog of NCBI NO: 15228059 NR Description: putative heat shock protein
  misc_feature (1)..(159): Homolog of NCBI NO: 1906830 NR Description: heat shock protein [Arabidopsis thaliana]
  misc_feature (1)..(159): Homolog of NCBI NO: 1076758 NR Description: heat-shock protein, 82K, precursor - rye
TAPFLEKLVQKDIEVLYLIEPIDEVAIQNLQTYKEKKFVDISKEDLELGDEDEDKEKESKQEYTLLCDWIKQQLGDKVAKVQISKRLSSSPCVLVSGKFGWSANMERLMKAQTLGDTSSLEFMRGRRIFEINPDHPIIKDLNAACKNEPESTEAKRAAEFAIRGCAD

SEQ ID NO: 19077 - DNA, 1298 bp, Zea mays subsp. mays
  misc_feature (1)..(1298): Ceres Seq. ID no. 12361214
  misc_feature: MA Experiment ID: 108543 Result: Up-regulated in Transcription
aatagcgacggctcagcatagagacaagtccagcgctcaagagagagagagcaagcctttcggcctcgcgtgatgcagcagcagcagccgtccgtccgcgccgtcaccatccccttcgccgaccttaaggatcggggcaaggacctgggcggcttcatcgaggaaggcttcgggcctcaggggctcggcatcgtctccatcgccggcgtacccggttacccagagctcaggaaaaggctgctgcgcttggcgccaaggatcgtcagccttcctgatgatgtgaagaaacaactggaggacccagatagcagataccactttggttggagtcgtgtagaagagaaattcgagtctgaaagatgggacacagccaaaggctcctacttggccaacccagtttttgatgtcccaacaactgatgatgagcttgtaactagatacccatcatactgccgaccaaacatatggccaaaggatcatcttcctgagcttgaaatagcattcaaaggtcttggaaaactgatgttggaagttggcttgatgttggctcatcattgtgatcgctatgtaatacagcgaggggtgggacagtacattggtgaaagccttgagaagacacttgctaggtcaaggtgtcccaagggtcgtctgctgtactacttccccaaatcgtttagcaaacaggacgaagtttcgtcatggtgtggatggcatactgactatggatttttgacaggacttacatgtggcttgttcacgagaaaatcagaggaggtcccctgtcctgatattggaactgggctgtatgttcggactcgtgataatcaagtcgtcaaggtcacacttgtggatgatgagttggtctaccaaattggggagactgctgaaatactatcaagagggcatctatgtgcaaccccacactgtgtgaaggctcccagcagcgaagatgcttctgacgttggtcgctcaactttcgttctgtttattcagccaaactgggatgagccgctgaagcttcctagtgaaatacgctatcaccaggagtgcattccaccaaccaggacacttgcgtacggcgagtactccgaaagagtcttggcgagttttagcggcaagagcgtggaacaaaccttgatgccacagtaagaggctccagccagatgaatactccctctgtttctttttatttgtcgctggatagttcaattttatactatccagcgacaattaaaacgaaacggagggagtatatcatatgtatgataccataccattcaagctacagataagtggac

SEQ ID NO: 19078 - protein, 358 aa, Zea mays subsp. mays
  peptide (1)..(358): Ceres Seq. ID no. 12361215
  misc_feature (210)..(328): Homolog of NCBI NO: 30695767 NR Description: expressed protein [Arabidopsis thaliana]
  misc_feature (13)..(196): Homolog of NCBI NO: 30695767 NR Description: expressed protein [Arabidopsis thaliana]
  misc_feature (9)..(242): Homolog of NCBI NO: 40747370 NR Description: hypothetical protein AN0427.2 [Aspergillus
  misc_feature (234)..(322): Homolog of NCBI NO: 32422631 NR Description: hypothetical protein [Neurospora crassa]
  misc_feature (29)..(205): Homolog of NCBI NO: 32422631 NR Description: hypothetical protein [Neurospora crassa]
  misc_feature (178)..(348): Homolog of NCBI NO: 2982272 NR Description: hypothetical protein [Picea mariana]
  misc_feature (151)..(346): Homolog of NCBI NO: 22531058 NR Description: putative protein [Arabidopsis thaliana]
  misc_feature (11)..(317): Homolog of NCBI NO: 28829713 NR Description: similar to Arabidopsis thaliana (Mouse-ear
  misc_feature (206)..(346): Homolog of NCBI NO: 15235700 NR Description: putative protein; protein id: At4g13400.1
  misc_feature (6)..(171): Homolog of NCBI NO: 15235700 NR Description: putative protein; protein id: At4g13400.1
MQQQQPSVRAVTIPFADLKDRGKDLGGFIEEGFGPQGLGIVSIAGVPGYPELRKRLLRLAPRIVSLPDDVKKQLEDPDSRYHFGWSRVEEKFESERWDTAKGSYLANPVFDVPTTDDELVTRYPSYCRPNIWPKDHLPELEIAFKGLGKLMLEVGLMLAHHCDRYVIQRGVGQYIGESLEKTLARSRCPKGRLLYYFPKSFSKQDEVSSWCGWHTDYGFLTGLTCGLFTRKSEEVPCPDIGTGLYVRTRDNQVVKVTLVDDELVYQIGETAEILSRGHLCATPHCVKAPSSEDASDVGRSTFVLFIQPNWDEPLKLPSEIRYHQECIPPTRTLAYGEYSERVLASFSGKSVEQTLMPQ

SEQ ID NO: 19079 - protein, 208 aa, Zea mays subsp. mays
  peptide (1)..(208): Ceres Seq. ID no. 12361216
  misc_feature (60)..(178): Homolog of NCBI NO: 30695767 NR Description: expressed protein [Arabidopsis thaliana]
  misc_feature (1)..(46): Homolog of NCBI NO: 30695767 NR Description: expressed protein [Arabidopsis thaliana]
  misc_feature (1)..(92): Homolog of NCBI NO: 40747370 NR Description: hypothetical protein AN0427.2 [Aspergillus
  misc_feature (84)..(172): Homolog of NCBI NO: 32422631 NR Description: hypothetical protein [Neurospora crassa]
  misc_feature (1)..(55): Homolog of NCBI NO: 32422631 NR Description: hypothetical protein [Neurospora crassa]
  misc_feature (28)..(198): Homolog of NCBI NO: 2982272 NR Description: hypothetical protein [Picea mariana]
  misc_feature (1)..(196): Homolog of NCBI NO: 22531058 NR Description: putative protein [Arabidopsis thaliana]
  misc_feature (1)..(167): Homolog of NCBI NO: 28829713 NR Description: similar to Arabidopsis thaliana (Mouse-ear
  misc_feature (56)..(196): Homolog of NCBI NO: 15235700 NR Description: putative protein; protein id: At4g13400.1
  misc_feature (1)..(21): Homolog of NCBI NO: 15235700 NR Description: putative protein; protein id: At4g13400.1
MLEVGLMLAHHCDRYVIQRGVGQYIGESLEKTLARSRCPKGRLLYYFPKSFSKQDEVSSWCGWHTDYGFLTGLTCGLFTRKSEEVPCPDIGTGLYVRTRDNQVVKVTLVDDELVYQIGETAEILSRGHLCATPHCVKAPSSEDASDVGRSTFVLFIQPNWDEPLKLPSEIRYHQECIPPTRTLAYGEYSERVLASFSGKSVEQTLMPQ

SEQ ID NO: 19080 - protein, 202 aa, Zea mays subsp. mays
  peptide (1)..(202): Ceres Seq. ID no. 12361217
  misc_feature (50)..(190): Homolog of NCBI NO: 15235700 NR Description: putative protein; protein id: At4g13400.1
  misc_feature (1)..(15): Homolog of NCBI NO: 15235700 NR Description: putative protein; protein id: At4g13400.1
  misc_feature (54)..(172): Homolog of NCBI NO: 30695767 NR Description: expressed protein [Arabidopsis thaliana]
  misc_feature (1)..(40): Homolog of NCBI NO: 30695767 NR Description: expressed protein [Arabidopsis thaliana]
  misc_feature (1)..(86): Homolog of NCBI NO: 40747370 NR Description: hypothetical protein AN0427.2 [Aspergillus
  misc_feature (78)..(166): Homolog of NCBI NO: 32422631 NR Description: hypothetical protein [Neurospora crassa]
  misc_feature (1)..(49): Homolog of NCBI NO: 32422631 NR Description: hypothetical protein [Neurospora crassa]
  misc_feature (22)..(192): Homolog of NCBI NO: 2982272 NR Description: hypothetical protein [Picea mariana]
  misc_feature (1)..(190): Homolog of NCBI NO: 22531058 NR Description: putative protein [Arabidopsis thaliana]
  misc_feature (1)..(161): Homolog of NCBI NO: 28829713 NR Description: similar to Arabidopsis thaliana (Mouse-ear
MLAHHCDRYVIQRGVGQYIGESLEKTLARSRCPKGRLLYYFPKSFSKQDEVSSWCGWHTDYGFLTGLTCGLFTRKSEEVPCPDIGTGLYVRTRDNQVVKVTLVDDELVYQIGETAEILSRGHLCATPHCVKAPSSEDASDVGRSTFVLFIQPNWDEPLKLPSEIRYHQECIPPTRTLAYGEYSERVLASFSGKSVEQTLMPQ

SEQ ID NO: 19081 - DNA, 920 bp, Zea mays subsp. mays; identical to SEQ ID NO: 8916
  misc_feature (1)..(920): Ceres Seq. ID no. 12436141
  misc_feature: MA Experiment ID: 108523 Result: Down-regulated in Transcription
  misc_feature: MA Experiment 108523 PARAMETER Experiment Name: Zm_42deg_Heat_P Parameter: Age (day) Value: 8
  misc_feature: MA Experiment 108523 PARAMETER Experiment Name: Zm_42deg_Heat_P Parameter: Organism Value: Zea mays
  misc_feature: MA Experiment 108523 PARAMETER Experiment Name: Zm_42deg_Heat_P Parameter: Plant Line Value: 35A19
  misc_feature: MA Experiment 108523 PARAMETER Experiment Name: Zm_42deg_Heat_P Parameter: Temperature (deg C) Value: 42 vs. 22
  misc_feature: MA Experiment 108523 PARAMETER Experiment Name: Zm_42deg_Heat_P Parameter: Timepoint (hr) Value: 6
  misc_feature: MA Experiment 108523 PARAMETER Experiment Name: Zm_42deg_Heat_P Parameter: Tissue Value: Aerial
  misc_feature: MA Experiment ID: 108527 Result: Down-regulated in Transcription
  misc_feature: MA Experiment 108527 PARAMETER Experiment Name: Zm_5mM_NO_P Parameter: Age (day) Value: 8
  misc_feature: MA Experiment 108527 PARAMETER Experiment Name: Zm_5mM_NO_P Parameter: Organism Value: Zea mays
  misc_feature: MA Experiment 108527 PARAMETER Experiment Name: Zm_5mM_NO_P Parameter: Plant Line Value: 35A19
  misc_feature: MA Experiment 108527 PARAMETER Experiment Name: Zm_5mM_NO_P Parameter: Timepoint (hr) Value: 6
  misc_feature: MA Experiment 108527 PARAMETER Experiment Name: Zm_5mM_NO_P Parameter: Tissue Value: Aerial
  misc_feature: MA Experiment 108527 PARAMETER Experiment Name: Zm_5mM_NO_P Parameter: Treatment Value: 5mM NO vs. No Treatment
  misc_feature: MA Experiment ID: 108528 Result: Up-regulated in Transcription
  misc_feature: MA Experiment 108528 PARAMETER Experiment Name: Zm_Imbibed_Seeds_P Parameter: Age (day) Value: 5 vs. 2
  misc_feature: MA Experiment 108528 PARAMETER Experiment Name: Zm_Imbibed_Seeds_P Parameter: Organism Value: Zea mays
  misc_feature: MA Experiment 108528 PARAMETER Experiment Name: Zm_Imbibed_Seeds_P Parameter: Plant Line Value: 35A19
  misc_feature: MA Experiment 108528 PARAMETER Experiment Name: Zm_Imbibed_Seeds_P Parameter: Tissue Value: Aerial vs. Embryo
  misc_feature: MA Experiment ID: 108530 Result: Up-regulated in Transcription
  misc_feature: MA Experiment 108530 PARAMETER Experiment Name: Zm_Imbibed_Seeds_P Parameter: Age (day) Value: 6 vs. 2
  misc_feature: MA Experiment 108530 PARAMETER Experiment Name: Zm_Imbibed_Seeds_P Parameter: Organism Value: Zea mays
  misc_feature: MA Experiment 108530 PARAMETER Experiment Name: Zm_Imbibed_Seeds_P Parameter: Plant Line Value: 35A19
  misc_feature: MA Experiment 108530 PARAMETER Experiment Name: Zm_Imbibed_Seeds_P Parameter: Tissue Value: Aerial vs. Embryo
  misc_feature: MA Experiment ID: 108534 Result: Down-regulated in Transcription
  misc_feature: MA Experiment 108534 PARAMETER Experiment Name: Zm_4deg_Cold_P Parameter: Age (hr) Value: 8
  misc_feature: MA Experiment 108534 PARAMETER Experiment Name: Zm_4deg_Cold_P Parameter: Organism Value: Zea mays
  misc_feature: MA Experiment 108534 PARAMETER Experiment Name: Zm_4deg_Cold_P Parameter: Plant Line Value: 35A19
  misc_feature: MA Experiment 108534 PARAMETER Experiment Name: Zm_4deg_Cold_P Parameter: Temperature (deg C) Value: 4 vs. 22
  misc_feature: MA Experiment 108534 PARAMETER Experiment Name: Zm_4deg_Cold_P Parameter: Timepoint (hr) Value: 6
  misc_feature: MA Experiment 108534 PARAMETER Experiment Name: Zm_4deg_Cold_P Parameter: Tissue Value: Aerial
  misc_feature: MA Experiment ID: 108545 Result: Up-regulated in Transcription
  misc_feature: MA Experiment 108545 PARAMETER Experiment Name: Zm_Imbibed_Seeds_P Parameter: Age (day) Value: 3 vs. 2
  misc_feature: MA Experiment 108545 PARAMETER Experiment Name: Zm_Imbibed_Seeds_P Parameter: Organism Value: Zea mays
  misc_feature: MA Experiment 108545 PARAMETER Experiment Name: Zm_Imbibed_Seeds_P Parameter: Plant Line Value: 35A19
  misc_feature: MA Experiment 108545 PARAMETER Experiment Name: Zm_Imbibed_Seeds_P Parameter: Tissue Value: Aerial vs. Embryo
  misc_feature: MA Experiment ID: 108559 Result: Down-regulated in Transcription
  misc_feature: MA Experiment 108559 PARAMETER Experiment Name: Zm_5mM_NO_P Parameter: Age (day) Value: 8
  misc_feature: MA Experiment 108559 PARAMETER Experiment Name: Zm_5mM_NO_P Parameter: Organism Value: Zea mays
  misc_feature: MA Experiment 108559 PARAMETER Experiment Name: Zm_5mM_NO_P Parameter: Plant Line Value: 35A19
  misc_feature: MA Experiment 108559 PARAMETER Experiment Name: Zm_5mM_NO_P Parameter: Timepoint (hr) Value: 12
  misc_feature: MA Experiment 108559 PARAMETER Experiment Name: Zm_5mM_NO_P Parameter: Tissue Value: Aerial
  misc_feature: MA Experiment 108559 PARAMETER Experiment Name: Zm_5mM_NO_P Parameter: Treatment Value: 5mM NO vs. No Treatment
  misc_feature: MA Experiment ID: 108597 Result: Down-regulated in Transcription
  misc_feature: MA Experiment 108597 PARAMETER Experiment Name: Zm_100uM_ABA_P Parameter: Age (day) Value: 9
  misc_feature: MA Experiment 108597 PARAMETER Experiment Name: Zm_100uM_ABA_P Parameter: Organism Value: Zea mays
  misc_feature: MA Experiment 108597 PARAMETER Experiment Name: Zm_100uM_ABA_P Parameter: Plant Line Value: 35A19
  misc_feature: MA Experiment 108597 PARAMETER Experiment Name: Zm_100uM_ABA_P Parameter: Timepoint (hr) Value: 24
  misc_feature: MA Experiment 108597 PARAMETER Experiment Name: Zm_100uM_ABA_P Parameter: Tissue Value: Aerial
  misc_feature: MA Experiment 108597 PARAMETER Experiment Name: Zm_100uM_ABA_P Parameter: Treatment Value: 100uM ABA vs. No Treatment
  misc_feature: MA Experiment ID: 20000478 Result: Down-regulated in Transcription
  misc_feature: MA Experiment 20000478 PARAMETER Experiment Name: Zm_5mM_SA_P Parameter: Age (day) Value: 11
  misc_feature: MA Experiment 20000478 PARAMETER Experiment Name: Zm_5mM_SA_P Parameter: Organism Value: Zea mays
  misc_feature: MA Experiment 20000478 PARAMETER Experiment Name: Zm_5mM_SA_P Parameter: Plant Line Value: 35A19
  misc_feature: MA Experiment 20000478 PARAMETER Experiment Name: Zm_5mM_SA_P Parameter: Timepoint (hr) Value: 72
  misc_feature: MA Experiment 20000478 PARAMETER Experiment Name: Zm_5mM_SA_P Parameter: Tissue Value: Aerial
  misc_feature: MA Experiment 20000478 PARAMETER Experiment Name: Zm_5mM_SA_P Parameter: Treatment Value: 5mM SA vs. No Treatment
  misc_feature: MA Experiment ID: 20000479 Result: Down-regulated in Transcription
  misc_feature: MA Experiment 20000479 PARAMETER Experiment Name: Zm_Drought_P Parameter: Age (day) Value: 10
  misc_feature: MA Experiment 20000479 PARAMETER Experiment Name: Zm_Drought_P Parameter: Organism Value: Zea mays
  misc_feature: MA Experiment 20000479 PARAMETER Experiment Name: Zm_Drought_P Parameter: Plant Line Value: 35A19
  misc_feature: MA Experiment 20000479 PARAMETER Experiment Name: Zm_Drought_P Parameter: Timepoint (hr) Value: 48
  misc_feature: MA Experiment 20000479 PARAMETER Experiment Name: Zm_Drought_P Parameter: Tissue Value: Aerial
  misc_feature: MA Experiment 20000479 PARAMETER Experiment Name: Zm_Drought_P Parameter: Treatment Value: Drought vs. No Drought
  misc_feature: MA Experiment ID: 20000480 Result: Down-regulated in Transcription
  misc_feature: MA Experiment 20000480 PARAMETER Experiment Name: Zm_Drought_P Parameter: Age (day) Value: 11
  misc_feature: MA Experiment 20000480 PARAMETER Experiment Name: Zm_Drought_P Parameter: Organism Value: Zea mays
  misc_feature: MA Experiment 20000480 PARAMETER Experiment Name: Zm_Drought_P Parameter: Plant Line Value: 35A19
  misc_feature: MA Experiment 20000480 PARAMETER Experiment Name: Zm_Drought_P Parameter: Timepoint (hr) Value: 72
  misc_feature: MA Experiment 20000480 PARAMETER Experiment Name: Zm_Drought_P Parameter: Tissue Value: Aerial
  misc_feature: MA Experiment 20000480 PARAMETER Experiment Name: Zm_Drought_P Parameter: Treatment Value: Drought vs. No Drought
  misc_feature: MA Experiment ID: 20000630 Result: Down-regulated in Transcription
  misc_feature: MA Experiment 20000630 PARAMETER Experiment Name: Zm_Herbicide-Treatments_P Parameter: Timepoint (hr) Value: 4
  misc_feature: MA Experiment 20000630 PARAMETER Experiment Name: Zm_Herbicide-Treatments_P Parameter: Tissue Value: Aerial
  misc_feature: MA Experiment 20000630 PARAMETER Experiment Name: Zm_Herbicide-Treatments_P Parameter: Treatment Value: Roundup vs. No Treatment

SEQ ID NO: 19082 - protein, 145 aa, Zea mays subsp. mays; identical to SEQ ID NO: 8917
  peptide (1)..(145): Ceres Seq. ID no. 12436142
  misc_feature (1)..(104): Pfam Name: Auxin responsive protein Pfam Description: Auxin responsive protein
  misc_feature (1)..(119): Homolog of NCBI NO: 26452075 NR Description: putative auxin-induced protein [Arabidopsis
  misc_feature (1)..(119): Homolog of NCBI NO: 15218924 NR Description: auxin-induced protein, putative; protein id: supported by cDNA: 4119. [Arabidopsis thaliana]
  misc_feature (1)..(119): Homolog of NCBI NO: 21593671 NR Description: auxin-induced protein, putative [Arabidopsis
  misc_feature (1)..(119): Homolog of NCBI NO: 21592571 NR Description: auxin-induced protein, putative [Arabidopsis
  misc_feature (1)..(119): Homolog of NCBI NO: 18397123 NR Description: auxin-induced protein, putative; protein id:
  misc_feature (1)..(143): Homolog of NCBI NO: 20149052 NR Description: auxin-induced SAUR-like protein [Capsicum annuum]
  misc_feature (1)..(119): Homolog of NCBI NO: 15241052 NR Description: putative protein; protein id: At5g27780.1
  misc_feature (1)..(119): Homolog of NCBI NO: 18397101 NR Description: auxin-induced protein, putative; protein id:
  misc_feature (1)..(119): Homolog of NCBI NO: 38603942 NR Description: At1g29420 [Arabidopsis thaliana]
  misc_feature (1)..(119): Homolog of NCBI NO: 26452170 NR Description: putative auxin-induced protein [Arabidopsis

SEQ ID NO: 19083 - protein, 132 aa, Zea mays subsp. mays; identical to SEQ ID NO: 8918
  peptide (1)..(132): Ceres Seq. ID no. 12436143
  misc_feature (1)..(91): Pfam Name: Auxin responsive protein Pfam Description: Auxin responsive protein
  misc_feature (1)..(106): Homolog of NCBI NO: 26452075 NR Description: putative auxin-induced protein [Arabidopsis
  misc_feature (1)..(106): Homolog of NCBI NO: 15218924 NR Description: auxin-induced protein, putative; protein id: supported by cDNA: 4119. [Arabidopsis thaliana]
  misc_feature (1)..(106): Homolog of NCBI NO: 21593671 NR Description: auxin-induced protein, putative [Arabidopsis
  misc_feature (1)..(106): Homolog of NCBI NO: 21592571 NR Description: auxin-induced protein, putative [Arabidopsis
  misc_feature (1)..(106): Homolog of NCBI NO: 18397123 NR Description: auxin-induced protein, putative; protein id:
  misc_feature (1)..(130): Homolog of NCBI NO: 20149052 NR Description: auxin-induced SAUR-like protein [Capsicum annuum]
  misc_feature (1)..(106): Homolog of NCBI NO: 15241052 NR Description: putative protein; protein id: At5g27780.1
  misc_feature (1)..(106): Homolog of NCBI NO: 18397101 NR Description: auxin-induced protein, putative; protein id:
  misc_feature (1)..(106): Homolog of NCBI NO: 38603942 NR Description: At1g29420 [Arabidopsis thaliana]
  misc_feature (1)..(106): Homolog of NCBI NO: 26452170 NR Description: putative auxin-induced protein [Arabidopsis

SEQ ID NO: 19084 - protein, 129 aa, Zea mays subsp. mays; identical to SEQ ID NO: 8919
  peptide (1)..(129): Ceres Seq. ID no. 12436144
  misc_feature (1)..(88): Pfam Name: Auxin responsive protein Pfam Description: Auxin responsive protein
  misc_feature (1)..(103): Homolog of NCBI NO: 26452075 NR Description: putative auxin-induced protein [Arabidopsis
  misc_feature (1)..(103): Homolog of NCBI NO: 15218924 NR Description: auxin-induced protein, putative; protein id: supported by cDNA: 4119. [Arabidopsis thaliana]
  misc_feature (1)..(103): Homolog of NCBI NO: 21593671 NR Description: auxin-induced protein, putative [Arabidopsis
  misc_feature (1)..(103): Homolog of NCBI NO: 21592571 NR Description: auxin-induced protein, putative [Arabidopsis
  misc_feature (1)..(103): Homolog of NCBI NO: 18397123 NR Description: auxin-induced protein, putative; protein id:
  misc_feature (1)..(127): Homolog of NCBI NO: 20149052 NR Description: auxin-induced SAUR-like protein [Capsicum annuum]
  misc_feature (1)..(103): Homolog of NCBI NO: 15241052 NR Description: putative protein; protein id: At5g27780.1
  misc_feature (1)..(103): Homolog of NCBI NO: 18397101 NR Description: auxin-induced protein, putative; protein id:
  misc_feature (1)..(103): Homolog of NCBI NO: 38603942 NR Description: At1g29420 [Arabidopsis thaliana]
  misc_feature (1)..(103): Homolog of NCBI NO: 26452170 NR Description: putative auxin-induced protein [Arabidopsis

SEQ ID NO: 19085 - DNA, 475 bp, Zea mays subsp. mays
  misc_feature (1)..(475): Ceres Seq. ID no. 1847866
  misc_feature: MA Experiment ID: 108528 Result: Down-regulated in Transcription
  misc_feature: MA Experiment 108528 PARAMETER Experiment Name: Zm_Imbibed_Seeds_P Parameter: Age (day) Value: 5 vs. 2
  misc_feature: MA Experiment 108528 PARAMETER Experiment Name: Zm_Imbibed_Seeds_P Parameter: Organism Value: Zea mays
  misc_feature: MA Experiment 108528 PARAMETER Experiment Name: Zm_Imbibed_Seeds_P Parameter: Plant Line Value: 35A19
  misc_feature: MA Experiment 108528 PARAMETER Experiment Name: Zm_Imbibed_Seeds_P Parameter: Tissue Value: Aerial vs. Embryo
  misc_feature: MA Experiment ID: 108534 Result: Up-regulated in Transcription
  misc_feature: MA Experiment 108534 PARAMETER Experiment Name: Zm_4deg_Cold_P Parameter: Age (hr) Value: 8
  misc_feature: MA Experiment 108534 PARAMETER Experiment Name: Zm_4deg_Cold_P Parameter: Organism Value: Zea mays
  misc_feature: MA Experiment 108534 PARAMETER Experiment Name: Zm_4deg_Cold_P Parameter: Plant Line Value: 35A19
  misc_feature: MA Experiment 108534 PARAMETER Experiment Name: Zm_4deg_Cold_P Parameter: Temperature (deg C) Value: 4 vs. 22
  misc_feature: MA Experiment 108534 PARAMETER Experiment Name: Zm_4deg_Cold_P Parameter: Timepoint (hr) Value: 6
  misc_feature: MA Experiment 108534 PARAMETER Experiment Name: Zm_4deg_Cold_P Parameter: Tissue Value: Aerial
  misc_feature: MA Experiment ID: 108547 Result: Down-regulated in Transcription
  misc_feature: MA Experiment 108547 PARAMETER Experiment Name: Zm_Imbibed_Seeds_P Parameter: Age (day) Value: 4 vs. 2
  misc_feature: MA Experiment 108547 PARAMETER Experiment Name: Zm_Imbibed_Seeds_P Parameter: Organism Value: Zea mays
  misc_feature: MA Experiment 108547 PARAMETER Experiment Name: Zm_Imbibed_Seeds_P Parameter: Plant Line Value: 35A19
  misc_feature: MA Experiment 108547 PARAMETER Experiment Name: Zm_Imbibed_Seeds_P Parameter: Tissue Value: Aerial vs. Embryo
  misc_feature: Pfam Name: PSS Pfam Description: Phosphatidyl serine synthase
aaactccatctcccgtctctctctctctctacgaactccacctcgcgaacagccgctgcttgcctgccgcgttggagagaacggaaganaagcgagcgagggagagggacagcaactccctcggtcgctttcgacggcctggatctccccgcacgcggtatcgtacgaccggcacgctgttgtcgctttccaccgcttgggcaagtggtgctctcgatccagaacggagctcatctgctgatcgtgtttcgtcagtcaagaggggtgtatttgcgatgattgctgtttttttggcttactcttttcttcaggcgccttcaactgtactcattagaccacatcctgccatttggaggctagttcatgggatggcagttgtttaccttgtcgccctcactttcttgcttttccagactcgtgatgatgctaggcaattcatgaagtatcttcatcctgatcttggtgtcgaatttac

SEQ ID NO: 19086 - protein, 92 aa, Zea mays subsp. mays
  peptide (1)..(92): Ceres Seq. ID no. 1847867
  misc_feature: Pfam Name: PSS Pfam Description: Phosphatidyl serine synthase
  misc_feature (30)..(30): Xaa is any aa, unknown or other
KLHLPSLSLSTNSTSRTAAACLPRWRERKXSERGRGTATPSVAFDGLDLPARGIVRPARCCRFPPLGQVVLSIQNGAHLLIVFRQSRGVYLR

SEQ ID NO: 19087 - protein, 79 aa, Zea mays subsp. mays
  peptide (1)..(79): Ceres Seq. ID no. 1847868
  misc_feature: Pfam Name: PSS Pfam Description: Phosphatidyl serine synthase
  misc_feature (30)..(30): Xaa is any aa, unknown or other
NSISRLSLSLRTPPREQPLLACRVGENGRXASEGEGQQLPRSLSTAWISPHAVSYDRHAVVAFHRLGKWCSRSRTELIC

SEQ ID NO: 19088 - protein, 157 aa, Zea mays subsp. mays
  peptide (1)..(157): Ceres Seq. ID no. 1847869
  misc_feature: Pfam Name: PSS Pfam Description: Phosphatidyl serine synthase
  misc_feature (80)..(155): Homolog of NCBI NO: 13540555 NR Description: phosphatidylserine synthase 2 [Homo sapiens]
  misc_feature (56)..(155): Homolog of NCBI NO: 2190007 NR Description: phosphatidylserine synthase II [Cricetulus
  misc_feature (56)..(155): Homolog of NCBI NO: 31560497 NR Description: phosphatidylserine synthase 2 [Mus musculus]
  misc_feature (56)..(155): Homolog of NCBI NO: 4063700 NR Description: phosphatidylserine synthase-2 [Mus musculus]
  misc_feature (56)..(155): Homolog of NCBI NO: 26328497 NR Description: unnamed protein product [Mus musculus]
  misc_feature (56)..(155): Homolog of NCBI NO: 26327711 NR Description: unnamed protein product [Mus musculus]
  misc_feature (56)..(155): Homolog of NCBI NO: 12862079 NR Description: unnamed protein product [Mus musculus]
  misc_feature (66)..(137): Homolog of NCBI NO: 34895332 NR Description: P0494A10.20 [Oryza sativa (japonica
  misc_feature (66)..(154): Homolog of NCBI NO: 34911216 NR Description: putative phosphatidylserine synthase
  misc_feature (54)..(156): Homolog of NCBI NO: 25518032 NR Description: F9L1.4 protein - Arabidopsis thaliana
  misc_feature (29)..(29): Xaa is any aa, unknown or other
TPSPVSLSLYELHLANSRCLPAALERTEXKRARERDSNSLGRFRRPGSPRTRYRTTGTLLSLSTAWASGALDPERSSSADRVSSVKRGVFAMIAVFLAYSFLQAPSTVLIRPHPAIWRLVHGMAVVYLVALTFLLFQTRDDARQFMKYLHPDLGVEF

SEQ ID NO: 19089 - protein, 66 aa, Zea mays subsp. mays
  peptide (1)..(66): Ceres Seq. ID no. 4902255
  misc_feature: Pfam Name: PSS Pfam Description: Phosphatidyl serine synthase
  misc_feature (1)..(64): Homolog of NCBI NO: 13540555 NR Description: phosphatidylserine synthase 2 [Homo sapiens]
  misc_feature (1)..(64): Homolog of NCBI NO: 2190007 NR Description: phosphatidylserine synthase II [Cricetulus
  misc_feature (1)..(64): Homolog of NCBI NO: 31560497 NR Description: phosphatidylserine synthase 2 [Mus musculus]
  misc_feature (1)..(64): Homolog of NCBI NO: 4063700 NR Description: phosphatidylserine synthase-2 [Mus musculus]
  misc_feature (1)..(64): Homolog of NCBI NO: 26327711 NR Description: unnamed protein product [Mus musculus]
  misc_feature (1)..(64): Homolog of NCBI NO: 26328497 NR Description: unnamed protein product [Mus musculus]
  misc_feature (1)..(64): Homolog of NCBI NO: 12862079 NR Description: unnamed protein product [Mus musculus]
  misc_feature (1)..(46): Homolog of NCBI NO: 34895332 NR Description: P0494A10.20 [Oryza sativa (japonica
  misc_feature (1)..(63): Homolog of NCBI NO: 34911216 NR Description: putative phosphatidylserine synthase
  misc_feature (1)..(65): Homolog of NCBI NO: 25518032 NR Description: F9L1.4 protein - Arabidopsis thaliana
MIAVFLAYSFLQAPSTVLIRPHPAIWRLVHGMAVVYLVALTFLLFQTRDDARQFMKYLHPDLGVEF

SEQ ID NO: 19090 - DNA, 562 bp, Zea mays subsp. mays
  misc_feature (1)..(562): Ceres Seq. ID no. 13503118
  misc_feature: MA Experiment ID: 108522 Result: Up-regulated in Transcription
  misc_feature: MA Experiment 108522 PARAMETER Experiment Name: Zm_42deg_Heat_P Parameter: Age (day) Value: 8
  misc_feature: MA Experiment 108522 PARAMETER Experiment Name: Zm_42deg_Heat_P Parameter: Organism Value: Zea mays
  misc_feature: MA Experiment 108522 PARAMETER Experiment Name: Zm_42deg_Heat_P Parameter: Plant Line Value: 35A19
  misc_feature: MA Experiment 108522 PARAMETER Experiment Name: Zm_42deg_Heat_P Parameter: Temperature (deg C) Value: 42 vs. 22
  misc_feature: MA Experiment 108522 PARAMETER Experiment Name: Zm_42deg_Heat_P Parameter: Timepoint (hr) Value: 1
  misc_feature: MA Experiment 108522 PARAMETER Experiment Name: Zm_42deg_Heat_P Parameter: Tissue Value: Aerial
  misc_feature: MA Experiment ID: 108529 Result: Down-regulated in Transcription
  misc_feature: MA Experiment 108529 PARAMETER Experiment Name: Zm_Imbibed_Seeds_P Parameter: Age (day) Value: 5 vs. 2
  misc_feature: MA Experiment 108529 PARAMETER Experiment Name: Zm_Imbibed_Seeds_P Parameter: Organism Value: Zea mays
  misc_feature: MA Experiment 108529 PARAMETER Experiment Name: Zm_Imbibed_Seeds_P Parameter: Plant Line Value: 35A19
  misc_feature: MA Experiment 108529 PARAMETER Experiment Name: Zm_Imbibed_Seeds_P Parameter: Tissue Value: Roots vs. Embryo
  misc_feature: MA Experiment ID: 20000632 Result: Down-regulated in Transcription
  misc_feature: MA Experiment 20000632 PARAMETER Experiment Name: Zm_Herbicide-Treatments_P Parameter: Timepoint (hr) Value: 4
  misc_feature: MA Experiment 20000632 PARAMETER Experiment Name: Zm_Herbicide-Treatments_P Parameter: Tissue Value: Aerial
  misc_feature: MA Experiment 20000632 PARAMETER Experiment Name: Zm_Herbicide-Treatments_P Parameter: Treatment Value: Glean vs. No Treatment
atcgtctgctggcatcgttccattctcctctaaaccctagccgcctagcgcctcgatctgagcagcctgtctcgcggaggtagttctggttgatttggtcctagatggcggaggaaaaagtggggcggatcttcgtcggcgggctgtcgtggaacaccacggagcgcacgctcgagcgcaccttcggtcagtacggcaaggtcatcgaggctcaggttgtagtggaaagggagacaggccgctctaggggatttggatttgtcacattttcagaacctcgggctgtggatgctgccattcggggaatgcataacggagaactggatggccgcaatatttctgtgaacaaagctgaacctaggaactctgatggctatggatatggtggtggtggtggtggtggttactcgtccggtggtagaggtggatatcgtagtggagctgatgtagttccagcagccagtgatgattgtttcaaatgtggccgtcctggacattgggctcgtgaatgcccttattcagatggaagtggtagaactggaaggtattctcccggttcaag

SEQ ID NO: 19091 - protein, 152 aa, Zea mays subsp. mays
  peptide (1)..(152): Ceres Seq. ID no. 13503119
  misc_feature (10)..(80): Pfam Name: RNA recognition motif. (a.k.a. RRM, RBD, or RNP domain) Pfam Description: RNA recognition motif. (a.k.a. RRM, RBD, or RNP
  misc_feature (8)..(151): Homolog of NCBI NO: 2674201 NR Description: glycine-rich RNA-binding protein [Euphorbia esula]
  misc_feature (8)..(112): Homolog of NCBI NO: 21553354 NR Description: glycine-rich RNA binding protein 7 [Arabidopsis
  misc_feature (8)..(151): Homolog of NCBI NO: 1346180 NR Description: Glycine-rich RNA-binding protein GRP1A
  misc_feature (1)..(149): Homolog of NCBI NO: 15231557 NR Description: glycine-rich RNA-binding protein [Arabidopsis
  misc_feature (8)..(151): Homolog of NCBI NO: 15226605 NR Description: glycine-rich RNA-binding protein (AtGRP7)
  misc_feature (1)..(148): Homolog of NCBI NO: 40714682 NR Description: putative RNA binding protein
  misc_feature (8)..(144): Homolog of NCBI NO: 18406831 NR Description: glycine-rich RNA-binding protein, putative
  misc_feature (8)..(149): Homolog of NCBI NO: 12659074 NR Description: RNA-binding protein [Triticum aestivum]
  misc_feature (1)..(146): Homolog of NCBI NO: 15237666 NR Description: glycine-rich RNA-binding protein [Arabidopsis
  misc_feature (1)..(151): Homolog of NCBI NO: 33146923 NR Description: glycine-rich RNA-binding protein-like
MAEEKVGRIFVGGLSWNTTERTLERTFGQYGKVIEAQVVVERETGRSRGFGFVTFSEPRAVDAAIRGMHNGELDGRNISVNKAEPRNSDGYGYGGGGGGGYSSGGRGGYRSGADVVPAASDDCFKCGRPGHWARECPYSDGSGRTGRYSPGS

SEQ ID NO: 19092 - protein, 85 aa, Zea mays subsp. mays
  peptide (1)..(85): Ceres Seq. ID no. 13503120
  misc_feature (1)..(84): Homolog of NCBI NO: 2674201 NR Description: glycine-rich RNA-binding protein [Euphorbia esula]
  misc_feature (1)..(45): Homolog of NCBI NO: 21553354 NR Description: glycine-rich RNA binding protein 7 [Arabidopsis
  misc_feature (1)..(84): Homolog of NCBI NO: 1346180 NR Description: Glycine-rich RNA-binding protein GRP1A
  misc_feature (1)..(82): Homolog of NCBI NO: 15231557 NR Description: glycine-rich RNA-binding protein [Arabidopsis
  misc_feature (1)..(84): Homolog of NCBI NO: 15226605 NR Description: glycine-rich RNA-binding protein (AtGRP7)
  misc_feature (1)..(81): Homolog of NCBI NO: 40714682 NR Description: putative RNA binding protein
  misc_feature (1)..(77): Homolog of NCBI NO: 18406831 NR Description: glycine-rich RNA-binding protein, putative
  misc_feature (1)..(82): Homolog of NCBI NO: 12659074 NR Description: RNA-binding protein [Triticum aestivum]
  misc_feature (1)..(79): Homolog of NCBI NO: 15237666 NR Description: glycine-rich RNA-binding protein [Arabidopsis
  misc_feature (1)..(84): Homolog of NCBI NO: 33146923 NR Description: glycine-rich RNA-binding protein-like
MHNGELDGRNISVNKAEPRNSDGYGYGGGGGGGYSSGGRGGYRSGADVVPAASDDCFKCGRPGHWARECPYSDGSGRTGRYSPGS

SEQ ID NO: 19093 - DNA, 1429 bp, Zea mays subsp. mays
  misc_feature (1)..(1429): Ceres Seq. ID no. 12368140
  misc_feature: MA Experiment ID: 108527 Result: Down-regulated in Transcription
  misc_feature: MA Experiment 108527 PARAMETER Experiment Name: Zm_5mM_NO_P Parameter: Age (day) Value: 8
  misc_feature: MA Experiment 108527 PARAMETER Experiment Name: Zm_5mM_NO_P Parameter: Organism Value: Zea mays
  misc_feature: MA Experiment 108527 PARAMETER Experiment Name: Zm_5mM_NO_P Parameter: Plant Line Value: 35A19
  misc_feature: MA Experiment 108527 PARAMETER Experiment Name: Zm_5mM_NO_P Parameter: Timepoint (hr) Value: 6
  misc_feature: MA Experiment 108527 PARAMETER Experiment Name: Zm_5mM_NO_P Parameter: Tissue Value: Aerial
  misc_feature: MA Experiment 108527 PARAMETER Experiment Name: Zm_5mM_NO_P Parameter: Treatment Value: 5mM NO vs. No Treatment
  misc_feature: MA Experiment ID: 108528 Result: Down-regulated in Transcription
  misc_feature: MA Experiment 108528 PARAMETER Experiment Name: Zm_Imbibed_Seeds_P Parameter: Age (day) Value: 5 vs. 2
  misc_feature: MA Experiment 108528 PARAMETER Experiment Name: Zm_Imbibed_Seeds_P Parameter: Organism Value: Zea mays
  misc_feature: MA Experiment 108528 PARAMETER Experiment Name: Zm_Imbibed_Seeds_P Parameter: Plant Line Value: 35A19
  misc_feature: MA Experiment 108528 PARAMETER Experiment Name: Zm_Imbibed_Seeds_P Parameter: Tissue Value: Aerial vs. Embryo
  misc_feature: MA Experiment ID: 108530 Result: Down-regulated in Transcription
  misc_feature: MA Experiment 108530 PARAMETER Experiment Name: Zm_Imbibed_Seeds_P Parameter: Age (day) Value: 6 vs. 2
  misc_feature: MA Experiment 108530 PARAMETER Experiment Name: Zm_Imbibed_Seeds_P Parameter: Organism Value: Zea mays
  misc_feature: MA Experiment 108530 PARAMETER Experiment Name: Zm_Imbibed_Seeds_P Parameter: Plant Line Value: 35A19
  misc_feature: MA Experiment 108530 PARAMETER Experiment Name: Zm_Imbibed_Seeds_P Parameter: Tissue Value: Aerial vs. Embryo
  misc_feature: MA Experiment ID: 108535 Result: Down-regulated in Transcription
  misc_feature: MA Experiment 108535 PARAMETER Experiment Name: Zm_Meristem_P Parameter: Age (day) Value: 8
  misc_feature: MA Experiment 108535 PARAMETER Experiment Name: Zm_Meristem_P Parameter: Organism Value: Zea mays
  misc_feature: MA Experiment 108535 PARAMETER Experiment Name: Zm_Meristem_P Parameter: Plant Line Value: 35A19
  misc_feature: MA Experiment 108535 PARAMETER Experiment Name: Zm_Meristem_P Parameter: Tissue Value: Root Meristem vs. Above Root Meristem
  misc_feature: MA Experiment ID: 108536 Result: Up-regulated in Transcription
  misc_feature: MA Experiment 108536 PARAMETER Experiment Name: Zm_Meristem_P Parameter: Age (day) Value: 8
  misc_feature: MA Experiment 108536 PARAMETER Experiment Name: Zm_Meristem_P Parameter: Organism Value: Zea mays
  misc_feature: MA Experiment 108536 PARAMETER Experiment Name: Zm_Meristem_P Parameter: Plant Line Value: 35A19
  misc_feature: MA Experiment 108536 PARAMETER Experiment Name: Zm_Meristem_P Parameter: Tissue Value: Shoot Meristem vs. Above Shoot Meristem
  misc_feature: MA Experiment ID: 108543 Result: Up-regulated in Transcription
  misc_feature: MA Experiment ID: 108544 Result: Up-regulated in Transcription
  misc_feature: MA Experiment ID: 108547 Result: Down-regulated in Transcription
  misc_feature: MA Experiment 108547 PARAMETER Experiment Name: Zm_Imbibed_Seeds_P Parameter: Age (day) Value: 4 vs. 2
  misc_feature: MA Experiment 108547 PARAMETER Experiment Name: Zm_Imbibed_Seeds_P Parameter: Organism Value: Zea mays
  misc_feature: MA Experiment 108547 PARAMETER Experiment Name: Zm_Imbibed_Seeds_P Parameter: Plant Line Value: 35A19
  misc_feature: MA Experiment 108547 PARAMETER Experiment Name: Zm_Imbibed_Seeds_P Parameter: Tissue Value: Aerial vs. Embryo
  misc_feature: MA Experiment ID: 20000478 Result: Down-regulated in Transcription
  misc_feature: MA Experiment 20000478 PARAMETER Experiment Name: Zm_5mM_SA_P Parameter: Age (day) Value: 11
  misc_feature: MA Experiment 20000478 PARAMETER Experiment Name: Zm_5mM_SA_P Parameter: Organism Value: Zea mays
  misc_feature: MA Experiment 20000478 PARAMETER Experiment Name: Zm_5mM_SA_P Parameter: Plant Line Value: 35A19
  misc_feature: MA Experiment 20000478 PARAMETER Experiment Name: Zm_5mM_SA_P Parameter: Timepoint (hr) Value: 72
  misc_feature: MA Experiment 20000478 PARAMETER Experiment Name: Zm_5mM_SA_P Parameter: Tissue Value: Aerial
  misc_feature: MA Experiment 20000478 PARAMETER Experiment Name: Zm_5mM_SA_P Parameter: Treatment Value: 5mM SA vs. No Treatment
  misc_feature: MA Experiment ID: 20000480 Result: Down-regulated in Transcription
  misc_feature: MA Experiment 20000480 PARAMETER Experiment Name: Zm_Drought_P Parameter: Age (day) Value: 11
  misc_feature: MA Experiment 20000480 PARAMETER Experiment Name: Zm_Drought_P Parameter: Organism Value: Zea mays
  misc_feature: MA Experiment 20000480 PARAMETER Experiment Name: Zm_Drought_P Parameter: Plant Line Value: 35A19
  misc_feature: MA Experiment 20000480 PARAMETER Experiment Name: Zm_Drought_P Parameter: Timepoint (hr) Value: 72
  misc_feature: MA Experiment 20000480 PARAMETER Experiment Name: Zm_Drought_P Parameter: Tissue Value: Aerial
  misc_feature: MA Experiment 20000480 PARAMETER Experiment Name: Zm_Drought_P Parameter: Treatment Value: Drought vs. No Drought
  misc_feature: MA Experiment ID: 20000535 Result: Down-regulated in Transcription
  misc_feature: MA Experiment 20000535 PARAMETER Experiment Name: Zm_Hybrid_Seed_Dev_P Parameter: DAP Value: 30 vs. 12
  misc_feature: MA Experiment 20000535 PARAMETER Experiment Name: Zm_Hybrid_Seed_Dev_P Parameter: Organism Value: Zea mays
  misc_feature: MA Experiment 20000535 PARAMETER Experiment Name: Zm_Hybrid_Seed_Dev_P Parameter: Plant Line Value: 35A19
  misc_feature: MA Experiment 20000535 PARAMETER Experiment Name: Zm_Hybrid_Seed_Dev_P Parameter: Tissue Value: Embryo vs. Unfert Floret
  misc_feature: MA Experiment ID: 20000626 Result: Down-regulated in Transcription
  misc_feature: MA Experiment 20000626 PARAMETER Experiment Name: Zm_Herbicide-Treatments_P Parameter: Timepoint (hr) Value: 12
  misc_feature: MA Experiment 20000626 PARAMETER Experiment Name: Zm_Herbicide-Treatments_P Parameter: Tissue Value: Aerial
  misc_feature: MA Experiment 20000626 PARAMETER Experiment Name: Zm_Herbicide-Treatments_P Parameter: Treatment Value: Roundup vs. No Treatment
acaaggagtcgctggagttaggaggtgcagttatagcagacgcagagcaatggaggccgccgaggctcctaactatgacagtattgtcaacagggatgagatcaccgacgctgcagctgcagcgttcgccaacccggagcaggtcccggagaagtacgtccggacggaggaggtccttgacggcgtcgtcgtcggcgcggacgagagctacgagctgccggtcgtcgacatggccaggctcctcgacccggagctggcgccgtcggaggtcgccaagctcggcgacgcctgccgaaactggggtttctttcaggtcgtcccgtggcccgcccggattccttcagttctaaacttctagtagccagctgctagtatctgtttagaatcgattaattaatcacatttgtcccgtctgcatgcatgtctacagctgacaaaccatggagtggacgaagcggtggtgcagcggatgaaagacgccacggtgcagttcttcagctccccgctggacagcaaggccaaggtggcggtccgagggaacggcttcgaaggattcgggcaccactacagcagagcgtccagcggcaagctggactgggcagagagcatgattctcatcacgcagccagtcaaggacaggaacatggagatgtggcctacaaatccacccacgttcaggtctgcagtacgcatatcctggcctctctctgtctctactagtcaatcatctgacacgtacgtacgtctcccatgcacgcacgcacgcacggactctgtttgttaatcagggacgcgctcgacgtctactcggtagagatgatcggcctcgcaatgcggctcctggggttcatggcggccgacctcggggtggagccggaggcgctgcaggacgccttcacggggaagcggcagagcatggcggtccaccactacccgccctgccgccagcgggagaaggtgatgggcatcacgccgcacacggacgggctgggcctcacgctgctgctgcacgtggacgacacgcccggcctgcagatccgcaggggcggcaggtggttccccgtgcgcccgctgccgggcgccttcgtcgtcaacgtcgccgacatcctggacgtgctcaccaacggcgcctacgccagcgtcgagcaccgagtgctcccggacgccgagagggctcggaccaccgtcgtcgtgttccaggaggcgtccgtcgggggcctggtggcgccgctgccggggctcctcgaccagcagggcgcgcgcgcgcgctacaggtccattgagatcgaggagtacatcaagggcaacttcaacgcgctggagcaagggacacggttcatccagagcctcaggatatagctatctagttgctccttccatcaaaaaataattacccaacatatcgataaatcaatcaatctcaatcttc

SEQ ID NO: 19094 - protein, 202 aa, Zea mays subsp. mays
  peptide (1)..(202): Ceres Seq. ID no. 12368141
  misc_feature (54)..(150): Pfam Name: 2OG-Fe(II) oxygenase superfamily Pfam Description: 2OG-Fe(II) oxygenase superfamily
  misc_feature (8)..(202): Homolog of NCBI NO: 26451337 NR Description: SRG1 like protein [Arabidopsis thaliana]
  misc_feature (8)..(202): Homolog of NCBI NO: 15235014 NR Description: SRG1-like protein; protein id: At4g25300.1
  misc_feature (8)..(202): Homolog of NCBI NO: 15219986 NR Description: SRG1-like protein; protein id: At1g17010.1
  misc_feature (13)..(202): Homolog of NCBI NO: 37536802 NR Description: putative ethylene-forming enzyme
  misc_feature (8)..(202): Homolog of NCBI NO: 15219988 NR Description: SRG1-like protein
  misc_feature (28)..(202): Homolog of NCBI NO: 37536816 NR Description: putative ethylene-forming enzyme
  misc_feature (13)..(202): Homolog of NCBI NO: 37536796 NR Description: putative dioxygenase [Oryza sativa (japonica
  misc_feature (13)..(202): Homolog of NCBI NO: 37536792 NR Description: putative dioxygenase [Oryza sativa (japonica
  misc_feature (13)..(202): Homolog of NCBI NO: 37536820 NR Description: putative ethylene-forming enzyme
  misc_feature (13)..(202): Homolog of NCBI NO: 40736992 NR Description: putative oxidoreductase [Oryza sativa (japonica
MHARTHGLCLLIRDALDVYSVEMIGLAMRLLGFMAADLGVEPEALQDAFTGKRQSMAVHHYPPCRQREKVMGITPHTDGLGLTLLLHVDDTPGLQIRRGGRWFPVRPLPGAFVVNVADILDVLTNGAYASVEHRVLPDAERARTTVVVFQEASVGGLVAPLPGLLDQQGARARYRSIEIEEYIKGNFNALEQGTRFIQSLRI

SEQ ID NO: 19095 - protein, 180 aa, Zea mays subsp. mays
  peptide (1)..(180): Ceres Seq. ID no. 12368142
  misc_feature (32)..(128): Pfam Name: 2OG-Fe(II) oxygenase superfamily Pfam Description: 2OG-Fe(II) oxygenase superfamily
  misc_feature (1)..(180): Homolog of NCBI NO: 40736992 NR Description: putative oxidoreductase [Oryza sativa (japonica
  misc_feature (1)..(180): Homolog of NCBI NO: 26451337 NR Description: SRG1 like protein [Arabidopsis thaliana]
  misc_feature (1)..(180): Homolog of NCBI NO: 15235014 NR Description: SRG1-like protein; protein id: At4g25300.1
  misc_feature (1)..(180): Homolog of NCBI NO: 15219986 NR Description: SRG1-like protein; protein id: At1g17010.1
  misc_feature (1)..(180): Homolog of NCBI NO: 37536802 NR Description: putative ethylene-forming enzyme
  misc_feature (1)..(180): Homolog of NCBI NO: 15219988 NR Description: SRG1-like protein
  misc_feature (6)..(180): Homolog of NCBI NO: 37536816 NR Description: putative ethylene-forming enzyme
  misc_feature (1)..(180): Homolog of NCBI NO: 37536796 NR Description: putative dioxygenase [Oryza sativa (japonica
  misc_feature (1)..(180): Homolog of NCBI NO: 37536792 NR Description: putative dioxygenase [Oryza sativa (japonica
  misc_feature (1)..(180): Homolog of NCBI NO: 37536820 NR Description: putative ethylene-forming enzyme
MIGLAMRLLGFMAADLGVEPEALQDAFTGKRQSMAVHHYPPCRQREKVMGITPHTDGLGLTLLLHVDDTPGLQIRRGGRWFPVRPLPGAFVVNVADILDVLTNGAYASVEHRVLPDAERARTTVVVFQEASVGGLVAPLPGLLDQQGARARYRSIEIEEYIKGNFNALEQGTRFIQSLRI

SEQ ID NO: 19096 - protein, 175 aa, Zea mays subsp. mays
  peptide (1)..(175): Ceres Seq. ID no. 12368143
  misc_feature (27)..(123): Pfam Name: 2OG-Fe(II) oxygenase superfamily Pfam Description: 2OG-Fe(II) oxygenase superfamily
  misc_feature (1)..(175): Homolog of NCBI NO: 26451337 NR Description: SRG1 like protein [Arabidopsis thaliana]
  misc_feature (1)..(175): Homolog of NCBI NO: 15235014 NR Description: SRG1-like protein; protein id: At4g25300.1
  misc_feature (1)..(175): Homolog of NCBI NO: 15219986 NR Description: SRG1-like protein; protein id: At1g17010.1
  misc_feature (1)..(175): Homolog of NCBI NO: 37536802 NR Description: putative ethylene-forming enzyme
  misc_feature (1)..(175): Homolog of NCBI NO: 15219988 NR Description: SRG1-like protein
  misc_feature (1)..(175): Homolog of NCBI NO: 37536816 NR Description: putative ethylene-forming enzyme
  misc_feature (1)..(175): Homolog of NCBI NO: 37536796 NR Description: putative dioxygenase [Oryza sativa (japonica
  misc_feature (1)..(175): Homolog of NCBI NO: 37536792 NR Description: putative dioxygenase [Oryza sativa (japonica
  misc_feature (1)..(175): Homolog of NCBI NO: 37536820 NR Description: putative ethylene-forming enzyme
  misc_feature (1)..(175): Homolog of NCBI NO: 40736992 NR Description: putative oxidoreductase [Oryza sativa (japonica
MRLLGFMAADLGVEPEALQDAFTGKRQSMAVHHYPPCRQREKVMGITPHTDGLGLTLLLHVDDTPGLQIRRGGRWFPVRPLPGAFVVNVADILDVLTNGAYASVEHRVLPDAERARTTVVVFQEASVGGLVAPLPGLLDQQGARARYRSIEIEEYIKGNFNALEQGTRFIQSLRI

SEQ ID NO: 19097 - DNA, 1221 bp, Zea mays subsp. mays
  misc_feature (1)..(1221): Ceres Seq. ID no. 12420021
  misc_feature: MA Experiment ID: 20000533 Result: Up-regulated in Transcription
  misc_feature: MA Experiment 20000533 PARAMETER Experiment Name: Zm_0.001percent_MeJA_P Parameter: Age (day) Value: 11
  misc_feature: MA Experiment 20000533 PARAMETER Experiment Name: Zm_0.001percent_MeJA_P Parameter: Organism Value: Zea mays
  misc_feature: MA Experiment 20000533 PARAMETER Experiment Name: Zm_0.001percent_MeJA_P Parameter: Plant Line Value: 35A19
  misc_feature: MA Experiment 20000533 PARAMETER Experiment Name: Zm_0.001percent_MeJA_P Parameter: Timepoint (hr) Value: 72
  misc_feature: MA Experiment 20000533 PARAMETER Experiment Name: Zm_0.001percent_MeJA_P Parameter: Tissue Value: Aerial
  misc_feature: MA Experiment 20000533 PARAMETER Experiment Name: Zm_0.001percent_MeJA_P Parameter: Treatment Value: 0.001percent MeJA vs. No Treatment
ccaagcagaagagaagagaggcagacaggctcactagtgggagatggtgactactacgatcgaggacctccacggcgacgtgctgggctgcgcgctgcggcggctggacgggcggtcgcttgcggcggccagctgcgccacggtcgcgctccgggcgctggccacggacccggagacgtggcgcgcgctctgcntcnccgagtggccgtcgctggcgctggcgctggcggcgcancgccggctgctcgcggcggtcccgccgnagcggctnttcgccgacgcgcacccgttcccgtccgcggacaccgggggagccggaggtccnnaccccgaccccgtccccnncggggagctggtctccgcggtggacgtcctactacaggggcgcgcccctgctgtcccgcgtggtgnagacgcccgcgtcctcgccgtggttcctcggctcgccgttccgcgtggaggccgtggagcggaagaggccggcctccgccgccgcggtgccctcgccggcggagctcgagctgagctgggtggtcgtggacccggcccgcgnccgcgcggtcaacgtctccagccggcgccccgtggcggtggcccggcactggtacacgggcgagacgctggcgcggttcgccgtggtgctgggagggtgcaagttcgaggccaccgtcgcctgctccgaaggggcggatgggcacgtcagcgaggtcagcctggccgtggaggacgccgacggcgccgccgtcagcggcgagggcacgctgcggctcctcgccgcggcgatggaggccccccggaagggaggggcgcgggagccggaggaggcccggaggcggtacctcgacttcgtgaagcgcaagaaggggaggaaggagagcaaggcgcgccgcgaggcgctcgtggacctgtgcntgctccgctgccagcgccgtngtcnngctcacctgcctngccnctgtcgcgctccggtgaccggcgcctgctgcctgctgcccggacgnacgagcgcgtgtagtgggcactaggcaaggcagctgcacacagnacgtgtcgtaacatctcgggtagcacttgagtattagcgtacaacgtcgggtggcgatcttttctccaacgctctttttctctctctcttcttcttcccggtaacagttaggaacagcacatcatcatgtcctgcactggtgtgcatcgttttcctatcctataacaaacgacgtg

SEQ ID NO: 19098 - protein, 323 aa, Zea mays subsp. mays
  peptide (1)..(323): Ceres Seq. ID no. 12420022
  misc_feature (163)..(308): Homolog of NCBI NO: 35215072 NR Description: hypothetical protein [Oryza sativa (japonica
  misc_feature (139)..(287): Homolog of NCBI NO: 9625624 NR Description: nuclear antigen EBNA1 [Human herpesvirus 4]
  misc_feature (139)..(304): Homolog of NCBI NO: 1171093 NR Description: Myosin heavy chain IB (Myosin heavy chain IL)
  misc_feature (139)..(304): Homolog of NCBI NO: 71608 NR Description: myosin heavy chain IB - Acanthamoeba castellanii
  misc_feature (134)..(323): Homolog of NCBI NO: 34897034 NR Description: hypothetical protein [Oryza sativa (japonica
  misc_feature (138)..(314): Homolog of NCBI NO: 37535678 NR Description: hypothetical protein [Oryza sativa (japonica
  misc_feature (139)..(293): Homolog of NCBI NO: 9625624 NR Description: nuclear antigen EBNA1 [Human herpesvirus 4]
  misc_feature (5)..(114): Homolog of NCBI NO: 15225867 NR Description: unknown protein
  misc_feature (2)..(115): Homolog of NCBI NO: 15227574 NR Description: hypothetical protein; protein id: At2g36090.1
  misc_feature (1)..(121): Homolog of NCBI NO: 32479726 NR Description: OJ991214_12.2 [Oryza sativa (japonica
  misc_feature (51)..(51): Xaa is any aa, unknown or other
  misc_feature (52)..(52): Xaa is any aa, unknown or other
  misc_feature (64)..(64): Xaa is any aa, unknown or other
  misc_feature (74)..(74): Xaa is any aa, unknown or other
  misc_feature (76)..(76): Xaa is any aa, unknown or other
  misc_feature (94)..(94): Xaa is any aa, unknown or other
  misc_feature (95)..(95): Xaa is any aa, unknown or other
  misc_feature (101)..(101): Xaa is any aa, unknown or other
  misc_feature (123)..(123): Xaa is any aa, unknown or other
  misc_feature (170)..(170): Xaa is any aa, unknown or other
  misc_feature (290)..(290): Xaa is any aa, unknown or other
  misc_feature (297)..(297): Xaa is any aa, unknown or other
  misc_feature (298)..(298): Xaa is any aa, unknown or other
  misc_feature (299)..(299): Xaa is any aa, unknown or other
  misc_feature (303)..(303): Xaa is any aa, unknown or other
  misc_feature (304)..(304): Xaa is any aa, unknown or other
  misc_feature (320)..(320): Xaa is any aa, unknown or other
MVTTTIEDLHGDVLGCALRRLDGRSLAAASCATVALRALATDPETWRALCXXEWPSLALALAAXRRLLAAVPPXRXFADAHPFPSADTGGAGGXXPDPVPXGELVSAVDVLLQGRAPAVPRGXDARVLAVVPRLAVPRGGRGAEEAGLRRRGALAGGARAELGGRGPGPXPRGQRLQPAPRGGGPALVHGRDAGAVRRGAGRVQVRGHRRLLRRGGWARQRGQPGRGGRRRRRRQRRGHAAAPRRGDGGPPEGRGAGAGGGPEAVPRLREAQEGEEGEQGAPRGARGPVXAPLPAPXXXSPAXXLSRSGDRRLLPAARTXERV

SEQ ID NO: 19099 - protein, 174 aa, Zea mays subsp. mays
  peptide (1)..(174): Ceres Seq. ID no. 12420023
  misc_feature (1)..(174): Homolog of NCBI NO: 29247944 NR Description: GLP_26_54603_52153 [Giardia lamblia ATCC 50803]
  misc_feature (28)..(90): Homolog of NCBI NO: 9625624 NR Description: nuclear antigen EBNA1 [Human herpesvirus 4]
  misc_feature (32)..(129): Homolog of NCBI NO: 9625624 NR Description: nuclear antigen EBNA1 [Human herpesvirus 4]
  misc_feature (21)..(174): Homolog of NCBI NO: 23018055 NR Description: hypothetical protein [Thermobifida fusca]
  misc_feature (28)..(129): Homolog of NCBI NO: 9625624 NR Description: nuclear antigen EBNA1 [Human herpesvirus 4]
  misc_feature (22)..(174): Homolog of NCBI NO: 22959992 NR Description: hypothetical protein [Rhodobacter sphaeroides]
  misc_feature (65)..(65): Xaa is any aa, unknown or other
  misc_feature (66)..(66): Xaa is any aa, unknown or other
  misc_feature (79)..(79): Xaa is any aa, unknown or other
  misc_feature (88)..(88): Xaa is any aa, unknown or other
  misc_feature (91)..(91): Xaa is any aa, unknown or other
  misc_feature (109)..(109): Xaa is any aa, unknown or other
  misc_feature (115)..(115): Xaa is any aa, unknown or other
  misc_feature (137)..(137): Xaa is any aa, unknown or other
PSRREERQTGSLVGDGDYYDRGPPRRRAGLRAAAAGRAVACGGQLRHGRAPGAGHGPGDVARALXXRVAVAGAGAGGAXPAARGGPAXAAXRRRAPVPVRGHRGSRRSXPRPRPXRGAGLRGGRPTTGARPCCPAWXRRPRPRRGSSARRSAWRPWSGRGRPPPPRCPRRRSSS

SEQ ID NO: 19100 - DNA, 1619 bp, Zea mays subsp. mays
  misc_feature (1)..(1619): Ceres Seq. ID no. 13499381
  misc_feature: MA Experiment ID: 108528 Result: Up-regulated in Transcription
  misc_feature: MA Experiment 108528 PARAMETER Experiment Name: Zm_Imbibed_Seeds_P Parameter: Age (day) Value: 5 vs. 2
  misc_feature: MA Experiment 108528 PARAMETER Experiment Name: Zm_Imbibed_Seeds_P Parameter: Organism Value: Zea mays
  misc_feature: MA Experiment 108528 PARAMETER Experiment Name: Zm_Imbibed_Seeds_P Parameter: Plant Line Value: 35A19
  misc_feature: MA Experiment 108528 PARAMETER Experiment Name: Zm_Imbibed_Seeds_P Parameter: Tissue Value: Aerial vs. Embryo
  misc_feature: MA Experiment ID: 108530 Result: Up-regulated in Transcription
  misc_feature: MA Experiment 108530 PARAMETER Experiment Name: Zm_Imbibed_Seeds_P Parameter: Age (day) Value: 6 vs. 2
  misc_feature: MA Experiment 108530 PARAMETER Experiment Name: Zm_Imbibed_Seeds_P Parameter: Organism Value: Zea mays
  misc_feature: MA Experiment 108530 PARAMETER Experiment Name: Zm_Imbibed_Seeds_P Parameter: Plant Line Value: 35A19
  misc_feature: MA Experiment 108530 PARAMETER Experiment Name: Zm_Imbibed_Seeds_P Parameter: Tissue Value: Aerial vs. Embryo
  misc_feature: MA Experiment ID: 108547 Result: Up-regulated in Transcription
  misc_feature: MA Experiment 108547 PARAMETER Experiment Name: Zm_Imbibed_Seeds_P Parameter: Age (day) Value: 4 vs. 2
  misc_feature: MA Experiment 108547 PARAMETER Experiment Name: Zm_Imbibed_Seeds_P Parameter: Organism Value: Zea mays
  misc_feature: MA Experiment 108547 PARAMETER Experiment Name: Zm_Imbibed_Seeds_P Parameter: Plant Line Value: 35A19
  misc_feature: MA Experiment 108547 PARAMETER Experiment Name: Zm_Imbibed_Seeds_P Parameter: Tissue Value: Aerial vs. Embryo
  misc_feature: MA Experiment ID: 20000535 Result: Down-regulated in Transcription
  misc_feature: MA Experiment 20000535 PARAMETER Experiment Name: Zm_Hybrid_Seed_Dev_P Parameter: DAP Value: 30 vs. 12
  misc_feature: MA Experiment 20000535 PARAMETER Experiment Name: Zm_Hybrid_Seed_Dev_P Parameter: Organism Value: Zea mays
  misc_feature: MA Experiment 20000535 PARAMETER Experiment Name: Zm_Hybrid_Seed_Dev_P Parameter: Plant Line Value: 35A19
  misc_feature: MA Experiment 20000535 PARAMETER Experiment Name: Zm_Hybrid_Seed_Dev_P Parameter: Tissue Value: Embryo vs. Unfert Floret
gcacgagaccattacctagaacatcctaatcgaaaaagtcctcacccattcattcgtccatcccacctaccatggccaccgcctccggcactgacgccggtgcccagccgcgcgacgaccccagcctcctccccttcgcgtccttctcgctcggcctctccatccgcgcgccggccacccccacactcgcctccgtcccctccaccctccacctccccactcaaatctctacactcgccgtctgcctccacccctccgccgcgcagccctcctcccgccgcaccacccgcctcaattccgccacctcctccgtcatcgccccgctgccctcctcaacgcccggcctctcccgctccttcccttcgggcgcgcccgccgcagcagggcgccgccgcacgctcgtctggttccgcgccgacctccgcctccacgaccatgagccgtttcacgccgcagcgggggcgtcgtcctccctcctccccgttttcgtcttcgatccgcgggacttcggcaagtccccctcggggttcgaccggacgggcccgtaccgcgccaacttcctgctcgattcggtcgccgacctgcgccggagcctccgcgcccgcggtggggacctggtggtgcgcgtgggtatgcccgaagtggtcattcccgagctcgcgcgggcggcgggcgcggaggccgtgtacgctcacggggaggtatcgcgggacgaggtccgcgccgaggagagggtgcaaaaggctgtggagaaggagggtatcaacgtgaagtacttctggggtagcacgctataccacgtggaagaccttcccttccgcctcgaggacatgccgtccaactatggcggcttcagggaggccgtgaaggggttggaggtcagaaaggtgctggaggctcccgaggaggtcaagtgcgtgcccatgaagaatgtgctcgagcccggtgacatccccacgcttgctgagctcgggctcactgcgccaccagccatgtcacaggactcaaaacctgctgttggctctactctcattggtggtgagacagaagctctggagaggttgaagaagtttgctgcagaatgctctatgcagccaaacaaagtagacaaaagcaatacccaagatagcatatatggtgctaatttctcttgcaaaatttctccatggcttgctacaggttgcctctctccacggttcatgtatgaggagttgaagaagcatgctactaaagcaattccttttgggtcaacacccaagaataatgatggcacatctgatgctggaacaaattggttaatgtttgagttgctgtggagagatttcttcaggttcatcacaaagaagtacagctctgtacagaagacatctgaagttgccactggctgcactcccgccccagcgcttgcatgaacttacttagacaagctgattgccagctgcttttttggggtgataaacttatgtgcattttcaatggagtcttttttgccgccaataatgttggtagtcaaagtgaacgccgaatgcgcattcctgcgttttggtttggtcgatgtatttaatgctgtcgacatccctccaaatgactgttgaatgcaaatgatactgtgagcaacc

SEQ ID NO: 19101 - protein, 446 aa, Zea mays subsp. mays
  peptide (1)..(446): Ceres Seq. ID no. 13499382
  misc_feature (107)..(284): Pfam Name: DNA photolyase Pfam Description: DNA photolyase
  misc_feature (237)..(295): Homolog of NCBI NO: 11991490 NR Description: putative lectin [Hordeum vulgare subsp. vulgare]
  misc_feature (138)..(394): Homolog of NCBI NO: 16330358 NR Description: DNA photolyase [Synechocystis sp. PCC 6803]
  misc_feature (95)..(394): Homolog of NCBI NO: 28971609 NR Description: cryptochrome dash [Arabidopsis thaliana]
  misc_feature (95)..(394): Homolog of NCBI NO: 22327046 NR Description: DNA photolyase - like protein [Arabidopsis
  misc_feature (107)..(387): Homolog of NCBI NO: 23135973 NR Description: hypothetical protein [Cytophaga hutchinsonii]
  misc_feature (110)..(394): Homolog of NCBI NO: 28374085 NR Description: Chain A, Crystal Structure Analysis Of
  misc_feature (110)..(394): Homolog of NCBI NO: 23040111 NR Description: hypothetical protein [Trichodesmium erythraeum
  misc_feature (107)..(394): Homolog of NCBI NO: 37520404 NR Description: probable bacterial cryptochrome [Gloeobacter
  misc_feature (18)..(442): Homolog of NCBI NO: 15226633 NR Description: photolyase/blue-light receptor (PHR2)
  misc_feature (18)..(442): Homolog of NCBI NO: 21592984 NR Description: photolyase/blue-light receptor PHR2 [Arabidopsis
MATASGTDAGAQPRDDPSLLPFASFSLGLSIRAPATPTLASVPSTLHLPTQISTLAVCLHPSAAQPSSRRTTRLNSATSSVIAPLPSSTPGLSRSFPSGAPAAAGRRRTLVWFRADLRLHDHEPFHAAAGASSSLLPVFVFDPRDFGKSPSGFDRTGPYRANFLLDSVADLRRSLRARGGDLVVRVGMPEVVIPELARAAGAEAVYAHGEVSRDEVRAEERVQKAVEKEGINVKYFWGSTLYHVEDLPFRLEDMPSNYGGFREAVKGLEVRKVLEAPEEVKCVPMKNVLEPGDIPTLAELGLTAPPAMSQDSKPAVGSTLIGGETEALERLKKFAAECSMQPNKVDKSNTQDSIYGANFSCKISPWLATGCLSPRFMYEELKKHATKAIPFGSTPKNNDGTSDAGTNWLMFELLWRDFFRFITKKYSSVQKTSEVATGCTPAPALA

SEQ ID NO: 19102 - protein, 259 aa, Zea mays subsp. mays
  peptide (1)..(259): Ceres Seq. ID no. 13499383
  misc_feature (1)..(97): Pfam Name: DNA photolyase Pfam Description: DNA photolyase
  misc_feature (50)..(108): Homolog of NCBI NO: 11991490 NR Description: putative lectin [Hordeum vulgare subsp. vulgare]
  misc_feature (1)..(207): Homolog of NCBI NO: 16330358 NR Description: DNA photolyase [Synechocystis sp. PCC 6803]
  misc_feature (1)..(207): Homolog of NCBI NO: 28971609 NR Description: cryptochrome dash [Arabidopsis thaliana]
  misc_feature (1)..(207): Homolog of NCBI NO: 22327046 NR Description: DNA photolyase - like protein [Arabidopsis
  misc_feature (1)..(200): Homolog of NCBI NO: 23135973 NR Description: hypothetical protein [Cytophaga hutchinsonii]
  misc_feature (1)..(207): Homolog of NCBI NO: 28374085 NR Description: Chain A, Crystal Structure Analysis Of
  misc_feature (1)..(207): Homolog of NCBI NO: 23040111 NR Description: hypothetical protein [Trichodesmium erythraeum
  misc_feature (1)..(207): Homolog of NCBI NO: 37520404 NR Description: probable bacterial cryptochrome [Gloeobacter
  misc_feature (1)..(255): Homolog of NCBI NO: 15226633 NR Description: photolyase/blue-light receptor (PHR2)
  misc_feature (1)..(255): Homolog of NCBI NO: 21592984 NR Description: photolyase/blue-light receptor PHR2 [Arabidopsis
MPEVVIPELARAAGAEAVYAHGEVSRDEVRAEERVQKAVEKEGINVKYFWGSTLYHVEDLPFRLEDMPSNYGGFREAVKGLEVRKVLEAPEEVKCVPMKNVLEPGDIPTLAELGLTAPPAMSQDSKPAVGSTLIGGETEALERLKKFAAECSMQPNKVDKSNTQDSIYGANFSCKISPWLATGCLSPRFMYEELKKHATKAIPFGSTPKNNDGTSDAGTNWLMFELLWRDFFRFITKKYSSVQKTSEVATGCTPAPALA

SEQ ID NO: 19103 - protein, 256 aa, Zea mays subsp. mays
  peptide (1)..(256): Ceres Seq. ID no. 13499384
  misc_feature (9)..(184): Pfam Name: Formin Homology 2 Domain Pfam Description: Formin Homology 2 Domain
  misc_feature (9)..(230): Homolog of NCBI NO: 10438473 NR Description: unnamed protein product [Homo sapiens]
  misc_feature (11)..(174): Homolog of NCBI NO: 14253159 NR Description: VMP3 protein [Volvox carteri f. nagariensis]
  misc_feature (9)..(202): Homolog of NCBI NO: 15230108 NR Description: protein kinase -related [Arabidopsis thaliana]
  misc_feature (9)..(221): Homolog of NCBI NO: 23017082 NR Description: hypothetical protein [Thermobifida fusca]
  misc_feature (13)..(204): Homolog of NCBI NO: 27375632 NR Description: blr0521 [Bradyrhizobium japonicum]
  misc_feature (9)..(177): Homolog of NCBI NO: 81286 NR Description: extensin - Volvox carteri (fragment)
  misc_feature (9)..(204): Homolog of NCBI NO: 27375632 NR Description: blr0521 [Bradyrhizobium japonicum]
  misc_feature (9)..(202): Homolog of NCBI NO: 20138131 NR Description: Vegetative cell wall protein gp1 precursor
  misc_feature (14)..(161): Homolog of NCBI NO: 81286 NR Description: extensin - Volvox carteri (fragment)
  misc_feature (11)..(201): Homolog of NCBI NO: 2429362 NR Description: proline rich protein [Santalum album]
ARDHYLEHPNRKSPHPFIRPSHLPWPPPPALTPVPSRATTPASSPSRPSRSASPSARRPPPHSPPSPPPSTSPLKSLHSPSASTPPPRSPPPAAPPASIPPPPPSSPRCPPQRPASPAPSLRARPPQQGAAARSSGSAPTSASTTMSRFTPQRGRRPPSSPFSSSIRGTSASPPRGSTGRARTAPTSCSIRSPTCAGASAPAVGTWWCAWVCPKWSFPSSRGRRARRPCTLTGRYRGTRSAPRRGCKRLWRRRVST

SEQ ID NO: 19104 - DNA, 1061 bp, Zea mays subsp. mays
  misc_feature (1)..(1061): Ceres Seq. ID no. 12363664
  misc_feature: MA Experiment ID: 108528 Result: Down-regulated in Transcription
  misc_feature: MA Experiment 108528 PARAMETER Experiment Name: Zm_Imbibed_Seeds_P Parameter: Age (day) Value: 5 vs. 2
  misc_feature: MA Experiment 108528 PARAMETER Experiment Name: Zm_Imbibed_Seeds_P Parameter: Organism Value: Zea mays
  misc_feature: MA Experiment 108528 PARAMETER Experiment Name: Zm_Imbibed_Seeds_P Parameter: Plant Line Value: 35A19
  misc_feature: MA Experiment 108528 PARAMETER Experiment Name: Zm_Imbibed_Seeds_P Parameter: Tissue Value: Aerial vs. Embryo
  misc_feature: MA Experiment ID: 108533 Result: Up-regulated in Transcription
  misc_feature: MA Experiment 108533 PARAMETER Experiment Name: Zm_4deg_Cold_P Parameter: Age (hr) Value: 8
  misc_feature: MA Experiment 108533 PARAMETER Experiment Name: Zm_4deg_Cold_P Parameter: Organism Value: Zea mays
  misc_feature: MA Experiment 108533 PARAMETER Experiment Name: Zm_4deg_Cold_P Parameter: Plant Line Value: 35A19
  misc_feature: MA Experiment 108533 PARAMETER Experiment Name: Zm_4deg_Cold_P Parameter: Temperature (deg C) Value: 4 vs. 22
  misc_feature: MA Experiment 108533 PARAMETER Experiment Name: Zm_4deg_Cold_P Parameter: Timepoint (hr) Value: 1
  misc_feature: MA Experiment 108533 PARAMETER Experiment Name: Zm_4deg_Cold_P Parameter: Tissue Value: Aerial
  misc_feature: MA Experiment ID: 108535 Result: Down-regulated in Transcription
  misc_feature: MA Experiment 108535 PARAMETER Experiment Name: Zm_Meristem_P Parameter: Age (day) Value: 8
  misc_feature: MA Experiment 108535 PARAMETER Experiment Name: Zm_Meristem_P Parameter: Organism Value: Zea mays
  misc_feature: MA Experiment 108535 PARAMETER Experiment Name: Zm_Meristem_P Parameter: Plant Line Value: 35A19
  misc_feature: MA Experiment 108535 PARAMETER Experiment Name: Zm_Meristem_P Parameter: Tissue Value: Root Meristem vs. Above Root Meristem
  misc_feature: MA Experiment ID: 108536 Result: Up-regulated in Transcription
  misc_feature: MA Experiment 108536 PARAMETER Experiment Name: Zm_Meristem_P Parameter: Age (day) Value: 8
  misc_feature: MA Experiment 108536 PARAMETER Experiment Name: Zm_Meristem_P Parameter: Organism Value: Zea mays
  misc_feature: MA Experiment 108536 PARAMETER Experiment Name: Zm_Meristem_P Parameter: Plant Line Value: 35A19
  misc_feature: MA Experiment 108536 PARAMETER Experiment Name: Zm_Meristem_P Parameter: Tissue Value: Shoot Meristem vs. Above Shoot Meristem
  misc_feature: MA Experiment ID: 20000108 Result: Down-regulated in Transcription
  misc_feature: MA Experiment 20000108 PARAMETER Experiment Name: Zm_Root-Tips_P Parameter: Age (day) Value: 12
  misc_feature: MA Experiment 20000108 PARAMETER Experiment Name: Zm_Root-Tips_P Parameter: Organism Value: Zea mays
  misc_feature: MA Experiment 20000108 PARAMETER Experiment Name: Zm_Root-Tips_P Parameter: Tissue Value: Root tips vs. Root mid region    35
  misc_feature: MA Experiment 20000108 PARAMETER Experiment Name: Zm_Root-Tips_P Parameter: Tissue Value: Root tips vs. Root mid region   Sequence Listing-Misc Features (4)
  misc_feature: MA Experiment ID: 20000492 Result: Down-regulated in Transcription
  misc_feature: MA Experiment 20000492 PARAMETER Experiment Name: Zm_Hybrid_Seed_Dev_P Parameter: DAP Value: 12
  misc_feature: MA Experiment 20000492 PARAMETER Experiment Name: Zm_Hybrid_Seed_Dev_P Parameter: Organism Value: Zea mays
  misc_feature: MA Experiment 20000492 PARAMETER Experiment Name: Zm_Hybrid_Seed_Dev_P Parameter: Plant Line Value: 35A19
  misc_feature: MA Experiment 20000492 PARAMETER Experiment Name: Zm_Hybrid_Seed_Dev_P Parameter: Tissue Value: Fert Kernel vs. Unfert Floret
  misc_feature: MA Experiment ID: 20000535 Result: Down-regulated in Transcription
  misc_feature: MA Experiment 20000535 PARAMETER Experiment Name: Zm_Hybrid_Seed_Dev_P Parameter: DAP Value: 30 vs. 12
  misc_feature: MA Experiment 20000535 PARAMETER Experiment Name: Zm_Hybrid_Seed_Dev_P Parameter: Organism Value: Zea mays
  misc_feature: MA Experiment 20000535 PARAMETER Experiment Name: Zm_Hybrid_Seed_Dev_P Parameter: Plant Line Value: 35A19
  misc_feature: MA Experiment 20000535 PARAMETER Experiment Name: Zm_Hybrid_Seed_Dev_P Parameter: Tissue Value: Embryo vs. Unfert Floret
  misc_feature: MA Experiment ID: 20000626 Result: Down-regulated in Transcription
  misc_feature: MA Experiment 20000626 PARAMETER Experiment Name: Zm_Herbicide-Treatments_P Parameter: Timepoint (hr) Value: 12
  misc_feature: MA Experiment 20000626 PARAMETER Experiment Name: Zm_Herbicide-Treatments_P Parameter: Tissue Value: Aerial
  misc_feature: MA Experiment 20000626 PARAMETER Experiment Name: Zm_Herbicide-Treatments_P Parameter: Treatment Value: Roundup vs. No Treatment
  misc_feature: MA Experiment ID: 20000629 Result: Down-regulated in Transcription
  misc_feature: MA Experiment 20000629 PARAMETER Experiment Name: Zm_Herbicide-Treatments_P Parameter: Timepoint (hr) Value: 12
  misc_feature: MA Experiment 20000629 PARAMETER Experiment Name: Zm_Herbicide-Treatments_P Parameter: Tissue Value: Aerial
  misc_feature: MA Experiment 20000629 PARAMETER Experiment Name: Zm_Herbicide-Treatments_P Parameter: Treatment Value: Trimec vs. No Treatment
gcacgagaccattacctagaacatcctaatcgaaaaaatcatccatcgctgcgacctcggaaccaacctttccgccactctctctcgcgacaccgaccgacgcgacgacgtcgcactcgcacagccaccaccaccccaccatggcggcaccgaggctggagcgcggcgggttccagctcccgaacaccgagcaggagaactccctcttcctccgcgcgctcatctccgtcgtgtccggggacaccgccgcgttgctcccggaagcggcggccgtagaggctcccgcggcccccgtggcgtgcgccaggtgcggcgcggacgggtgcgcggcggccggctgctgcgagctcgtcgccgggtcgagcagcgacagcgacggcggcctagggctagccgcgggcaagcggagagggagggggaggaaggtgatccagtacaggggcgtgcggcggcggccgtggggcaagtgggcggcggagatccgcgacccgcgccgcgccgcgcgcaagtggctcggcacgttcgacaccgccgaggacgccgcgcgcgcctacgacgtcgccgcggtcgagctccggggccagcgagccaagctcaacttcccagcgcagcctccgcaccaccgtccattgcccgatcagcagagcctccgcgagaacagcggatccaacgccgcgtcgccggtgcacgtggcgctggcgccgaccacgcagcaggacatctgggagggtttgaacgagatcatgatgatggaggaggaacgcagcttctggtctatgcgatgatcctgcctgcaccttcgcccatgcatccatctccgtatcttctcttgtttaatgcttttattctatcctactctatttcatgattattagagtccattgattgccttttagggaagggattccatacgatctccatctgaaaagagaacacttattagcttcacaagattgcttggcatgcagacgtacgtaaagtgagtttaggaagcaatggtgccaccagccgactgtactgtaaatcactgtttctgtaactcgttagtcaccatcgctttc

SEQ ID NO: 19105 - protein, 214 aa, Zea mays subsp. mays
  peptide (1)..(214): Ceres Seq. ID no. 12363665
  misc_feature (98)..(157): Pfam Name: AP2 domain Pfam Description: AP2 domain
  misc_feature (87)..(166): Homolog of NCBI NO: 629508 NR Description: cadmium-induced protein - Arabidopsis thaliana
  misc_feature (81)..(207): Homolog of NCBI NO: 15220971 NR Description: AP2 domain protein RAP2.12
  misc_feature (81)..(207): Homolog of NCBI NO: 21593779 NR Description: AP2 domain containing protein, putative
  misc_feature (81)..(207): Homolog of NCBI NO: 2281649 NR Description: AP2 domain containing protein RAP2.12
  misc_feature (87)..(166): Homolog of NCBI NO: 15228312 NR Description: AP2 domain protein RAP2.3
  misc_feature (85)..(199): Homolog of NCBI NO: 34897546 NR Description: OSJNBa0042L16.10 [Oryza sativa (japonica
  misc_feature (87)..(206): Homolog of NCBI NO: 15235365 NR Description: putative protein
  misc_feature (47)..(191): Homolog of NCBI NO: 14140155 NR Description: putative AP2 domain transcription factor [Oryza
  misc_feature (87)..(171): Homolog of NCBI NO: 2467088 NR Description: putative Ckc2 [Arabidopsis thaliana]
  misc_feature (36)..(155): Homolog of NCBI NO: 38347164 NR Description: OSJNBa0039C07.10 [Oryza sativa (japonica
MAAPRLERGGFQLPNTEQENSLFLRALISVVSGDTAALLPEAAAVEAPAAPVACARCGADGCAAAGCCELVAGSSSDSDGGLGLAAGKRRGRGRKVIQYRGVRRRPWGKWAAEIRDPRRAARKWLGTFDTAEDAARAYDVAAVELRGQRAKLNFPAQPPHHRPLPDQQSLRENSGSNAASPVHVALAPTTQQDIWEGLNEIMMMEEERSFWSMR

SEQ ID NO: 19106 - DNA, 1567 bp, Zea mays subsp. mays
  misc_feature (1)..(1567): Ceres Seq. ID no. 12383380
  misc_feature: MA Experiment ID: 108504 Result: Down-regulated in Transcription
  misc_feature: MA Experiment 108504 PARAMETER Experiment Name: Zm_Drought_P Parameter: Age (day) Value: 8
  misc_feature: MA Experiment 108504 PARAMETER Experiment Name: Zm_Drought_P Parameter: Organism Value: Zea mays
  misc_feature: MA Experiment 108504 PARAMETER Experiment Name: Zm_Drought_P Parameter: Plant Line Value: 35A19
  misc_feature: MA Experiment 108504 PARAMETER Experiment Name: Zm_Drought_P Parameter: Timepoint (hr) Value: 12
  misc_feature: MA Experiment 108504 PARAMETER Experiment Name: Zm_Drought_P Parameter: Tissue Value: Aerial
  misc_feature: MA Experiment 108504 PARAMETER Experiment Name: Zm_Drought_P Parameter: Treatment Value: Drought vs. No Drought
  misc_feature: MA Experiment ID: 108529 Result: Up-regulated in Transcription
  misc_feature: MA Experiment 108529 PARAMETER Experiment Name: Zm_Imbibed_Seeds_P Parameter: Age (day) Value: 5 vs. 2
  misc_feature: MA Experiment 108529 PARAMETER Experiment Name: Zm_Imbibed_Seeds_P Parameter: Organism Value: Zea mays
  misc_feature: MA Experiment 108529 PARAMETER Experiment Name: Zm_Imbibed_Seeds_P Parameter: Plant Line Value: 35A19
  misc_feature: MA Experiment 108529 PARAMETER Experiment Name: Zm_Imbibed_Seeds_P Parameter: Tissue Value: Roots vs. Embryo
  misc_feature: MA Experiment ID: 108535 Result: Down-regulated in Transcription
  misc_feature: MA Experiment 108535 PARAMETER Experiment Name: Zm_Meristem_P Parameter: Age (day) Value: 8
  misc_feature: MA Experiment 108535 PARAMETER Experiment Name: Zm_Meristem_P Parameter: Organism Value: Zea mays
  misc_feature: MA Experiment 108535 PARAMETER Experiment Name: Zm_Meristem_P Parameter: Plant Line Value: 35A19
  misc_feature: MA Experiment 108535 PARAMETER Experiment Name: Zm_Meristem_P Parameter: Tissue Value: Root Meristem vs. Above Root Meristem
  misc_feature: MA Experiment ID: 108536 Result: Up-regulated in Transcription
  misc_feature: MA Experiment 108536 PARAMETER Experiment Name: Zm_Meristem_P Parameter: Age (day) Value: 8
  misc_feature: MA Experiment 108536 PARAMETER Experiment Name: Zm_Meristem_P Parameter: Organism Value: Zea mays
  misc_feature: MA Experiment 108536 PARAMETER Experiment Name: Zm_Meristem_P Parameter: Plant Line Value: 35A19
  misc_feature: MA Experiment 108536 PARAMETER Experiment Name: Zm_Meristem_P Parameter: Tissue Value: Shoot Meristem vs. Above Shoot Meristem
  misc_feature: MA Experiment ID: 108543 Result: Up-regulated in Transcription
  misc_feature: MA Experiment ID: 108545 Result: Down-regulated in Transcription
  misc_feature: MA Experiment 108545 PARAMETER Experiment Name: Zm_Imbibed_Seeds_P Parameter: Age (day) Value: 3 vs. 2
  misc_feature: MA Experiment 108545 PARAMETER Experiment Name: Zm_Imbibed_Seeds_P Parameter: Organism Value: Zea mays
  misc_feature: MA Experiment 108545 PARAMETER Experiment Name: Zm_Imbibed_Seeds_P Parameter: Plant Line Value: 35A19
  misc_feature: MA Experiment 108545 PARAMETER Experiment Name: Zm_Imbibed_Seeds_P Parameter: Tissue Value: Aerial vs. Embryo
  misc_feature: MA Experiment ID: 108556 Result: Down-regulated in Transcription
  misc_feature: MA Experiment 108556 PARAMETER Experiment Name: Zm_Drought_P Parameter: Age (day) Value: 9
  misc_feature: MA Experiment 108556 PARAMETER Experiment Name: Zm_Drought_P Parameter: Organism Value: Zea mays
  misc_feature: MA Experiment 108556 PARAMETER Experiment Name: Zm_Drought_P Parameter: Plant Line Value: 35A19
  misc_feature: MA Experiment 108556 PARAMETER Experiment Name: Zm_Drought_P Parameter: Timepoint (hr) Value: 24
  misc_feature: MA Experiment 108556 PARAMETER Experiment Name: Zm_Drought_P Parameter: Tissue Value: Aerial
  misc_feature: MA Experiment 108556 PARAMETER Experiment Name: Zm_Drought_P Parameter: Treatment Value: Drought vs. No Drought
  misc_feature: MA Experiment ID: 108559 Result: Down-regulated in Transcription
  misc_feature: MA Experiment 108559 PARAMETER Experiment Name: Zm_5mM_NO_P Parameter: Age (day) Value: 8
  misc_feature: MA Experiment 108559 PARAMETER Experiment Name: Zm_5mM_NO_P Parameter: Organism Value: Zea mays
  misc_feature: MA Experiment 108559 PARAMETER Experiment Name: Zm_5mM_NO_P Parameter: Plant Line Value: 35A19
  misc_feature: MA Experiment 108559 PARAMETER Experiment Name: Zm_5mM_NO_P Parameter: Timepoint (hr) Value: 12
  misc_feature: MA Experiment 108559 PARAMETER Experiment Name: Zm_5mM_NO_P Parameter: Tissue Value: Aerial
  misc_feature: MA Experiment 108559 PARAMETER Experiment Name: Zm_5mM_NO_P Parameter: Treatment Value: 5mM NO vs. No Treatment
  misc_feature: MA Experiment ID: 108597 Result: Down-regulated in Transcription
  misc_feature: MA Experiment 108597 PARAMETER Experiment Name: Zm_100uM_ABA_P Parameter: Age (day) Value: 9
  misc_feature: MA Experiment 108597 PARAMETER Experiment Name: Zm_100uM_ABA_P Parameter: Organism Value: Zea mays
  misc_feature: MA Experiment 108597 PARAMETER Experiment Name: Zm_100uM_ABA_P Parameter: Plant Line Value: 35A19
  misc_feature: MA Experiment 108597 PARAMETER Experiment Name: Zm_100uM_ABA_P Parameter: Timepoint (hr) Value: 24
  misc_feature: MA Experiment 108597 PARAMETER Experiment Name: Zm_100uM_ABA_P Parameter: Tissue Value: Aerial
  misc_feature: MA Experiment 108597 PARAMETER Experiment Name: Zm_100uM_ABA_P Parameter: Treatment Value: 100uM ABA vs. No Treatment
  misc_feature: MA Experiment ID: 20000477 Result: Down-regulated in Transcription
  misc_feature: MA Experiment 20000477 PARAMETER Experiment Name: Zm_5mM_SA_P Parameter: Age (day) Value: 10
  misc_feature: MA Experiment 20000477 PARAMETER Experiment Name: Zm_5mM_SA_P Parameter: Organism Value: Zea mays
  misc_feature: MA Experiment 20000477 PARAMETER Experiment Name: Zm_5mM_SA_P Parameter: Plant Line Value: 35A19
  misc_feature: MA Experiment 20000477 PARAMETER Experiment Name: Zm_5mM_SA_P Parameter: Timepoint (hr) Value: 48
  misc_feature: MA Experiment 20000477 PARAMETER Experiment Name: Zm_5mM_SA_P Parameter: Tissue Value: Aerial
  misc_feature: MA Experiment 20000477 PARAMETER Experiment Name: Zm_5mM_SA_P Parameter: Treatment Value: 5mM SA vs. No Treatment
  misc_feature: MA Experiment ID: 20000478 Result: Down-regulated in Transcription
  misc_feature: MA Experiment 20000478 PARAMETER Experiment Name: Zm_5mM_SA_P Parameter: Age (day) Value: 11
  misc_feature: MA Experiment 20000478 PARAMETER Experiment Name: Zm_5mM_SA_P Parameter: Organism Value: Zea mays
  misc_feature: MA Experiment 20000478 PARAMETER Experiment Name: Zm_5mM_SA_P Parameter: Plant Line Value: 35A19
  misc_feature: MA Experiment 20000478 PARAMETER Experiment Name: Zm_5mM_SA_P Parameter: Timepoint (hr) Value: 72
  misc_feature: MA Experiment 20000478 PARAMETER Experiment Name: Zm_5mM_SA_P Parameter: Tissue Value: Aerial
  misc_feature: MA Experiment 20000478 PARAMETER Experiment Name: Zm_5mM_SA_P Parameter: Treatment Value: 5mM SA vs. No Treatment
  misc_feature: MA Experiment ID: 20000479 Result: Down-regulated in Transcription
  misc_feature: MA Experiment 20000479 PARAMETER Experiment Name: Zm_Drought_P Parameter: Age (day) Value: 10
  misc_feature: MA Experiment 20000479 PARAMETER Experiment Name: Zm_Drought_P Parameter: Organism Value: Zea mays
  misc_feature: MA Experiment 20000479 PARAMETER Experiment Name: Zm_Drought_P Parameter: Plant Line Value: 35A19
  misc_feature: MA Experiment 20000479 PARAMETER Experiment Name: Zm_Drought_P Parameter: Timepoint (hr) Value: 48
  misc_feature: MA Experiment 20000479 PARAMETER Experiment Name: Zm_Drought_P Parameter: Tissue Value: Aerial
  misc_feature: MA Experiment 20000479 PARAMETER Experiment Name: Zm_Drought_P Parameter: Treatment Value: Drought vs. No Drought
  misc_feature: MA Experiment ID: 20000480 Result: Down-regulated in Transcription
  misc_feature: MA Experiment 20000480 PARAMETER Experiment Name: Zm_Drought_P Parameter: Age (day) Value: 11
  misc_feature: MA Experiment 20000480 PARAMETER Experiment Name: Zm_Drought_P Parameter: Organism Value: Zea mays
  misc_feature: MA Experiment 20000480 PARAMETER Experiment Name: Zm_Drought_P Parameter: Plant Line Value: 35A19
  misc_feature: MA Experiment 20000480 PARAMETER Experiment Name: Zm_Drought_P Parameter: Timepoint (hr) Value: 72
  misc_feature: MA Experiment 20000480 PARAMETER Experiment Name: Zm_Drought_P Parameter: Tissue Value: Aerial
  misc_feature: MA Experiment 20000480 PARAMETER Experiment Name: Zm_Drought_P Parameter: Treatment Value: Drought vs. No Drought
gcacgagaccattacctagaacatcctaatcgaaaaaccattcgattgggcaactcgtcaccgtaccaaccaaaccatcattccagccgcggcgggacacaccgcctcctccgaactaacgcgacgacgacgcacggcggcctcgtccggcaccggcaggagcgcgatggggcagaagcgcgccttgctggtgggcatcaactacctgggcacggacggggagctgaagggatgcctcaacgacgtggcccgcatgcgccgctgcctggtgggccgcttcgggttcgacgaggccgacatccgtgtcctggccgacgccgacccgtccacgccgccgcccactggggccaacatccggctggagctcgagcggctcgtggcgggcgcgcgccccggggacgcgctcttcttccactacagcggccacggcctgcagctccccgccgagactggggaggacgacgacaccgggtacgacgagtgcatcgtgccatgcgacctcaacttgatcaaagaccaagatttcacggatctcgtggccaaggtccctgacggctgccgcttcaccatggtctcggactcgtgccacagcggcggcctgatcgacaagaccaaggagcaaatcgggaacagcaccaagcagaacagaacccagcagcgccgagagcgcgaaatgaagcctcctcctcccgctcccggttccgcactccgcgtctccctcgcgcgaatcgtccgtggcgtgctggagtctctggggtgcatccactgcagtcgttgccgtgtccagcagcagggcaacagcaatagcagcagcatcagcaaccggtcgctgccgctgtcgacgttcatccagatgctcagggacaagaccggaaggcacgacgtcggcgtgggctccatccgcacgacgctgttccaccacttcggcgacgaggcgagccccaaggtcaagaggttcatgaaggccatgctgttaggcaagctccggcacgacggcaaggaagcggaggagcagtcgcgcgttcccagggaggcagaggtggaggagaccctggcgcaggacgcgcacagcgtcgaggaagtgtacgcggggccggctgcggcggcggcggcggccagggtgccgccgcgcaacggcgtcctgatcagcgggtgccagacggacgagacctcggcggacgcgaccacggccgacggcatgtcctacggcgcgctgagcaacgtgatccagaccatcctcgccggggacggcaagaagcgcggcgtggcgctggcggtgacgaaccgagagctggtggtccgggcgcgggagctgctgtccaggcaggggtacacgcagcagcccgggctctactgcagcgacgagcacgccacgctgcccttcatctgctgaagacgaaataaactccgtgtacagtgaatttcaggcttcattagttcattttacgggatgctacgttgtgttgtgtgtgtaacagaattgacactttgtgttgactcgtggtgtgccgcagcctgcgtatgttatggtgttactgttacgttgttacctgatgacgttgacctt

SEQ ID NO: 19107 - protein, 408 aa, Zea mays subsp. mays
  peptide (1)..(408): Ceres Seq. ID no. 12383381
  misc_feature (4)..(408): Pfam Name: Caspase domain Pfam Description: Caspase domain
  misc_feature (4)..(161): Homolog of NCBI NO: 15219340 NR Description: hypothetical protein common family; protein id:
  misc_feature (206)..(408): Homolog of NCBI NO: 15219340 NR Description: hypothetical protein common family; protein id:
  misc_feature (9)..(408): Homolog of NCBI NO: 23343885 NR Description: metacaspase 1 [Lycopersicon esculentum]
  misc_feature (4)..(408): Homolog of NCBI NO: 40644374 NR Description: metacaspase type II [Picea abies]
  misc_feature (4)..(408): Homolog of NCBI NO: 37788557 NR Description: metacaspase 7 [Arabidopsis thaliana]
  misc_feature (4)..(408): Homolog of NCBI NO: 32482818 NR Description: metacaspase 4 [Arabidopsis thaliana]
  misc_feature (4)..(408): Homolog of NCBI NO: 15219342 NR Description: hypothetical protein common family; protein id:
  misc_feature (4)..(408): Homolog of NCBI NO: 4235430 NR Description: latex-abundant protein [Hevea brasiliensis]
  misc_feature (2)..(408): Homolog of NCBI NO: 29367583 NR Description: latex-abundant protein-like protein
  misc_feature (1)..(408): Homolog of NCBI NO: 34908928 NR Description: putative latex-abundant protein
MGQKRALLVGINYLGTDGELKGCLNDVARMRRCLVGRFGFDEADIRVLADADPSTPPPTGANIRLELERLVAGARPGDALFFHYSGHGLQLPAETGEDDDTGYDECIVPCDLNLIKDQDFTDLVAKVPDGCRFTMVSDSCHSGGLIDKTKEQIGNSTKQNRTQQRREREMKPPPPAPGSALRVSLARIVRGVLESLGCIHCSRCRVQQQGNSNSSSISNRSLPLSTFIQMLRDKTGRHDVGVGSIRTTLFHHFGDEASPKVKRFMKAMLLGKLRHDGKEAEEQSRVPREAEVEETLAQDAHSVEEVYAGPAAAAAAARVPPRNGVLISGCQTDETSADATTADGMSYGALSNVIQTILAGDGKKRGVALAVTNRELVVRARELLSRQGYTQQPGLYCSDEHATLPFIC

SEQ ID NO: 19108 - protein, 379 aa, Zea mays subsp. mays
  peptide (1)..(379): Ceres Seq. ID no. 12383382
  misc_feature (1)..(379): Pfam Name: Caspase domain Pfam Description: Caspase domain
  misc_feature (1)..(379): Homolog of NCBI NO: 15219342 NR Description: hypothetical protein common family; protein id:
  misc_feature (1)..(379): Homolog of NCBI NO: 37788557 NR Description: metacaspase 7 [Arabidopsis thaliana]
  misc_feature (1)..(379): Homolog of NCBI NO: 32482818 NR Description: metacaspase 4 [Arabidopsis thaliana]
  misc_feature (1)..(132): Homolog of NCBI NO: 15219340 NR Description: hypothetical protein common family; protein id:
  misc_feature (177)..(379): Homolog of NCBI NO: 15219340 NR Description: hypothetical protein common family; protein id:
  misc_feature (1)..(379): Homolog of NCBI NO: 23343885 NR Description: metacaspase 1 [Lycopersicon esculentum]
  misc_feature (1)..(379): Homolog of NCBI NO: 40644374 NR Description: metacaspase type II [Picea abies]
  misc_feature (1)..(379): Homolog of NCBI NO: 4235430 NR Description: latex-abundant protein [Hevea brasiliensis]
  misc_feature (1)..(379): Homolog of NCBI NO: 29367583 NR Description: latex-abundant protein-like protein
  misc_feature (1)..(379): Homolog of NCBI NO: 34908928 NR Description: putative latex-abundant protein
MRRCLVGRFGFDEADIRVLADADPSTPPPTGANIRLELERLVAGARPGDALFFHYSGHGLQLPAETGEDDDTGYDECIVPCDLNLIKDQDFTDLVAKVPDGCRFTMVSDSCHSGGLIDKTKEQIGNSTKQNRTQQRREREMKPPPPAPGSALRVSLARIVRGVLESLGCIHCSRCRVQQQGNSNSSSISNRSLPLSTFIQMLRDKTGRHDVGVGSIRTTLFHHFGDEASPKVKRFMKAMLLGKLRHDGKEAEEQSRVPREAEVEETLAQDAHSVEEVYAGPAAAAAAARVPPRNGVLISGCQTDETSADATTADGMSYGALSNVIQTILAGDGKKRGVALAVTNRELVVRARELLSRQGYTQQPGLYCSDEHATLPFIC

SEQ ID NO: 19109 - protein, 274 aa, Zea mays subsp. mays
  peptide (1)..(274): Ceres Seq. ID no. 12383383
  misc_feature (1)..(274): Pfam Name: Caspase domain Pfam Description: Caspase domain
  misc_feature (1)..(274): Homolog of NCBI NO: 15219342 NR Description: hypothetical protein common family; protein id:
  misc_feature (1)..(274): Homolog of NCBI NO: 37788557 NR Description: metacaspase 7 [Arabidopsis thaliana]
  misc_feature (1)..(274): Homolog of NCBI NO: 32482818 NR Description: metacaspase 4 [Arabidopsis thaliana]
  misc_feature (1)..(27): Homolog of NCBI NO: 15219340 NR Description: hypothetical protein common family; protein id:
  misc_feature (72)..(274): Homolog of NCBI NO: 15219340 NR Description: hypothetical protein common family; protein id:
  misc_feature (1)..(274): Homolog of NCBI NO: 23343885 NR Description: metacaspase 1 [Lycopersicon esculentum]
  misc_feature (1)..(274): Homolog of NCBI NO: 40644374 NR Description: metacaspase type II [Picea abies]
  misc_feature (1)..(274): Homolog of NCBI NO: 4235430 NR Description: latex-abundant protein [Hevea brasiliensis]
  misc_feature (1)..(274): Homolog of NCBI NO: 29367583 NR Description: latex-abundant protein-like protein
  misc_feature (1)..(274): Homolog of NCBI NO: 34908928 NR Description: putative latex-abundant protein
MVSDSCHSGGLIDKTKEQIGNSTKQNRTQQRREREMKPPPPAPGSALRVSLARIVRGVLESLGCIHCSRCRVQQQGNSNSSSISNRSLPLSTFIQMLRDKTGRHDVGVGSIRTTLFHHFGDEASPKVKRFMKAMLLGKLRHDGKEAEEQSRVPREAEVEETLAQDAHSVEEVYAGPAAAAAAARVPPRNGVLISGCQTDETSADATTADGMSYGALSNVIQTILAGDGKKRGVALAVTNRELVVRARELLSRQGYTQQPGLYCSDEHATLPFIC

SEQ ID NO: 19110 - DNA, 842 bp, Zea mays subsp. mays
  misc_feature (1)..(842): Ceres Seq. ID no. 12378544
  misc_feature: MA Experiment ID: 20000492 Result: Down-regulated in Transcription
  misc_feature: MA Experiment 20000492 PARAMETER Experiment Name: Zm_Hybrid_Seed_Dev_P Parameter: DAP Value: 12
  misc_feature: MA Experiment 20000492 PARAMETER Experiment Name: Zm_Hybrid_Seed_Dev_P Parameter: Organism Value: Zea mays
  misc_feature: MA Experiment 20000492 PARAMETER Experiment Name: Zm_Hybrid_Seed_Dev_P Parameter: Plant Line Value: 35A19
  misc_feature: MA Experiment 20000492 PARAMETER Experiment Name: Zm_Hybrid_Seed_Dev_P Parameter: Tissue Value: Fert Kernel vs. Unfert Floret
tacactagatataggaggcggtgcagagtccttaagatggcttgtttggccaatgatagatgataagtcaaaggtgactctagctgtcgaatgccctcgtgttactgtcaacccacagccatcgctgttcgacctctccggatattccaaagtcccaatagaagcattgtcaagcgtaccactggaccattctgtggttgaggacattgatcccaaaacatgggctgtttctgctgctcctccaagagctgttgctccagcgaatccaaatgttccaagtgctccgcctgaaataccgatggcagaaaggttcaggctggcctatgtggagagggaagcgaggctggcacccaagagggccaagcgggaaaggcagcggcgtcggcgcgctgagagggactacatgatggttgacatcgacgcaaggtcggtcgcacttgctgctcaagcaagcaggaacctgcgcaagagctgattgtttcttgtctacgctatttgtggagactcgagagtagagaatcatgaggcaagaaatgctgttcaatccttctactttcaaggcaaagatagcatacatatatggacncagtattgtatagttgtattggcagtagcggtagcgtttacactgccatgtactagtaatagaaaaaaatctgagtgggaataacagggaaggcgtgccttatcaaatcacaaatgggttgccacgaggatttgtgaacatgctcgtccagatttctttgaatctggatggtgcgattatgtgaggttcctcacgcaatttgttaaatctgaacaagattcgtgtgaactgttgtatacataattttttttcttgc

SEQ ID NO: 19111 - protein, 157 aa, Zea mays subsp. mays
  peptide (1)..(157): Ceres Seq. ID no. 12378545
  misc_feature (1)..(157): Homolog of NCBI NO: 30687441 NR Description: expressed protein [Arabidopsis thaliana]
  misc_feature (1)..(157): Homolog of NCBI NO: 7485340 NR Description: hypothetical protein F10M23.320 - Arabidopsis
TLDIGGGAESLRWLVWPMIDDKSKVTLAVECPRVTVNPQPSLFDLSGYSKVPIEALSSVPLDHSVVEDIDPKTWAVSAAPPRAVAPANPNVPSAPPEIPMAERFRLAYVEREARLAPKRAKRERQRRRRAERDYMMVDIDARSVALAAQASRNLRKS

SEQ ID NO: 19112 - protein, 140 aa, Zea mays subsp. mays
  peptide (1)..(140): Ceres Seq. ID no. 12378546
  misc_feature (1)..(140): Homolog of NCBI NO: 30687441 NR Description: expressed protein [Arabidopsis thaliana]
  misc_feature (1)..(140): Homolog of NCBI NO: 7485340 NR Description: hypothetical protein F10M23.320 - Arabidopsis
MIDDKSKVTLAVECPRVTVNPQPSLFDLSGYSKVPIEALSSVPLDHSVVEDIDPKTWAVSAAPPRAVAPANPNVPSAPPEIPMAERFRLAYVEREARLAPKRAKRERQRRRRAERDYMMVDIDARSVALAAQASRNLRKS

SEQ ID NO: 19113 - DNA, 1883 bp, Zea mays subsp. mays
  misc_feature (1)..(1883): Ceres Seq. ID no. 12359147
  misc_feature: MA Experiment ID: 108523 Result: Down-regulated in Transcription
  misc_feature: MA Experiment 108523 PARAMETER Experiment Name: Zm_42deg_Heat_P Parameter: Age (day) Value: 8
  misc_feature: MA Experiment 108523 PARAMETER Experiment Name: Zm_42deg_Heat_P Parameter: Organism Value: Zea mays
  misc_feature: MA Experiment 108523 PARAMETER Experiment Name: Zm_42deg_Heat_P Parameter: Plant Line Value: 35A19
  misc_feature: MA Experiment 108523 PARAMETER Experiment Name: Zm_42deg_Heat_P Parameter: Temperature (deg C) Value: 42 vs. 22
  misc_feature: MA Experiment 108523 PARAMETER Experiment Name: Zm_42deg_Heat_P Parameter: Timepoint (hr) Value: 6
  misc_feature: MA Experiment 108523 PARAMETER Experiment Name: Zm_42deg_Heat_P Parameter: Tissue Value: Aerial
  misc_feature: MA Experiment ID: 108535 Result: Down-regulated in Transcription
  misc_feature: MA Experiment 108535 PARAMETER Experiment Name: Zm_Meristem_P Parameter: Age (day) Value: 8
  misc_feature: MA Experiment 108535 PARAMETER Experiment Name: Zm_Meristem_P Parameter: Organism Value: Zea mays
  misc_feature: MA Experiment 108535 PARAMETER Experiment Name: Zm_Meristem_P Parameter: Plant Line Value: 35A19
  misc_feature: MA Experiment 108535 PARAMETER Experiment Name: Zm_Meristem_P Parameter: Tissue Value: Root Meristem vs. Above Root Meristem
  misc_feature: MA Experiment ID: 20000477 Result: Down-regulated in Transcription
  misc_feature: MA Experiment 20000477 PARAMETER Experiment Name: Zm_5mM_SA_P Parameter: Age (day) Value: 10
  misc_feature: MA Experiment 20000477 PARAMETER Experiment Name: Zm_5mM_SA_P Parameter: Organism Value: Zea mays
  misc_feature: MA Experiment 20000477 PARAMETER Experiment Name: Zm_5mM_SA_P Parameter: Plant Line Value: 35A19
  misc_feature: MA Experiment 20000477 PARAMETER Experiment Name: Zm_5mM_SA_P Parameter: Timepoint (hr) Value: 48
  misc_feature: MA Experiment 20000477 PARAMETER Experiment Name: Zm_5mM_SA_P Parameter: Tissue Value: Aerial
  misc_feature: MA Experiment 20000477 PARAMETER Experiment Name: Zm_5mM_SA_P Parameter: Treatment Value: 5mM SA vs. No Treatment
  misc_feature: MA Experiment ID: 20000478 Result: Down-regulated in Transcription
  misc_feature: MA Experiment 20000478 PARAMETER Experiment Name: Zm_5mM_SA_P Parameter: Age (day) Value: 11
  misc_feature: MA Experiment 20000478 PARAMETER Experiment Name: Zm_5mM_SA_P Parameter: Organism Value: Zea mays
  misc_feature: MA Experiment 20000478 PARAMETER Experiment Name: Zm_5mM_SA_P Parameter: Plant Line Value: 35A19
  misc_feature: MA Experiment 20000478 PARAMETER Experiment Name: Zm_5mM_SA_P Parameter: Timepoint (hr) Value: 72
  misc_feature: MA Experiment 20000478 PARAMETER Experiment Name: Zm_5mM_SA_P Parameter: Tissue Value: Aerial
  misc_feature: MA Experiment 20000478 PARAMETER Experiment Name: Zm_5mM_SA_P Parameter: Treatment Value: 5mM SA vs. No Treatment
  misc_feature: MA Experiment ID: 20000479 Result: Down-regulated in Transcription
  misc_feature: MA Experiment 20000479 PARAMETER Experiment Name: Zm_Drought_P Parameter: Age (day) Value: 10
  misc_feature: MA Experiment 20000479 PARAMETER Experiment Name: Zm_Drought_P Parameter: Organism Value: Zea mays
  misc_feature: MA Experiment 20000479 PARAMETER Experiment Name: Zm_Drought_P Parameter: Plant Line Value: 35A19
  misc_feature: MA Experiment 20000479 PARAMETER Experiment Name: Zm_Drought_P Parameter: Timepoint (hr) Value: 48
  misc_feature: MA Experiment 20000479 PARAMETER Experiment Name: Zm_Drought_P Parameter: Tissue Value: Aerial
  misc_feature: MA Experiment 20000479 PARAMETER Experiment Name: Zm_Drought_P Parameter: Treatment Value: Drought vs. No Drought
  misc_feature: MA Experiment ID: 20000480 Result: Down-regulated in Transcription
  misc_feature: MA Experiment 20000480 PARAMETER Experiment Name: Zm_Drought_P Parameter: Age (day) Value: 11
  misc_feature: MA Experiment 20000480 PARAMETER Experiment Name: Zm_Drought_P Parameter: Organism Value: Zea mays
  misc_feature: MA Experiment 20000480 PARAMETER Experiment Name: Zm_Drought_P Parameter: Plant Line Value: 35A19
  misc_feature: MA Experiment 20000480 PARAMETER Experiment Name: Zm_Drought_P Parameter: Timepoint (hr) Value: 72
  misc_feature: MA Experiment 20000480 PARAMETER Experiment Name: Zm_Drought_P Parameter: Tissue Value: Aerial
  misc_feature: MA Experiment 20000480 PARAMETER Experiment Name: Zm_Drought_P Parameter: Treatment Value: Drought vs. No Drought
  misc_feature: MA Experiment ID: 20000492 Result: Up-regulated in Transcription
  misc_feature: MA Experiment 20000492 PARAMETER Experiment Name: Zm_Hybrid_Seed_Dev_P Parameter: DAP Value: 12
  misc_feature: MA Experiment 20000492 PARAMETER Experiment Name: Zm_Hybrid_Seed_Dev_P Parameter: Organism Value: Zea mays
  misc_feature: MA Experiment 20000492 PARAMETER Experiment Name: Zm_Hybrid_Seed_Dev_P Parameter: Plant Line Value: 35A19
  misc_feature: MA Experiment 20000492 PARAMETER Experiment Name: Zm_Hybrid_Seed_Dev_P Parameter: Tissue Value: Fert Kernel vs. Unfert Floret
aaaaaggagctagcactagccaggaaacacacagagagacgaaataagcagcgaggcaatgggcaacctgcttcaccaggaaatacgacgagcacgagcacgagataccaatcaccacggacccgccgcggcggacgtcgatgccggtgtaccggccgccccggccccgcgatgacaaggcgcaggaggtgccgctatactcgggctcggaccgccggccgtcctaccgtccgccgcggcttccggtcttcccgtcgggcccgggatcgacgggccggcggcggccgcccaccggccagacgggcacggtcctggaccggcacacggtggacgtgcggacgctgttccacctggagcggaagctggggagcgggcagttcggcaccacgtacctgtgcacggagcgcgcgacggggaagaagtacgcgtgcaagtcggtgtccaagcgcaagctggtgcggcgcgccgacatcgcggacatgcgccgggagatcaccatcctgcagcacctcagcggccagcccaacgtggcggagttcaagggcgcgttcgaggaccgcgacgacgtgcacgtcgtcatggagctctgctccggcggcgagctcttcgaccgcatcaccgccaaggggagctactccgagcgccaggccgccgccgtgtgccgcgacgtcctcaccgtcgtcaacgtctgccacttcatgggggtcatgcaccgcgacctcaagcccgagaacttcctgctcgccagccccgccgacgacgcgccgctcaaggccatcgacttcggcctgtccgtcttcatcgaagaaggcaaagtttacaaggacgtggtggggagcgcgtactacgtggcgcccgaggtgttgcgccggaactacggcagggagatcgacgtctggagtgctggcgtgatcctatacatccttctatgcgggtcgccgcctttctgggaagaaacgcagaaaggcatatttgacgcaatattggccgacgagctcgatctggtctcctccccgtggccctccatatctgaaagcgcgaaggatctcattagaaaaatgctgaacaaggaccctcagaggcgcattacggcttcacaggccctagaacatccatggctcaaaggtggtgcacctgacaggcctatcgacagcgcggtcctgtcaagaatgaagcagttcaaggcgatgaacaagctaaagcaacttgcactgaaggtaatcgcagagaacctaacagaggacgagatcaaggggctgaagcagatgttcaacaacatggatacagacaggagcggcacgatcacggtcgaggaactcaaggacgggctggcgaagctcgggtccaagattagcgaagcggaggttcagaagcttatggaagcagttgacgtggacaagagtggcagcattgactacaccgagttcctcactgccatgatgaacaggcataaactggagaaggaggaggatttgttccttgcttttcaacacttcgacaaagacgatagcgggtacataacaagagacgaactggaacaagccatggcggagtatggggtgggtgatgaagcaagcattaaggaagtgctggacgaagttgataaagacaaggatgggagaatcgactacgaagagtttgtagaaatgatgaggaagggaagttatacctgaggaagctctgttctcatggtgggagaggttgtgtatatatgtttcagcaaatgtgtcaagtacaagcaacgaagcaagtttaacttagaacaagttgcttctgcagctatggtccgaggcaagcatgtacagctatttatttattgaccgaatatgcaacgagagagaaaatgtccagtttacttgaaagaaaagttcagagttcgtgct

SEQ ID NO: 19114 - protein, 510 aa, Zea mays subsp. mays
  peptide (1)..(510): Ceres Seq. ID no. 12359148
  misc_feature (69)..(327): Pfam Name: Protein kinase domain Pfam Description: Protein kinase domain
  misc_feature (50)..(508): Homolog of NCBI NO: 10568116 NR Description: calcium-dependent protein kinase [Solanum
  misc_feature (2)..(508): Homolog of NCBI NO: 7428009 NR Description: calcium-dependent protein kinase (EC 2.7.1.-) 1 -
  misc_feature (7)..(508): Homolog of NCBI NO: 15231140 NR Description: calmodulin-domain protein kinase CDPK isoform 9
  misc_feature (49)..(507): Homolog of NCBI NO: 1345719 NR Description: Calcium-dependent protein kinase 2 (CDPK 2)
  misc_feature (1)..(508): Homolog of NCBI NO: 19171502 NR Description: calcium-dependent protein kinase [Lycopersicon
  misc_feature (14)..(507): Homolog of NCBI NO: 1705734 NR Description: Calcium-dependent protein kinase, isoform 2 (CDPK
  misc_feature (14)..(507): Homolog of NCBI NO: 23616997 NR Description: CDP2_ORYSA Calcium-dependent protein kinase
  misc_feature (13)..(507): Homolog of NCBI NO: 7428011 NR Description: calcium-dependent protein kinase (EC 2.7.1.-) 9 -
MPVYRPPRPRDDKAQEVPLYSGSDRRPSYRPPRLPVFPSGPGSTGRRRPPTGQTGTVLDRHTVDVRTLFHLERKLGSGQFGTTYLCTERATGKKYACKSVSKRKLVRRADIADMRREITILQHLSGQPNVAEFKGAFEDRDDVHVVMELCSGGELFDRITAKGSYSERQAAAVCRDVLTVVNVCHFMGVMHRDLKPENFLLASPADDAPLKAIDFGLSVFIEEGKVYKDVVGSAYYVAPEVLRRNYGREIDVWSAGVILYILLCGSPPFWEETQKGIFDAILADELDLVSSPWPSISESAKDLIRKMLNKDPQRRITASQALEHPWLKGGAPDRPIDSAVLSRMKQFKAMNKLKQLALKVIAENLTEDEIKGLKQMFNNMDTDRSGTITVEELKDGLAKLGSKISEAEVQKLMEAVDVDKSGSIDYTEFLTAMMNRHKLEKEEDLFLAFQHFDKDDSGYITRDELEQAMAEYGVGDEASIKEVLDEVDKDKDGRIDYEEFVEMMRKGSYT

SEQ ID NO: 19115 - protein, 397 aa, Zea mays subsp. mays
  peptide (1)..(397): Ceres Seq. ID no. 12359149
  misc_feature (1)..(214): Pfam Name: Protein kinase domain Pfam Description: Protein kinase domain
  misc_feature (1)..(395): Homolog of NCBI NO: 10568116 NR Description: calcium-dependent protein kinase [Solanum
  misc_feature (1)..(395): Homolog of NCBI NO: 7428009 NR Description: calcium-dependent protein kinase (EC 2.7.1.-) 1 -
  misc_feature (1)..(395): Homolog of NCBI NO: 15231140 NR Description: calmodulin-domain protein kinase CDPK isoform 9
  misc_feature (1)..(394): Homolog of NCBI NO: 1345719 NR Description: Calcium-dependent protein kinase 2 (CDPK 2)
  misc_feature (1)..(395): Homolog of NCBI NO: 19171502 NR Description: calcium-dependent protein kinase [Lycopersicon
  misc_feature (1)..(394): Homolog of NCBI NO: 1705734 NR Description: Calcium-dependent protein kinase, isoform 2 (CDPK
  misc_feature (1)..(394): Homolog of NCBI NO: 23616997 NR Description: CDP2_ORYSA Calcium-dependent protein kinase
  misc_feature (1)..(394): Homolog of NCBI NO: 7428011 NR Description: calcium-dependent protein kinase (EC 2.7.1.-) 9 -
MRREITILQHLSGQPNVAEFKGAFEDRDDVHVVMELCSGGELFDRITAKGSYSERQAAAVCRDVLTVVNVCHFMGVMHRDLKPENFLLASPADDAPLKAIDFGLSVFIEEGKVYKDVVGSAYYVAPEVLRRNYGREIDVWSAGVILYILLCGSPPFWEETQKGIFDAILADELDLVSSPWPSISESAKDLIRKMLNKDPQRRITASQALEHPWLKGGAPDRPIDSAVLSRMKQFKAMNKLKQLALKVIAENLTEDEIKGLKQMFNNMDTDRSGTITVEELKDGLAKLGSKISEAEVQKLMEAVDVDKSGSIDYTEFLTAMMNRHKLEKEEDLFLAFQHFDKDDSGYITRDELEQAMAEYGVGDEASIKEVLDEVDKDKDGRIDYEEFVEMMRKGSYT

SEQ ID NO: 19116 - protein, 364 aa, Zea mays subsp. mays
  peptide (1)..(364): Ceres Seq. ID no. 12359150
  misc_feature (1)..(181): Pfam Name: Protein kinase domain Pfam Description: Protein kinase domain
  misc_feature (1)..(362): Homolog of NCBI NO: 10568116 NR Description: calcium-dependent protein kinase [Solanum
  misc_feature (1)..(362): Homolog of NCBI NO: 7428009 NR Description: calcium-dependent protein kinase (EC 2.7.1.-) 1 -
  misc_feature (1)..(362): Homolog of NCBI NO: 15231140 NR Description: calmodulin-domain protein kinase CDPK isoform 9
  misc_feature (1)..(361): Homolog of NCBI NO: 1345719 NR Description: Calcium-dependent protein kinase 2 (CDPK 2)
  misc_feature (1)..(362): Homolog of NCBI NO: 19171502 NR Description: calcium-dependent protein kinase [Lycopersicon
  misc_feature (1)..(361): Homolog of NCBI NO: 1705734 NR Description: Calcium-dependent protein kinase, isoform 2 (CDPK
  misc_feature (1)..(361): Homolog of NCBI NO: 23616997 NR Description: CDP2_ORYSA Calcium-dependent protein kinase
  misc_feature (1)..(361): Homolog of NCBI NO: 7428011 NR Description: calcium-dependent protein kinase (EC 2.7.1.-) 9 -
MELCSGGELFDRITAKGSYSERQAAAVCRDVLTVVNVCHFMGVMHRDLKPENFLLASPADDAPLKAIDFGLSVFIEEGKVYKDVVGSAYYVAPEVLRRNYGREIDVWSAGVILYILLCGSPPFWEETQKGIFDAILADELDLVSSPWPSISESAKDLIRKMLNKDPQRRITASQALEHPWLKGGAPDRPIDSAVLSRMKQFKAMNKLKQLALKVIAENLTEDEIKGLKQMFNNMDTDRSGTITVEELKDGLAKLGSKISEAEVQKLMEAVDVDKSGSIDYTEFLTAMMNRHKLEKEEDLFLAFQHFDKDDSGYITRDELEQAMAEYGVGDEASIKEVLDEVDKDKDGRIDYEEFVEMMRKGSYT

SEQ ID NO: 19117 - DNA, 474 bp, Zea mays subsp. mays
  misc_feature (1)..(474): Ceres Seq. ID no. 4615167
  misc_feature: MA Experiment ID: 20000492 Result: Up-regulated in Transcription
  misc_feature: MA Experiment 20000492 PARAMETER Experiment Name: Zm_Hybrid_Seed_Dev_P Parameter: DAP Value: 12
  misc_feature: MA Experiment 20000492 PARAMETER Experiment Name: Zm_Hybrid_Seed_Dev_P Parameter: Organism Value: Zea mays
  misc_feature: MA Experiment 20000492 PARAMETER Experiment Name: Zm_Hybrid_Seed_Dev_P Parameter: Plant Line Value: 35A19
  misc_feature: MA Experiment 20000492 PARAMETER Experiment Name: Zm_Hybrid_Seed_Dev_P Parameter: Tissue Value: Fert Kernel vs. Unfert Floret
agcagagtccaggtgcgtcmgcaggagtcaggactctcaactccggcgaagggagcagaaccgtttgtggcagttgggcggcgtcggcatggacgaggctacgaagaaggtggaggctacggtgctggagatcccgcgaggtctgatatggagtccgtaacggagaacaaggaggaggcgaaggcggcggaggagggcgacgctggcagggagagcaaggacaaggaacggaaggaagatgaggaggaggatgaaggtaagggtggcgggaagaganaktacggcgaccaaggggaccttatcctgtgccgcctgtcgagcaagaggagggtgactctgtcggagttcaagggcaggtcgctggtgtccatccgagagttctacgtgaaggacggcaaggagatgccctccgccaaaggtattagtatgacaatggagcagtgggaagcattttcaatgctgcacctgcgatag

SEQ ID NO: 19118 - protein, 157 aa, Zea mays subsp. mays
  peptide (1)..(157): Ceres Seq. ID no. 4615168
  misc_feature (74)..(151): Pfam Name: Transcriptional Coactivator p15 (PC4) Pfam Description: Transcriptional Coactivator p15 (PC4)
  misc_feature (106)..(154): Homolog of NCBI NO: 19114954 NR Description: putative transcriptional activator.
  misc_feature (70)..(148): Homolog of NCBI NO: 15242363 NR Description: transcriptional co-activator-like protein
  misc_feature (62)..(149): Homolog of NCBI NO: 17137156 NR Description: Single stranded-binding protein c31A CG8396-PA
  misc_feature (55)..(148): Homolog of NCBI NO: 17542398 NR Description: Transcriptional Coactivator p15 (PC4) (14.4 kD)
  misc_feature (48)..(151): Homolog of NCBI NO: 16610191 NR Description: PBF68 protein [Nicotiana tabacum]
  misc_feature (92)..(154): Homolog of NCBI NO: 40739125 NR Description: hypothetical protein AN5806.2 [Aspergillus
  misc_feature (73)..(148): Homolog of NCBI NO: 15242365 NR Description: putative transcriptional co-activator (KIWI)
  misc_feature (67)..(151): Homolog of NCBI NO: 15236980 NR Description: putative protein
  misc_feature (70)..(151): Homolog of NCBI NO: 13699910 NR Description: putative transcriptional coactivator [Brassica
  misc_feature (50)..(151): Homolog of NCBI NO: 34910378 NR Description: P0684B02.23 [Oryza sativa (japonica
  misc_feature (7)..(7): Xaa is any aa, unknown or other
  misc_feature (93)..(93): Xaa is any aa, unknown or other
SRVQVRXQESGLSTPAKGAEPFVAVGRRRHGRGYEEGGGYGAGDPARSDMESVTENKEEAKAAEEGDAGRESKDKERKEDEEEDEGKGGGKRXYGDQGDLILCRLSSKRRVTLSEFKGRSLVSIREFYVKDGKEMPSAKGISMTMEQWEAFSMLHLR

SEQ ID NO: 19119 - protein, 108 aa, Zea mays subsp. mays
  peptide (1)..(108): Ceres Seq. ID no. 4615169
  misc_feature (25)..(102): Pfam Name: Transcriptional Coactivator p15 (PC4) Pfam Description: Transcriptional Coactivator p15 (PC4)
  misc_feature (57)..(105): Homolog of NCBI NO: 19114954 NR Description: putative transcriptional activator.
  misc_feature (21)..(99): Homolog of NCBI NO: 15242363 NR Description: transcriptional co-activator-like protein
  misc_feature (13)..(100): Homolog of NCBI NO: 17137156 NR Description: Single stranded-binding protein c31A CG8396-PA
  misc_feature (6)..(99): Homolog of NCBI NO: 17542398 NR Description: Transcriptional Coactivator p15 (PC4) (14.4 kD)
  misc_feature (1)..(102): Homolog of NCBI NO: 16610191 NR Description: PBF68 protein [Nicotiana tabacum]
  misc_feature (43)..(105): Homolog of NCBI NO: 40739125 NR Description: hypothetical protein AN5806.2 [Aspergillus
  misc_feature (24)..(99): Homolog of NCBI NO: 15242365 NR Description: putative transcriptional co-activator (KIWI)
  misc_feature (18)..(102): Homolog of NCBI NO: 15236980 NR Description: putative protein
  misc_feature (21)..(102): Homolog of NCBI NO: 13699910 NR Description: putative transcriptional coactivator [Brassica
  misc_feature (1)..(102): Homolog of NCBI NO: 34910378 NR Description: P0684B02.23 [Oryza sativa (japonica
  misc_feature (44)..(44): Xaa is any aa, unknown or other
MESVTENKEEAKAAEEGDAGRESKDKERKEDEEEDEGKGGGKRXYGDQGDLILCRLSSKRRVTLSEFKGRSLVSIREFYVKDGKEMPSAKGISMTMEQWEAFSMLHLR

SEQ ID NO: 19120 - DNA, 2200 bp, Zea mays subsp. mays; identical to SEQ ID NO: 18408
  misc_feature (1)..(2200): Ceres Seq. ID no. 12362570
  misc_feature: MA Experiment ID: 108523 Result: Up-regulated in Transcription
  misc_feature: MA Experiment 108523 PARAMETER Experiment Name: Zm_42deg_Heat_P Parameter: Age (day) Value: 8
  misc_feature: MA Experiment 108523 PARAMETER Experiment Name: Zm_42deg_Heat_P Parameter: Organism Value: Zea mays
  misc_feature: MA Experiment 108523 PARAMETER Experiment Name: Zm_42deg_Heat_P Parameter: Plant Line Value: 35A19
  misc_feature: MA Experiment 108523 PARAMETER Experiment Name: Zm_42deg_Heat_P Parameter: Temperature (deg C) Value: 42 vs. 22
  misc_feature: MA Experiment 108523 PARAMETER Experiment Name: Zm_42deg_Heat_P Parameter: Timepoint (hr) Value: 6
  misc_feature: MA Experiment 108523 PARAMETER Experiment Name: Zm_42deg_Heat_P Parameter: Tissue Value: Aerial

SEQ ID NO: 19121 - protein, 580 aa, Zea mays subsp. mays; identical to SEQ ID NO: 18409
  peptide (1)..(580): Ceres Seq. ID no. 12362571
  misc_feature (21)..(540): Pfam Name: Eukaryotic translation initiation factor 3 Pfam Description: Eukaryotic translation initiation factor 3
  misc_feature (21)..(540): Pfam Name: Eukaryotic translation initiation factor 3 Pfam Description: Eukaryotic translation initiation factor 3
  misc_feature (3)..(541): Homolog of NCBI NO: 26337171 NR Description: unnamed protein product [Mus musculus]
  misc_feature (3)..(542): Homolog of NCBI NO: 27882463 NR Description: Similar to eukaryotic translation initiation
  misc_feature (3)..(541): Homolog of NCBI NO: 34866902 NR Description: similar to eukaryotic translation initiation
  misc_feature (3)..(541): Homolog of NCBI NO: 4503523 NR Description: eukaryotic translation initiation factor 3
  misc_feature (1)..(574): Homolog of NCBI NO: 31207329 NR Description: ENSANGP00000015368 [Anopheles gambiae]
  misc_feature (3)..(541): Homolog of NCBI NO: 26337171 NR Description: unnamed protein product [Mus musculus]
  misc_feature (3)..(541): Homolog of NCBI NO: 34866902 NR Description: similar to eukaryotic translation initiation
  misc_feature (1)..(574): Homolog of NCBI NO: 31207329 NR Description: ENSANGP00000015368 [Anopheles gambiae]
  misc_feature (21)..(563): Homolog of NCBI NO: 15233469 NR Description: translation initiation factor eIF3 - like protein
  misc_feature (21)..(563): Homolog of NCBI NO: 17528988 NR Description: putative translation initiation factor eIF3
  misc_feature (3)..(554): Homolog of NCBI NO: 15241470 NR Description: eukaryotic translation initiation factor 3
  misc_feature (157)..(563): Homolog of NCBI NO: 12407755 NR Description: initiation factor 3d [Arabidopsis thaliana]
  misc_feature (3)..(548): Homolog of NCBI NO: 31418925 NR Description: Unknown (protein for MGC:64097) [Danio rerio]
  misc_feature (3)..(541): Homolog of NCBI NO: 4503523 NR Description: eukaryotic translation initiation factor 3
  misc_feature (3)..(542): Homolog of NCBI NO: 27882463 NR Description: Similar to eukaryotic translation initiation
  misc_feature (3)..(548): Homolog of NCBI NO: 31418925 NR Description: Unknown (protein for MGC:64097) [Danio rerio]
  misc_feature (157)..(563): Homolog of NCBI NO: 12407755 NR Description: initiation factor 3d [Arabidopsis thaliana]
  misc_feature (3)..(554): Homolog of NCBI NO: 15241470 NR Description: eukaryotic translation initiation factor 3
  misc_feature (21)..(563): Homolog of NCBI NO: 17528988 NR Description: putative translation initiation factor eIF3
  misc_feature (21)..(563): Homolog of NCBI NO: 15233469 NR Description: translation initiation factor eIF3 - like protein

SEQ ID NO: 19122 - protein, 321 aa, Zea mays subsp. mays; identical to SEQ ID NO: 18410
  peptide (1)..(321): Ceres Seq. ID no. 12362572
  misc_feature (1)..(281): Pfam Name: Eukaryotic translation initiation factor 3 Pfam Description: Eukaryotic translation initiation factor 3
  misc_feature (1)..(281): Pfam Name: Eukaryotic translation initiation factor 3 Pfam Description: Eukaryotic translation initiation factor 3
  misc_feature (1)..(282): Homolog of NCBI NO: 26337171 NR Description: unnamed protein product [Mus musculus]
  misc_feature (1)..(283): Homolog of NCBI NO: 27882463 NR Description: Similar to eukaryotic translation initiation
  misc_feature (1)..(282): Homolog of NCBI NO: 34866902 NR Description: similar to eukaryotic translation initiation
  misc_feature (1)..(282): Homolog of NCBI NO: 4503523 NR Description: eukaryotic translation initiation factor 3
  misc_feature (1)..(315): Homolog of NCBI NO: 31207329 NR Description: ENSANGP00000015368 [Anopheles gambiae]
  misc_feature (1)..(282): Homolog of NCBI NO: 26337171 NR Description: unnamed protein product [Mus musculus]
  misc_feature (1)..(282): Homolog of NCBI NO: 34866902 NR Description: similar to eukaryotic translation initiation
  misc_feature (1)..(315): Homolog of NCBI NO: 31207329 NR Description: ENSANGP00000015368 [Anopheles gambiae]
  misc_feature (1)..(304): Homolog of NCBI NO: 15233469 NR Description: translation initiation factor eIF3 - like protein
  misc_feature (1)..(304): Homolog of NCBI NO: 17528988 NR Description: putative translation initiation factor eIF3
  misc_feature (1)..(295): Homolog of NCBI NO: 15241470 NR Description: eukaryotic translation initiation factor 3
  misc_feature (1)..(304): Homolog of NCBI NO: 12407755 NR Description: initiation factor 3d [Arabidopsis thaliana]
  misc_feature (1)..(289): Homolog of NCBI NO: 31418925 NR Description: Unknown (protein for MGC:64097) [Danio rerio]
  misc_feature (1)..(282): Homolog of NCBI NO: 4503523 NR Description: eukaryotic translation initiation factor 3
  misc_feature (1)..(283): Homolog of NCBI NO: 27882463 NR Description: Similar to eukaryotic translation initiation
  misc_feature (1)..(289): Homolog of NCBI NO: 31418925 NR Description: Unknown (protein for MGC:64097) [Danio rerio]
  misc_feature (1)..(304): Homolog of NCBI NO: 12407755 NR Description: initiation factor 3d [Arabidopsis thaliana]
  misc_feature (1)..(295): Homolog of NCBI NO: 15241470 NR Description: eukaryotic translation initiation factor 3
  misc_feature (1)..(304): Homolog of NCBI NO: 17528988 NR Description: putative translation initiation factor eIF3
  misc_feature (1)..(304): Homolog of NCBI NO: 15233469 NR Description: translation initiation factor eIF3 - like protein

SEQ ID NO: 19123 - DNA, 1073 bp, Zea mays subsp. mays; identical to SEQ ID NO: 16463
  misc_feature (1)..(1073): Ceres Seq. ID no. 12405278
  misc_feature: MA Experiment ID: 108522 Result: Up-regulated in Transcription
  misc_feature: MA Experiment 108522 PARAMETER Experiment Name: Zm_42deg_Heat_P Parameter: Age (day) Value: 8
  misc_feature: MA Experiment 108522 PARAMETER Experiment Name: Zm_42deg_Heat_P Parameter: Organism Value: Zea mays
  misc_feature: MA Experiment 108522 PARAMETER Experiment Name: Zm_42deg_Heat_P Parameter: Plant Line Value: 35A19
  misc_feature: MA Experiment 108522 PARAMETER Experiment Name: Zm_42deg_Heat_P Parameter: Temperature (deg C) Value: 42 vs. 22
  misc_feature: MA Experiment 108522 PARAMETER Experiment Name: Zm_42deg_Heat_P Parameter: Timepoint (hr) Value: 1
  misc_feature: MA Experiment 108522 PARAMETER Experiment Name: Zm_42deg_Heat_P Parameter: Tissue Value: Aerial

SEQ ID NO: 19124 - protein, 312 aa, Zea mays subsp. mays; identical to SEQ ID NO: 16464
  peptide (1)..(312): Ceres Seq. ID no. 12405279
  misc_feature (58)..(214): Homolog of NCBI NO: 15232128 NR Description: unknown protein; protein id: At3g27270.1
  misc_feature (58)..(207): Homolog of NCBI NO: 26450181 NR Description: unknown protein [Arabidopsis thaliana]
  misc_feature (58)..(207): Homolog of NCBI NO: 15241364 NR Description: putative protein; protein id: At5g14280.1
  misc_feature (57)..(218): Homolog of NCBI NO: 15230950 NR Description: hypothetical protein; protein id: At3g25950.1
  misc_feature (57)..(218): Homolog of NCBI NO: 9279600 NR Description: gene_id:MPE11.12~unknown protein [Arabidopsis
  misc_feature (58)..(214): Homolog of NCBI NO: 15232128 NR Description: unknown protein; protein id: At3g27270.1
  misc_feature (58)..(207): Homolog of NCBI NO: 26450181 NR Description: unknown protein [Arabidopsis thaliana]
  misc_feature (58)..(207): Homolog of NCBI NO: 15241364 NR Description: putative protein; protein id: At5g14280.1
  misc_feature (57)..(218): Homolog of NCBI NO: 15230950 NR Description: hypothetical protein; protein id: At3g25950.1
  misc_feature (57)..(218): Homolog of NCBI NO: 9279600 NR Description: gene_id:MPE11.12~unknown protein [Arabidopsis

SEQ ID NO: 19125 - protein, 270 aa, Zea mays subsp. mays; identical to SEQ ID NO: 16465
  peptide (1)..(270): Ceres Seq. ID no. 12405280
  misc_feature (16)..(172): Homolog of NCBI NO: 15232128 NR Description: unknown protein; protein id: At3g27270.1
  misc_feature (16)..(165): Homolog of NCBI NO: 26450181 NR Description: unknown protein [Arabidopsis thaliana]
  misc_feature (16)..(165): Homolog of NCBI NO: 15241364 NR Description: putative protein; protein id: At5g14280.1
  misc_feature (15)..(176): Homolog of NCBI NO: 15230950 NR Description: hypothetical protein; protein id: At3g25950.1
  misc_feature (15)..(176): Homolog of NCBI NO: 9279600 NR Description: gene_id:MPE11.12~unknown protein [Arabidopsis
  misc_feature (16)..(172): Homolog of NCBI NO: 15232128 NR Description: unknown protein; protein id: At3g27270.1
  misc_feature (16)..(165): Homolog of NCBI NO: 26450181 NR Description: unknown protein [Arabidopsis thaliana]
  misc_feature (16)..(165): Homolog of NCBI NO: 15241364 NR Description: putative protein; protein id: At5g14280.1
  misc_feature (15)..(176): Homolog of NCBI NO: 15230950 NR Description: hypothetical protein; protein id: At3g25950.1
  misc_feature (15)..(176): Homolog of NCBI NO: 9279600 NR Description: gene_id:MPE11.12~unknown protein [Arabidopsis

SEQ ID NO: 19126 - protein, 265 aa, Zea mays subsp. mays; identical to SEQ ID NO: 16466
  peptide (1)..(265): Ceres Seq. ID no. 12405281
  misc_feature (72)..(248): Homolog of NCBI NO: 15219287 NR Description: arginine/serine-rich protein, putative
  misc_feature (62)..(265): Homolog of NCBI NO: 25143299 NR Description: pre-mRNA splicing SR protein related RSR-1 (68.2
  misc_feature (4)..(265): Homolog of NCBI NO: 23018055 NR Description: hypothetical protein [Thermobifida fusca]
  misc_feature (13)..(252): Homolog of NCBI NO: 29247944 NR Description: GLP_26_54603_52153 [Giardia lamblia ATCC 50803]
  misc_feature (72)..(248): Homolog of NCBI NO: 15219287 NR Description: arginine/serine-rich protein, putative
  misc_feature (62)..(265): Homolog of NCBI NO: 25143299 NR Description: pre-mRNA splicing SR protein related RSR-1 (68.2
  misc_feature (4)..(265): Homolog of NCBI NO: 23018055 NR Description: hypothetical protein [Thermobifida fusca]
  misc_feature (13)..(252): Homolog of NCBI NO: 29247944 NR Description: GLP_26_54603_52153 [Giardia lamblia ATCC 50803]

SEQ ID NO: 19127 - DNA, 1868 bp, Zea mays subsp. mays
  misc_feature (1)..(1868): Ceres Seq. ID no. 12366477
  misc_feature: MA Experiment ID: 108527 Result: Down-regulated in Transcription
  misc_feature: MA Experiment 108527 PARAMETER Experiment Name: Zm_5mM_NO_P Parameter: Age (day) Value: 8
  misc_feature: MA Experiment 108527 PARAMETER Experiment Name: Zm_5mM_NO_P Parameter: Organism Value: Zea mays
  misc_feature: MA Experiment 108527 PARAMETER Experiment Name: Zm_5mM_NO_P Parameter: Plant Line Value: 35A19
  misc_feature: MA Experiment 108527 PARAMETER Experiment Name: Zm_5mM_NO_P Parameter: Timepoint (hr) Value: 6
  misc_feature: MA Experiment 108527 PARAMETER Experiment Name: Zm_5mM_NO_P Parameter: Tissue Value: Aerial
  misc_feature: MA Experiment 108527 PARAMETER Experiment Name: Zm_5mM_NO_P Parameter: Treatment Value: 5mM NO vs. No Treatment
  misc_feature: MA Experiment ID: 108535 Result: Down-regulated in Transcription
  misc_feature: MA Experiment 108535 PARAMETER Experiment Name: Zm_Meristem_P Parameter: Age (day) Value: 8
  misc_feature: MA Experiment 108535 PARAMETER Experiment Name: Zm_Meristem_P Parameter: Organism Value: Zea mays
  misc_feature: MA Experiment 108535 PARAMETER Experiment Name: Zm_Meristem_P Parameter: Plant Line Value: 35A19
  misc_feature: MA Experiment 108535 PARAMETER Experiment Name: Zm_Meristem_P Parameter: Tissue Value: Root Meristem vs. Above Root Meristem
  misc_feature: MA Experiment ID: 108687 Result: Down-regulated in Transcription
  misc_feature: MA Experiment 108687 PARAMETER Experiment Name: Zm_Embryos-Flowers__P Parameter: Tissue Value: Embryo vs. Aerial+
  misc_feature: MA Experiment ID: 108689 Result: Up-regulated in Transcription
  misc_feature: MA Experiment 108689 PARAMETER Experiment Name: Zm_Drought_Roots_P Parameter: Age (day) Value: 9
  misc_feature: MA Experiment 108689 PARAMETER Experiment Name: Zm_Drought_Roots_P Parameter: Organism Value: Zea mays
  misc_feature: MA Experiment 108689 PARAMETER Experiment Name: Zm_Drought_Roots_P Parameter: Plant Line Value: 35A19
  misc_feature: MA Experiment 108689 PARAMETER Experiment Name: Zm_Drought_Roots_P Parameter: Timepoint (hr) Value: 24
  misc_feature: MA Experiment 108689 PARAMETER Experiment Name: Zm_Drought_Roots_P Parameter: Tissue Value: Roots
  misc_feature: MA Experiment 108689 PARAMETER Experiment Name: Zm_Drought_Roots_P Parameter: Treatment Value: Drought vs. No Drought
gcacgagaccattacctagaacatcctaatcaaaaaatgacactacctgacaaccacaaacgtcgtctccctccatggcactccgccacggcaataattgaagcaacgctgatctgttgcatctccggcgaggcagagcgcagcagctcgtgcatatatctagctaagccaattgcgcaccaccgcgcgcgccaccccaagatccccgtgccttttcagagcatctctccgtcgccgtgacaatgaagcagcagcagaccgtcatcctgtacccgagccctggcgtcggccacatcgtccccatggtgcagctcgccaaggtgtttctgaggcacggctgcgacgtgaccatggtgatcgccgagccagccgccagctcgcccgacttccgcatcgtcgacctcgaccgcgtggctgcctccaaccccgccatcaccttccacgtcctccctccggtcccgtacgccgacctcgccgtccccggcaagcaccatttcctcctcacgctgcaagtgctgcgacggtacaacggcgagctggagaggttcctccgctccgtcccgcgcgagcgcctgcactccctggtggtcggcatgttctgcaccgacgcggtcgacgtcggcgcaaagctgggcgtccccgtgtacacgttcttcgcctcggccgccgctactctggccgtcgtggcccagctgccggcgttgctctccggcaggcgagcgggcctcaaggagctcggggacacgccactccagttcctcggcgtcccgccgttcccagcgtcccatctcgtcagggagctgctggagcacccggacgacgacgagctgtgcaagaccatggtggacgtctggaagcgctgcacggacggcagcggcgtcttggtcaacacgttcgagtcgctggagagcccggccgtgcaggcgctgagggatccccggtgcgtgcccggccgcgtgctgcccccggtctactgcgtggggccgctgatcggtggcgacggcggcacaagagcagcagcggagcaagagcgcgcggcggagacgcggcacgagtgccttgcgtggctcgacgagcagcccgagaacagcgtcgtgttcctctgcttcggaagcagatgcgcgcactcggctgagcagctaaggggcatcgccgtcggccttgagaggtccgggcagcgcttcttgtggtctgtgcggacgccggccggcaccgacggcggttcggagaatctcggcgcgctctttccagaggggttcttgcagcggaccaaggaccggggcctcgtcgtgcggtcatgggcaccgcaggttgaggtgctacggcatccatcgacgggcgcgttcatgacgcactgcggatggaactcgacgctggaagccatcacagcaggggtgccgatgctatgctggccgttctacgcggagcagctgatgaacaaggtgttcgtgaccgagggcatgggcgtcggggtggagatggaggggtacacgacgggcttcatcaaatccgaggaggtggaagccaaggtgaggctggtgatggaatctgaggagggcaggcacctcaggggtcgagcggtagcactcaagaatgaagcacaagcagcgctgcgggatgacggcccatcggagacctcgttcgccaggttcctctttgatgcgaagaatcttcagggacacctcggtcacggatcggagtgaattttctttaattttctattgaggccttgttcgaaatttatattaggaataagatgcaggaagggttcttgaacttggcagtcatttgagtctcagggtcgacaatgtatcaaatacatatgtgttggagacttgttctcaaatgctataagttaagaacaaggc

SEQ ID NO: 19128 - protein, 486 aa, Zea mays subsp. mays
  peptide (1)..(486): Ceres Seq. ID no. 12366478
  misc_feature (6)..(477): Pfam Name: UDP-glucoronosyl and UDP-glucosyl transferase Pfam Description: UDP-glucoronosyl and UDP-glucosyl transferase
  misc_feature (9)..(485): Homolog of NCBI NO: 15240305 NR Description: UTP-glucose glucosyltransferase - like protein
  misc_feature (7)..(478): Homolog of NCBI NO: 15223392 NR Description: flavonol 3-o-glucosyltransferase, putative
  misc_feature (4)..(471): Homolog of NCBI NO: 21593785 NR Description: putative glucosyltransferase [Arabidopsis
  misc_feature (4)..(471): Homolog of NCBI NO: 18401158 NR Description: putative glucosyltransferase
  misc_feature (7)..(471): Homolog of NCBI NO: 34910218 NR Description: putative flavonol glucosyltransferase
  misc_feature (1)..(471): Homolog of NCBI NO: 22535568 NR Description: putative glucosyltransferase
  misc_feature (5)..(473): Homolog of NCBI NO: 34908644 NR Description: putative flavonol 3-O-glucosyltransferase
  misc_feature (2)..(471): Homolog of NCBI NO: 34910228 NR Description: putative flavonol glucosyltransferase
  misc_feature (4)..(473): Homolog of NCBI NO: 34910204 NR Description: putative flavonol glucosyltransferase
  misc_feature (4)..(477): Homolog of NCBI NO: 34910206 NR Description: putative flavonol glucosyltransferase
MKQQQTVILYPSPGVGHIVPMVQLAKVFLRHGCDVTMVIAEPAASSPDFRIVDLDRVAASNPAITFHVLPPVPYADLAVPGKHHFLLTLQVLRRYNGELERFLRSVPRERLHSLVVGMFCTDAVDVGAKLGVPVYTFFASAAATLAVVAQLPALLSGRRAGLKELGDTPLQFLGVPPFPASHLVRELLEHPDDDELCKTMVDVWKRCTDGSGVLVNTFESLESPAVQALRDPRCVPGRVLPPVYCVGPLIGGDGGTRAAAEQERAAETRHECLAWLDEQPENSVVFLCFGSRCAHSAEQLRGIAVGLERSGQRFLWSVRTPAGTDGGSENLGALFPEGFLQRTKDRGLVVRSWAPQVEVLRHPSTGAFMTHCGWNSTLEAITAGVPMLCWPFYAEQLMNKVFVTEGMGVGVEMEGYTTGFIKSEEVEAKVRLVMESEEGRHLRGRAVALKNEAQAALRDDGPSETSFARFLFDAKNLQGHLGHGSE

SEQ ID NO: 19129 - protein, 466 aa, Zea mays subsp. mays
  peptide (1)..(466): Ceres Seq. ID no. 12366479
  misc_feature (1)..(457): Pfam Name: UDP-glucoronosyl and UDP-glucosyl transferase Pfam Description: UDP-glucoronosyl and UDP-glucosyl transferase
  misc_feature (1)..(465): Homolog of NCBI NO: 15240305 NR Description: UTP-glucose glucosyltransferase - like protein
  misc_feature (1)..(458): Homolog of NCBI NO: 15223392 NR Description: flavonol 3-o-glucosyltransferase, putative
  misc_feature (1)..(451): Homolog of NCBI NO: 21593785 NR Description: putative glucosyltransferase [Arabidopsis
  misc_feature (1)..(451): Homolog of NCBI NO: 18401158 NR Description: putative glucosyltransferase
  misc_feature (1)..(451): Homolog of NCBI NO: 34910218 NR Description: putative flavonol glucosyltransferase
  misc_feature (1)..(451): Homolog of NCBI NO: 22535568 NR Description: putative glucosyltransferase
  misc_feature (1)..(453): Homolog of NCBI NO: 34908644 NR Description: putative flavonol 3-O-glucosyltransferase
  misc_feature (1)..(451): Homolog of NCBI NO: 34910228 NR Description: putative flavonol glucosyltransferase
  misc_feature (1)..(453): Homolog of NCBI NO: 34910204 NR Description: putative flavonol glucosyltransferase
  misc_feature (1)..(457): Homolog of NCBI NO: 34910206 NR Description: putative flavonol glucosyltransferase
MVQLAKVFLRHGCDVTMVIAEPAASSPDFRIVDLDRVAASNPAITFHVLPPVPYADLAVPGKHHFLLTLQVLRRYNGELERFLRSVPRERLHSLVVGMFCTDAVDVGAKLGVPVYTFFASAAATLAVVAQLPALLSGRRAGLKELGDTPLQFLGVPPFPASHLVRELLEHPDDDELCKTMVDVWKRCTDGSGVLVNTFESLESPAVQALRDPRCVPGRVLPPVYCVGPLIGGDGGTRAAAEQERAAETRHECLAWLDEQPENSVVFLCFGSRCAHSAEQLRGIAVGLERSGQRFLWSVRTPAGTDGGSENLGALFPEGFLQRTKDRGLVVRSWAPQVEVLRHPSTGAFMTHCGWNSTLEAITAGVPMLCWPFYAEQLMNKVFVTEGMGVGVEMEGYTTGFIKSEEVEAKVRLVMESEEGRHLRGRAVALKNEAQAALRDDGPSETSFARFLFDAKNLQGHLGHGSE

SEQ ID NO: 19130 - protein, 450 aa, Zea mays subsp. mays
  peptide (1)..(450): Ceres Seq. ID no. 12366480
  misc_feature (1)..(441): Pfam Name: UDP-glucoronosyl and UDP-glucosyl transferase Pfam Description: UDP-glucoronosyl and UDP-glucosyl transferase
  misc_feature (1)..(449): Homolog of NCBI NO: 15240305 NR Description: UTP-glucose glucosyltransferase - like protein
  misc_feature (1)..(442): Homolog of NCBI NO: 15223392 NR Description: flavonol 3-o-glucosyltransferase, putative
  misc_feature (1)..(435): Homolog of NCBI NO: 21593785 NR Description: putative glucosyltransferase [Arabidopsis
  misc_feature (1)..(435): Homolog of NCBI NO: 18401158 NR Description: putative glucosyltransferase
  misc_feature (1)..(435): Homolog of NCBI NO: 34910218 NR Description: putative flavonol glucosyltransferase
  misc_feature (1)..(435): Homolog of NCBI NO: 22535568 NR Description: putative glucosyltransferase
  misc_feature (1)..(437): Homolog of NCBI NO: 34908644 NR Description: putative flavonol 3-O-glucosyltransferase
  misc_feature (1)..(435): Homolog of NCBI NO: 34910228 NR Description: putative flavonol glucosyltransferase
  misc_feature (1)..(437): Homolog of NCBI NO: 34910204 NR Description: putative flavonol glucosyltransferase
  misc_feature (1)..(441): Homolog of NCBI NO: 34910206 NR Description: putative flavonol glucosyltransferase
MVIAEPAASSPDFRIVDLDRVAASNPAITFHVLPPVPYADLAVPGKHHFLLTLQVLRRYNGELERFLRSVPRERLHSLVVGMFCTDAVDVGAKLGVPVYTFFASAAATLAVVAQLPALLSGRRAGLKELGDTPLQFLGVPPFPASHLVRELLEHPDDDELCKTMVDVWKRCTDGSGVLVNTFESLESPAVQALRDPRCVPGRVLPPVYCVGPLIGGDGGTRAAAEQERAAETRHECLAWLDEQPENSVVFLCFGSRCAHSAEQLRGIAVGLERSGQRFLWSVRTPAGTDGGSENLGALFPEGFLQRTKDRGLVVRSWAPQVEVLRHPSTGAFMTHCGWNSTLEAITAGVPMLCWPFYAEQLMNKVFVTEGMGVGVEMEGYTTGFIKSEEVEAKVRLVMESEEGRHLRGRAVALKNEAQAALRDDGPSETSFARFLFDAKNLQGHLGHGSE

SEQ ID NO: 19131 - DNA, 1092 bp, Zea mays subsp. mays
  misc_feature (1)..(1092): Ceres Seq. ID no. 12376878
  misc_feature: MA Experiment ID: 108522 Result: Down-regulated in Transcription
  misc_feature: MA Experiment 108522 PARAMETER Experiment Name: Zm_42deg_Heat_P Parameter: Age (day) Value: 8
  misc_feature: MA Experiment 108522 PARAMETER Experiment Name: Zm_42deg_Heat_P Parameter: Organism Value: Zea mays
  misc_feature: MA Experiment 108522 PARAMETER Experiment Name: Zm_42deg_Heat_P Parameter: Plant Line Value: 35A19
  misc_feature: MA Experiment 108522 PARAMETER Experiment Name: Zm_42deg_Heat_P Parameter: Temperature (deg C) Value: 42 vs. 22
  misc_feature: MA Experiment 108522 PARAMETER Experiment Name: Zm_42deg_Heat_P Parameter: Timepoint (hr) Value: 1
  misc_feature: MA Experiment 108522 PARAMETER Experiment Name: Zm_42deg_Heat_P Parameter: Tissue Value: Aerial
  misc_feature: MA Experiment ID: 108523 Result: Down-regulated in Transcription
  misc_feature: MA Experiment 108523 PARAMETER Experiment Name: Zm_42deg_Heat_P Parameter: Age (day) Value: 8
  misc_feature: MA Experiment 108523 PARAMETER Experiment Name: Zm_42deg_Heat_P Parameter: Organism Value: Zea mays
  misc_feature: MA Experiment 108523 PARAMETER Experiment Name: Zm_42deg_Heat_P Parameter: Plant Line Value: 35A19
  misc_feature: MA Experiment 108523 PARAMETER Experiment Name: Zm_42deg_Heat_P Parameter: Temperature (deg C) Value: 42 vs. 22
  misc_feature: MA Experiment 108523 PARAMETER Experiment Name: Zm_42deg_Heat_P Parameter: Timepoint (hr) Value: 6
  misc_feature: MA Experiment 108523 PARAMETER Experiment Name: Zm_42deg_Heat_P Parameter: Tissue Value: Aerial
  misc_feature: MA Experiment ID: 108527 Result: Down-regulated in Transcription
  misc_feature: MA Experiment 108527 PARAMETER Experiment Name: Zm_5mM_NO_P Parameter: Age (day) Value: 8
  misc_feature: MA Experiment 108527 PARAMETER Experiment Name: Zm_5mM_NO_P Parameter: Organism Value: Zea mays
  misc_feature: MA Experiment 108527 PARAMETER Experiment Name: Zm_5mM_NO_P Parameter: Plant Line Value: 35A19
  misc_feature: MA Experiment 108527 PARAMETER Experiment Name: Zm_5mM_NO_P Parameter: Timepoint (hr) Value: 6
  misc_feature: MA Experiment 108527 PARAMETER Experiment Name: Zm_5mM_NO_P Parameter: Tissue Value: Aerial
  misc_feature: MA Experiment 108527 PARAMETER Experiment Name: Zm_5mM_NO_P Parameter: Treatment Value: 5mM NO vs. No Treatment
  misc_feature: MA Experiment ID: 108528 Result: Down-regulated in Transcription
  misc_feature: MA Experiment 108528 PARAMETER Experiment Name: Zm_Imbibed_Seeds_P Parameter: Age (day) Value: 5 vs. 2
  misc_feature: MA Experiment 108528 PARAMETER Experiment Name: Zm_Imbibed_Seeds_P Parameter: Organism Value: Zea mays
  misc_feature: MA Experiment 108528 PARAMETER Experiment Name: Zm_Imbibed_Seeds_P Parameter: Plant Line Value: 35A19
  misc_feature: MA Experiment 108528 PARAMETER Experiment Name: Zm_Imbibed_Seeds_P Parameter: Tissue Value: Aerial vs. Embryo
  misc_feature: MA Experiment ID: 108529 Result: Up-regulated in Transcription
  misc_feature: MA Experiment 108529 PARAMETER Experiment Name: Zm_Imbibed_Seeds_P Parameter: Age (day) Value: 5 vs. 2
  misc_feature: MA Experiment 108529 PARAMETER Experiment Name: Zm_Imbibed_Seeds_P Parameter: Organism Value: Zea mays
  misc_feature: MA Experiment 108529 PARAMETER Experiment Name: Zm_Imbibed_Seeds_P Parameter: Plant Line Value: 35A19
  misc_feature: MA Experiment 108529 PARAMETER Experiment Name: Zm_Imbibed_Seeds_P Parameter: Tissue Value: Roots vs. Embryo
  misc_feature: MA Experiment ID: 108533 Result: Down-regulated in Transcription
  misc_feature: MA Experiment 108533 PARAMETER Experiment Name: Zm_4deg_Cold_P Parameter: Age (hr) Value: 8
  misc_feature: MA Experiment 108533 PARAMETER Experiment Name: Zm_4deg_Cold_P Parameter: Organism Value: Zea mays
  misc_feature: MA Experiment 108533 PARAMETER Experiment Name: Zm_4deg_Cold_P Parameter: Plant Line Value: 35A19
  misc_feature: MA Experiment 108533 PARAMETER Experiment Name: Zm_4deg_Cold_P Parameter: Temperature (deg C) Value: 4 vs. 22
  misc_feature: MA Experiment 108533 PARAMETER Experiment Name: Zm_4deg_Cold_P Parameter: Timepoint (hr) Value: 1
  misc_feature: MA Experiment 108533 PARAMETER Experiment Name: Zm_4deg_Cold_P Parameter: Tissue Value: Aerial
  misc_feature: MA Experiment ID: 108535 Result: Down-regulated in Transcription
  misc_feature: MA Experiment 108535 PARAMETER Experiment Name: Zm_Meristem_P Parameter: Age (day) Value: 8
  misc_feature: MA Experiment 108535 PARAMETER Experiment Name: Zm_Meristem_P Parameter: Organism Value: Zea mays
  misc_feature: MA Experiment 108535 PARAMETER Experiment Name: Zm_Meristem_P Parameter: Plant Line Value: 35A19
  misc_feature: MA Experiment 108535 PARAMETER Experiment Name: Zm_Meristem_P Parameter: Tissue Value: Root Meristem vs. Above Root Meristem
  misc_feature: MA Experiment ID: 108543 Result: Up-regulated in Transcription
  misc_feature: MA Experiment ID: 108545 Result: Down-regulated in Transcription
  misc_feature: MA Experiment 108545 PARAMETER Experiment Name: Zm_Imbibed_Seeds_P Parameter: Age (day) Value: 3 vs. 2
  misc_feature: MA Experiment 108545 PARAMETER Experiment Name: Zm_Imbibed_Seeds_P Parameter: Organism Value: Zea mays
  misc_feature: MA Experiment 108545 PARAMETER Experiment Name: Zm_Imbibed_Seeds_P Parameter: Plant Line Value: 35A19
  misc_feature: MA Experiment 108545 PARAMETER Experiment Name: Zm_Imbibed_Seeds_P Parameter: Tissue Value: Aerial vs. Embryo
  misc_feature: MA Experiment ID: 108689 Result: Down-regulated in Transcription
  misc_feature: MA Experiment 108689 PARAMETER Experiment Name: Zm_Drought_Roots_P Parameter: Age (day) Value: 9
  misc_feature: MA Experiment 108689 PARAMETER Experiment Name: Zm_Drought_Roots_P Parameter: Organism Value: Zea mays
  misc_feature: MA Experiment 108689 PARAMETER Experiment Name: Zm_Drought_Roots_P Parameter: Plant Line Value: 35A19
  misc_feature: MA Experiment 108689 PARAMETER Experiment Name: Zm_Drought_Roots_P Parameter: Timepoint (hr) Value: 24
  misc_feature: MA Experiment 108689 PARAMETER Experiment Name: Zm_Drought_Roots_P Parameter: Tissue Value: Roots
  misc_feature: MA Experiment 108689 PARAMETER Experiment Name: Zm_Drought_Roots_P Parameter: Treatment Value: Drought vs. No Drought
  misc_feature: MA Experiment ID: 20000535 Result: Down-regulated in Transcription
  misc_feature: MA Experiment 20000535 PARAMETER Experiment Name: Zm_Hybrid_Seed_Dev_P Parameter: DAP Value: 30 vs. 12
  misc_feature: MA Experiment 20000535 PARAMETER Experiment Name: Zm_Hybrid_Seed_Dev_P Parameter: Organism Value: Zea mays
  misc_feature: MA Experiment 20000535 PARAMETER Experiment Name: Zm_Hybrid_Seed_Dev_P Parameter: Plant Line Value: 35A19
  misc_feature: MA Experiment 20000535 PARAMETER Experiment Name: Zm_Hybrid_Seed_Dev_P Parameter: Tissue Value: Embryo vs. Unfert Floret
gcacgagaccatttacctagaacatcctaatcaaaaaaatccatcttcagagagagagagagagatagagagagagagagagttggtttgcatggggtgtgtgtcctccaaggagtccagacgacgacctccgggatacgaggatcccaacaccttagctagagagaccacgttttctgtcaacgaagtggaggccctctacgagctgtacaagaggataagctattccataaccaaagacggcctaatccacaaggaggagttccagctcgctctcttccggaacagtaacaagaggaaccttttcgccgatcggatatttgacctgttcgacctgaagcgcaacggagtgattgagttcggggagttcgttcgctccctcgacgttttccacccagctacgcccgtggaagaaaagatcgcctttgcgtttcggctgtacgatctgagaggcactggattcattggacgcgaagagctgaaggaaatggtgctggccattctgaacgaatcagaattacttctttccgacgacgccgtcgaagaaatcgtggatcagactttcaggcaagcggacatgaacggcgacgggaagatagatcctgatgaatggaaggtgttcgcgagcaaaaacccggcacttctaaagaacatgacgctcccatacctcaagtaaaaacccggtacttctaaagaacattaattacccgcaccgcacatgactgggcggcttgatctgacgacgacgtgttgcattttgttgttgttgttgttgttgttgttgttgttgttgttgttgttgttgtgcatcgtcatcttgtacacgtacagggacataaccatggcgttccccagctttgttctcaactctggagccagtgacgacgagttgtagtagctgcgagcatgcatggccaagctgcgagcgaggaaggaacgctgacctcactcctcagttcactaagtttcagacggagcagcagcaggaggacccctcctgaaaggtgatttggaagctggtggttcactcaagctgctaggatcatctgtggaagaacacacatgctccatacttgcccagcccacagcaac

SEQ ID NO: 19132 - protein, 224 aa, Zea mays subsp. mays
  peptide (1)..(224): Ceres Seq. ID no. 12376879
  misc_feature (102)..(130): Pfam Name: EF hand Pfam Description: EF hand
  misc_feature (33)..(224): Homolog of NCBI NO: 30689575 NR Description: calcineurin B-like protein (fragment)
  misc_feature (33)..(224): Homolog of NCBI NO: 15234011 NR Description: putative protein (fragment); protein id:
  misc_feature (33)..(224): Homolog of NCBI NO: 7486208 NR Description: hypothetical protein F26P21.120 - Arabidopsis
  misc_feature (42)..(224): Homolog of NCBI NO: 22137326 NR Description: calcineurin B [Pisum sativum]
  misc_feature (41)..(224): Homolog of NCBI NO: 16924116 NR Description: putative calcineurin B-like protein [Oryza sativa]
  misc_feature (31)..(224): Homolog of NCBI NO: 18414931 NR Description: calcineurin B-like protein 1
  misc_feature (31)..(224): Homolog of NCBI NO: 15238015 NR Description: calcineurin B 1
  misc_feature (28)..(224): Homolog of NCBI NO: 15217657 NR Description: calcineurin B-like protein
  misc_feature (28)..(223): Homolog of NCBI NO: 25295757 NR Description: protein F1N19.5 [imported] - Arabidopsis thaliana
  misc_feature (31)..(224): Homolog of NCBI NO: 15237928 NR Description: calcium sensor homolog (gb|AAC26110.1)
HETIYLEHPNQKNPSSEREREIERERELVCMGCVSSKESRRRPPGYEDPNTLARETTFSVNEVEALYELYKRISYSITKDGLIHKEEFQLALFRNSNKRNLFADRIFDLFDLKRNGVIEFGEFVRSLDVFHPATPVEEKIAFAFRLYDLRGTGFIGREELKEMVLAILNESELLLSDDAVEEIVDQTFRQADMNGDGKIDPDEWKVFASKNPALLKNMTLPYLK

SEQ ID NO: 19133 - protein, 194 aa, Zea mays subsp. mays
  peptide (1)..(194): Ceres Seq. ID no. 12376880
  misc_feature (72)..(100): Pfam Name: EF hand Pfam Description: EF hand
  misc_feature (12)..(194): Homolog of NCBI NO: 22137326 NR Description: calcineurin B [Pisum sativum]
  misc_feature (11)..(194): Homolog of NCBI NO: 16924116 NR Description: putative calcineurin B-like protein [Oryza sativa]
  misc_feature (1)..(194): Homolog of NCBI NO: 18414931 NR Description: calcineurin B-like protein 1
  misc_feature (1)..(194): Homolog of NCBI NO: 15238015 NR Description: calcineurin B 1
  misc_feature (3)..(194): Homolog of NCBI NO: 30689575 NR Description: calcineurin B-like protein (fragment)
  misc_feature (3)..(194): Homolog of NCBI NO: 7486208 NR Description: hypothetical protein F26P21.120 - Arabidopsis
  misc_feature (3)..(194): Homolog of NCBI NO: 15234011 NR Description: putative protein (fragment); protein id:
  misc_feature (1)..(194): Homolog of NCBI NO: 15217657 NR Description: calcineurin B-like protein
  misc_feature (1)..(193): Homolog of NCBI NO: 25295757 NR Description: protein F1N19.5 [imported] - Arabidopsis thaliana
  misc_feature (1)..(194): Homolog of NCBI NO: 15237928 NR Description: calcium sensor homolog (gb|AAC26110.1)
MGCVSSKESRRRPPGYEDPNTLARETTFSVNEVEALYELYKRISYSITKDGLIHKEEFQLALFRNSNKRNLFADRIFDLFDLKRNGVIEFGEFVRSLDVFHPATPVEEKIAFAFRLYDLRGTGFIGREELKEMVLAILNESELLLSDDAVEEIVDQTFRQADMNGDGKIDPDEWKVFASKNPALLKNMTLPYLK

SEQ ID NO: 19134 - DNA, 871 bp, Zea mays subsp. mays
  misc_feature (1)..(871): Ceres Seq. ID no. 12364438
  misc_feature: MA Experiment ID: 108534 Result: Down-regulated in Transcription
  misc_feature: MA Experiment 108534 PARAMETER Experiment Name: Zm_4deg_Cold_P Parameter: Age (hr) Value: 8
  misc_feature: MA Experiment 108534 PARAMETER Experiment Name: Zm_4deg_Cold_P Parameter: Organism Value: Zea mays
  misc_feature: MA Experiment 108534 PARAMETER Experiment Name: Zm_4deg_Cold_P Parameter: Plant Line Value: 35A19
  misc_feature: MA Experiment 108534 PARAMETER Experiment Name: Zm_4deg_Cold_P Parameter: Temperature (deg C) Value: 4 vs. 22
  misc_feature: MA Experiment 108534 PARAMETER Experiment Name: Zm_4deg_Cold_P Parameter: Timepoint (hr) Value: 6
  misc_feature: MA Experiment 108534 PARAMETER Experiment Name: Zm_4deg_Cold_P Parameter: Tissue Value: Aerial
  misc_feature: MA Experiment ID: 108543 Result: Up-regulated in Transcription
  misc_feature: MA Experiment ID: 108544 Result: Up-regulated in Transcription
  misc_feature: MA Experiment ID: 108545 Result: Down-regulated in Transcription
  misc_feature: MA Experiment 108545 PARAMETER Experiment Name: Zm_Imbibed_Seeds_P Parameter: Age (day) Value: 3 vs. 2
  misc_feature: MA Experiment 108545 PARAMETER Experiment Name: Zm_Imbibed_Seeds_P Parameter: Organism Value: Zea mays
  misc_feature: MA Experiment 108545 PARAMETER Experiment Name: Zm_Imbibed_Seeds_P Parameter: Plant Line Value: 35A19
  misc_feature: MA Experiment 108545 PARAMETER Experiment Name: Zm_Imbibed_Seeds_P Parameter: Tissue Value: Aerial vs. Embryo
  misc_feature: MA Experiment ID: 108547 Result: Down-regulated in Transcription
  misc_feature: MA Experiment 108547 PARAMETER Experiment Name: Zm_Imbibed_Seeds_P Parameter: Age (day) Value: 4 vs. 2
  misc_feature: MA Experiment 108547 PARAMETER Experiment Name: Zm_Imbibed_Seeds_P Parameter: Organism Value: Zea mays
  misc_feature: MA Experiment 108547 PARAMETER Experiment Name: Zm_Imbibed_Seeds_P Parameter: Plant Line Value: 35A19
  misc_feature: MA Experiment 108547 PARAMETER Experiment Name: Zm_Imbibed_Seeds_P Parameter: Tissue Value: Aerial vs. Embryo
  misc_feature: MA Experiment ID: 108689 Result: Up-regulated in Transcription
  misc_feature: MA Experiment 108689 PARAMETER Experiment Name: Zm_Drought_Roots_P Parameter: Age (day) Value: 9
  misc_feature: MA Experiment 108689 PARAMETER Experiment Name: Zm_Drought_Roots_P Parameter: Organism Value: Zea mays
  misc_feature: MA Experiment 108689 PARAMETER Experiment Name: Zm_Drought_Roots_P Parameter: Plant Line Value: 35A19
  misc_feature: MA Experiment 108689 PARAMETER Experiment Name: Zm_Drought_Roots_P Parameter: Timepoint (hr) Value: 24
  misc_feature: MA Experiment 108689 PARAMETER Experiment Name: Zm_Drought_Roots_P Parameter: Tissue Value: Roots
  misc_feature: MA Experiment 108689 PARAMETER Experiment Name: Zm_Drought_Roots_P Parameter: Treatment Value: Drought vs. No Drought
  misc_feature: MA Experiment ID: 20000535 Result: Down-regulated in Transcription
  misc_feature: MA Experiment 20000535 PARAMETER Experiment Name: Zm_Hybrid_Seed_Dev_P Parameter: DAP Value: 30 vs. 12
  misc_feature: MA Experiment 20000535 PARAMETER Experiment Name: Zm_Hybrid_Seed_Dev_P Parameter: Organism Value: Zea mays
  misc_feature: MA Experiment 20000535 PARAMETER Experiment Name: Zm_Hybrid_Seed_Dev_P Parameter: Plant Line Value: 35A19
  misc_feature: MA Experiment 20000535 PARAMETER Experiment Name: Zm_Hybrid_Seed_Dev_P Parameter: Tissue Value: Embryo vs. Unfert Floret
gcacgagaccattacctagaacatcctaatccaaaaactagcaggcatccacttctcacaggcaaagagaagtctcctagcatcaaagcagatttgcagatagaccttctccaagcgatggagactttcacccaggaacatgtcattggaattccattgacttcgtttgcatatgccgatgaggaaagacaaggaaaatcttcctgttctgccatggttcataaaaaaaataagaagagttccttcattcatcggatgaacaaactgagccataaaacagatagctacatgcaaggattcaaagaacacttaaccatgggaccaaaaatttcagaaactataaaagggaaactaagcttcggtgcaaaggttctccaagctggcggtattgataaagtcttcagagaatactttgcagttgagaaagatgagaaactacggaaggctttccagtgctatctttcaaccacagctggtccaatagctggaatgcttttcatctcaactaagaagattgctttccatagtgataggcctttgagtttcacgtctcctaaaggaagcagtacaagggtgccttacaaggtgttgatccccacagagaggatgaaaagtgcttcagtgcgggaaaatttatacaatccagatgagaagtatattgatgtagtcactgttgatggctttgatttttggttcatgggctttgtcagctatgagaagtcattcaaatatctccaacaagtaattatggagctgagatgatgcacacagttttgtaacgtgaaacatcatagataccatgttgatatggtatatgtacattgaagagatagaattgatctatcacattgattgtgaagcaaagtttttc

SEQ ID NO: 19135 - protein, 253 aa, Zea mays subsp. mays
  peptide (1)..(253): Ceres Seq. ID no. 12364439
  misc_feature (132)..(210): Pfam Name: GRAM domain Pfam Description: GRAM domain
  misc_feature (90)..(245): Homolog of NCBI NO: 15240044 NR Description: ABA-responsive protein - like; protein id:
  misc_feature (65)..(253): Homolog of NCBI NO: 34906818 NR Description: contains EST C91668(E31216)~similar to FH protein
  misc_feature (75)..(249): Homolog of NCBI NO: 15241598 NR Description: putative protein
  misc_feature (80)..(251): Homolog of NCBI NO: 15237288 NR Description: ABA-responsive protein, putative; protein id:
  misc_feature (92)..(249): Homolog of NCBI NO: 26452902 NR Description: unknown protein [Arabidopsis thaliana]
  misc_feature (92)..(249): Homolog of NCBI NO: 15237287 NR Description: ABA-responsive protein, putative; protein id:
  misc_feature (92)..(249): Homolog of NCBI NO: 15237301 NR Description: ABA-responsive protein, putative; protein id:
  misc_feature (74)..(253): Homolog of NCBI NO: 38344445 NR Description: OSJNBa0038O10.17 [Oryza sativa (japonica
  misc_feature (46)..(251): Homolog of NCBI NO: 38344446 NR Description: OSJNBa0038O10.18 [Oryza sativa (japonica
  misc_feature (40)..(253): Homolog of NCBI NO: 37535572 NR Description: putative ABA-responsive protein
ARDHYLEHPNPKTSRHPLLTGKEKSPSIKADLQIDLLQAMETFTQEHVIGIPLTSFAYADEERQGKSSCSAMVHKKNKKSSFIHRMNKLSHKTDSYMQGFKEHLTMGPKISETIKGKLSFGAKVLQAGGIDKVFREYFAVEKDEKLRKAFQCYLSTTAGPIAGMLFISTKKIAFHSDRPLSFTSPKGSSTRVPYKVLIPTERMKSASVRENLYNPDEKYIDVVTVDGFDFWFMGFVSYEKSFKYLQQVIMELR

SEQ ID NO: 19136 - protein, 214 aa, Zea mays subsp. mays
  peptide (1)..(214): Ceres Seq. ID no. 12364440
  misc_feature (93)..(171): Pfam Name: GRAM domain Pfam Description: GRAM domain
  misc_feature (51)..(206): Homolog of NCBI NO: 15240044 NR Description: ABA-responsive protein - like; protein id:
  misc_feature (26)..(214): Homolog of NCBI NO: 34906818 NR Description: contains EST C91668(E31216)~similar to FH protein
  misc_feature (36)..(210): Homolog of NCBI NO: 15241598 NR Description: putative protein
  misc_feature (41)..(212): Homolog of NCBI NO: 15237288 NR Description: ABA-responsive protein, putative; protein id:
  misc_feature (53)..(210): Homolog of NCBI NO: 26452902 NR Description: unknown protein [Arabidopsis thaliana]
  misc_feature (53)..(210): Homolog of NCBI NO: 15237287 NR Description: ABA-responsive protein, putative; protein id:
  misc_feature (53)..(210): Homolog of NCBI NO: 15237301 NR Description: ABA-responsive protein, putative; protein id:
  misc_feature (35)..(214): Homolog of NCBI NO: 38344445 NR Description: OSJNBa0038O10.17 [Oryza sativa (japonica
  misc_feature (7)..(212): Homolog of NCBI NO: 38344446 NR Description: OSJNBa0038O10.18 [Oryza sativa (japonica
  misc_feature (1)..(214): Homolog of NCBI NO: 37535572 NR Description: putative ABA-responsive protein
METFTQEHVIGIPLTSFAYADEERQGKSSCSAMVHKKNKKSSFIHRMNKLSHKTDSYMQGFKEHLTMGPKISETIKGKLSFGAKVLQAGGIDKVFREYFAVEKDEKLRKAFQCYLSTTAGPIAGMLFISTKKIAFHSDRPLSFTSPKGSSTRVPYKVLIPTERMKSASVRENLYNPDEKYIDVVTVDGFDFWFMGFVSYEKSFKYLQQVIMELR

SEQ ID NO: 19137 - protein, 182 aa, Zea mays subsp. mays
  peptide (1)..(182): Ceres Seq. ID no. 12364441
  misc_feature (61)..(139): Pfam Name: GRAM domain Pfam Description: GRAM domain
  misc_feature (19)..(174): Homolog of NCBI NO: 15240044 NR Description: ABA-responsive protein - like; protein id:
  misc_feature (1)..(182): Homolog of NCBI NO: 34906818 NR Description: contains EST C91668(E31216)~similar to FH protein
  misc_feature (4)..(178): Homolog of NCBI NO: 15241598 NR Description: putative protein
  misc_feature (9)..(180): Homolog of NCBI NO: 15237288 NR Description: ABA-responsive protein, putative; protein id:
  misc_feature (21)..(178): Homolog of NCBI NO: 26452902 NR Description: unknown protein [Arabidopsis thaliana]
  misc_feature (21)..(178): Homolog of NCBI NO: 15237287 NR Description: ABA-responsive protein, putative; protein id:
  misc_feature (21)..(178): Homolog of NCBI NO: 15237301 NR Description: ABA-responsive protein, putative; protein id:
  misc_feature (3)..(182): Homolog of NCBI NO: 38344445 NR Description: OSJNBa0038O10.17 [Oryza sativa (japonica
  misc_feature (1)..(180): Homolog of NCBI NO: 38344446 NR Description: OSJNBa0038O10.18 [Oryza sativa (japonica
  misc_feature (1)..(182): Homolog of NCBI NO: 37535572 NR Description: putative ABA-responsive protein
MVHKKNKKSSFIHRMNKLSHKTDSYMQGFKEHLTMGPKISETIKGKLSFGAKVLQAGGIDKVFREYFAVEKDEKLRKAFQCYLSTTAGPIAGMLFISTKKIAFHSDRPLSFTSPKGSSTRVPYKVLIPTERMKSASVRENLYNPDEKYIDVVTVDGFDFWFMGFVSYEKSFKYLQQVIMELR

SEQ ID NO: 19138 - DNA, 472 bp, Zea mays subsp. mays
  misc_feature (1)..(472): Ceres Seq. ID no. 1848109
  misc_feature: MA Experiment ID: 108534 Result: Up-regulated in Transcription
  misc_feature: MA Experiment 108534 PARAMETER Experiment Name: Zm_4deg_Cold_P Parameter: Age (hr) Value: 8
  misc_feature: MA Experiment 108534 PARAMETER Experiment Name: Zm_4deg_Cold_P Parameter: Organism Value: Zea mays
  misc_feature: MA Experiment 108534 PARAMETER Experiment Name: Zm_4deg_Cold_P Parameter: Plant Line Value: 35A19
  misc_feature: MA Experiment 108534 PARAMETER Experiment Name: Zm_4deg_Cold_P Parameter: Temperature (deg C) Value: 4 vs. 22
  misc_feature: MA Experiment 108534 PARAMETER Experiment Name: Zm_4deg_Cold_P Parameter: Timepoint (hr) Value: 6
  misc_feature: MA Experiment 108534 PARAMETER Experiment Name: Zm_4deg_Cold_P Parameter: Tissue Value: Aerial
  misc_feature: MA Experiment ID: 108543 Result: Up-regulated in Transcription
  misc_feature: MA Experiment ID: 108556 Result: Down-regulated in Transcription
  misc_feature: MA Experiment 108556 PARAMETER Experiment Name: Zm_Drought_P Parameter: Age (day) Value: 9
  misc_feature: MA Experiment 108556 PARAMETER Experiment Name: Zm_Drought_P Parameter: Organism Value: Zea mays
  misc_feature: MA Experiment 108556 PARAMETER Experiment Name: Zm_Drought_P Parameter: Plant Line Value: 35A19
  misc_feature: MA Experiment 108556 PARAMETER Experiment Name: Zm_Drought_P Parameter: Timepoint (hr) Value: 24
  misc_feature: MA Experiment 108556 PARAMETER Experiment Name: Zm_Drought_P Parameter: Tissue Value: Aerial
  misc_feature: MA Experiment 108556 PARAMETER Experiment Name: Zm_Drought_P Parameter: Treatment Value: Drought vs. No Drought
  misc_feature: MA Experiment ID: 20000479 Result: Down-regulated in Transcription
  misc_feature: MA Experiment 20000479 PARAMETER Experiment Name: Zm_Drought_P Parameter: Age (day) Value: 10
  misc_feature: MA Experiment 20000479 PARAMETER Experiment Name: Zm_Drought_P Parameter: Organism Value: Zea mays
  misc_feature: MA Experiment 20000479 PARAMETER Experiment Name: Zm_Drought_P Parameter: Plant Line Value: 35A19
  misc_feature: MA Experiment 20000479 PARAMETER Experiment Name: Zm_Drought_P Parameter: Timepoint (hr) Value: 48
  misc_feature: MA Experiment 20000479 PARAMETER Experiment Name: Zm_Drought_P Parameter: Tissue Value: Aerial
  misc_feature: MA Experiment 20000479 PARAMETER Experiment Name: Zm_Drought_P Parameter: Treatment Value: Drought vs. No Drought
  misc_feature: MA Experiment ID: 20000480 Result: Down-regulated in Transcription
  misc_feature: MA Experiment 20000480 PARAMETER Experiment Name: Zm_Drought_P Parameter: Age (day) Value: 11
  misc_feature: MA Experiment 20000480 PARAMETER Experiment Name: Zm_Drought_P Parameter: Organism Value: Zea mays
  misc_feature: MA Experiment 20000480 PARAMETER Experiment Name: Zm_Drought_P Parameter: Plant Line Value: 35A19
  misc_feature: MA Experiment 20000480 PARAMETER Experiment Name: Zm_Drought_P Parameter: Timepoint (hr) Value: 72
  misc_feature: MA Experiment 20000480 PARAMETER Experiment Name: Zm_Drought_P Parameter: Tissue Value: Aerial
  misc_feature: MA Experiment 20000480 PARAMETER Experiment Name: Zm_Drought_P Parameter: Treatment Value: Drought vs. No Drought
  misc_feature: MA Experiment ID: 20000534 Result: Down-regulated in Transcription
  misc_feature: MA Experiment 20000534 PARAMETER Experiment Name: Zm_Hybrid_Pollen_P Parameter: Age (day) Value: 8
  misc_feature: MA Experiment 20000534 PARAMETER Experiment Name: Zm_Hybrid_Pollen_P Parameter: Organism Value: Zea mays
  misc_feature: MA Experiment 20000534 PARAMETER Experiment Name: Zm_Hybrid_Pollen_P Parameter: Plant Line Value: 35A19
  misc_feature: MA Experiment 20000534 PARAMETER Experiment Name: Zm_Hybrid_Pollen_P Parameter: Tissue Value: Pollen vs. Aerial
catatctggtgttcctggtgcatatgttttgtggtatcgtcctctgtataatgcaatgaggactgatagtgcattgaagtttggattgttcttcttgctttacttgttccatattcttttctgcgtgtttgctgctgtggctcctcctgctgtatttgagggaaaatcattggcaggaattttgccagcaattgatcttatcagcgtaaatgctttggttgggatattctactttgttggatttggattgttttgtctggaatcgttgctcagcatctgggtcatccagcaagtgtacatgtacttccgtggaagtggaaaggctgcagagatgaagcgtgatgcgacaaggggtgcaatgagagccgcattttaagtggtatttttgtgatgatagtccaaagtcccaatcgcatacttccggtggataggttgtgccaacaaacagaggctggcatatgtttcttccttg

SEQ ID NO: 19139 - protein, 124 aa, Zea mays subsp. mays
  peptide (1)..(124): Ceres Seq. ID no. 1848110
  misc_feature (1)..(106): Pfam Name: SCAMP family Pfam Description: SCAMP family
  misc_feature (3)..(105): Homolog of NCBI NO: 38347080 NR Description: OSJNBa0006A01.21 [Oryza sativa (japonica
  misc_feature (3)..(105): Homolog of NCBI NO: 15222550 NR Description: secretory carrier membrane protein, putative
  misc_feature (1)..(123): Homolog of NCBI NO: 3941289 NR Description: similarity to SCAMP37 [Pisum sativum]
  misc_feature (1)..(122): Homolog of NCBI NO: 18379111 NR Description: expressed protein
  misc_feature (1)..(122): Homolog of NCBI NO: 7485909 NR Description: hypothetical protein F21B7.17 - Arabidopsis
  misc_feature (1)..(123): Homolog of NCBI NO: 15219893 NR Description: secretory carrier membrane protein
  misc_feature (1)..(123): Homolog of NCBI NO: 15220305 NR Description: secretory carrier membrane protein, putative
  misc_feature (1)..(123): Homolog of NCBI NO: 15226410 NR Description: putative secretory carrier-associated membrane
  misc_feature (1)..(124): Homolog of NCBI NO: 7109232 NR Description: secretory carrier membrane protein [Oryza sativa]
  misc_feature (1)..(124): Homolog of NCBI NO: 34899754 NR Description: putative secretory carrier membrane protein
ISGVPGAYVLWYRPLYNAMRTDSALKFGLFFLLYLFHILFCVFAAVAPPAVFEGKSLAGILPAIDLISVNALVGIFYFVGFGLFCLESLLSIWVIQQVYMYFRGSGKAAEMKRDATRGAMRAAF

SEQ ID NO: 19140 - protein, 106 aa, Zea mays subsp. mays
  peptide (1)..(106): Ceres Seq. ID no. 1848111
  misc_feature (1)..(88): Pfam Name: SCAMP family Pfam Description: SCAMP family
  misc_feature (1)..(87): Homolog of NCBI NO: 38347080 NR Description: OSJNBa0006A01.21 [Oryza sativa (japonica
  misc_feature (1)..(87): Homolog of NCBI NO: 15222550 NR Description: secretory carrier membrane protein, putative
  misc_feature (1)..(105): Homolog of NCBI NO: 3941289 NR Description: similarity to SCAMP37 [Pisum sativum]
  misc_feature (1)..(104): Homolog of NCBI NO: 18379111 NR Description: expressed protein
  misc_feature (1)..(104): Homolog of NCBI NO: 7485909 NR Description: hypothetical protein F21B7.17 - Arabidopsis
  misc_feature (1)..(105): Homolog of NCBI NO: 15219893 NR Description: secretory carrier membrane protein
  misc_feature (1)..(105): Homolog of NCBI NO: 15220305 NR Description: secretory carrier membrane protein, putative
  misc_feature (1)..(105): Homolog of NCBI NO: 15226410 NR Description: putative secretory carrier-associated membrane
  misc_feature (1)..(106): Homolog of NCBI NO: 7109232 NR Description: secretory carrier membrane protein [Oryza sativa]
  misc_feature (1)..(106): Homolog of NCBI NO: 34899754 NR Description: putative secretory carrier membrane protein
MRTDSALKFGLFFLLYLFHILFCVFAAVAPPAVFEGKSLAGILPAIDLISVNALVGIFYFVGFGLFCLESLLSIWVIQQVYMYFRGSGKAAEMKRDATRGAMRAAF

SEQ ID NO: 19141 - DNA, 1999 bp, Zea mays subsp. mays
  misc_feature (1)..(1999): Ceres Seq. ID no. 12375111
  misc_feature: MA Experiment ID: 108528 Result: Up-regulated in Transcription
  misc_feature: MA Experiment 108528 PARAMETER Experiment Name: Zm_Imbibed_Seeds_P Parameter: Age (day) Value: 5 vs. 2
  misc_feature: MA Experiment 108528 PARAMETER Experiment Name: Zm_Imbibed_Seeds_P Parameter: Organism Value: Zea mays
  misc_feature: MA Experiment 108528 PARAMETER Experiment Name: Zm_Imbibed_Seeds_P Parameter: Plant Line Value: 35A19
  misc_feature: MA Experiment 108528 PARAMETER Experiment Name: Zm_Imbibed_Seeds_P Parameter: Tissue Value: Aerial vs. Embryo
  misc_feature: MA Experiment ID: 108530 Result: Up-regulated in Transcription
  misc_feature: MA Experiment 108530 PARAMETER Experiment Name: Zm_Imbibed_Seeds_P Parameter: Age (day) Value: 6 vs. 2
  misc_feature: MA Experiment 108530 PARAMETER Experiment Name: Zm_Imbibed_Seeds_P Parameter: Organism Value: Zea mays
  misc_feature: MA Experiment 108530 PARAMETER Experiment Name: Zm_Imbibed_Seeds_P Parameter: Plant Line Value: 35A19
  misc_feature: MA Experiment 108530 PARAMETER Experiment Name: Zm_Imbibed_Seeds_P Parameter: Tissue Value: Aerial vs. Embryo
  misc_feature: MA Experiment ID: 108535 Result: Down-regulated in Transcription
  misc_feature: MA Experiment 108535 PARAMETER Experiment Name: Zm_Meristem_P Parameter: Age (day) Value: 8
  misc_feature: MA Experiment 108535 PARAMETER Experiment Name: Zm_Meristem_P Parameter: Organism Value: Zea mays
  misc_feature: MA Experiment 108535 PARAMETER Experiment Name: Zm_Meristem_P Parameter: Plant Line Value: 35A19
  misc_feature: MA Experiment 108535 PARAMETER Experiment Name: Zm_Meristem_P Parameter: Tissue Value: Root Meristem vs. Above Root Meristem
  misc_feature: MA Experiment ID: 108543 Result: Down-regulated in Transcription
  misc_feature: MA Experiment ID: 108547 Result: Up-regulated in Transcription
  misc_feature: MA Experiment 108547 PARAMETER Experiment Name: Zm_Imbibed_Seeds_P Parameter: Age (day) Value: 4 vs. 2
  misc_feature: MA Experiment 108547 PARAMETER Experiment Name: Zm_Imbibed_Seeds_P Parameter: Organism Value: Zea mays
  misc_feature: MA Experiment 108547 PARAMETER Experiment Name: Zm_Imbibed_Seeds_P Parameter: Plant Line Value: 35A19
  misc_feature: MA Experiment 108547 PARAMETER Experiment Name: Zm_Imbibed_Seeds_P Parameter: Tissue Value: Aerial vs. Embryo
  misc_feature: MA Experiment ID: 108689 Result: Up-regulated in Transcription
  misc_feature: MA Experiment 108689 PARAMETER Experiment Name: Zm_Drought_Roots_P Parameter: Age (day) Value: 9
  misc_feature: MA Experiment 108689 PARAMETER Experiment Name: Zm_Drought_Roots_P Parameter: Organism Value: Zea mays
  misc_feature: MA Experiment 108689 PARAMETER Experiment Name: Zm_Drought_Roots_P Parameter: Plant Line Value: 35A19
  misc_feature: MA Experiment 108689 PARAMETER Experiment Name: Zm_Drought_Roots_P Parameter: Timepoint (hr) Value: 24
  misc_feature: MA Experiment 108689 PARAMETER Experiment Name: Zm_Drought_Roots_P Parameter: Tissue Value: Roots
  misc_feature: MA Experiment 108689 PARAMETER Experiment Name: Zm_Drought_Roots_P Parameter: Treatment Value: Drought vs. No Drought
gcggcgcggcgagactgctgagcccgaggaaacgggaagagaggagaaaagcaaaacgaagctcggaaccacgagacgacggagaggatgggcttcagcgtcctgctctcaccgccgccccttccgctcccgagcgccaccgctgcggccgacttgtacctaatattcggcggccacgatcgccgccgccgccgcccgctggaacacggctgccgctgcggccgccccccggagacggcgctcggcggcagctcaggccgccgcggctcgtacgatgacgacgggacggctccaggctccctcggcctcgacggcagcagcacgtcctcctcggtccgtcggacggggagtgcaaaaccaagatatcaagtaacttcgaaagaagaggacacacaaaatgcagaccgcgaggggtggcaatatagtacagaaggcctttcaaagagcatgtccaagtcaaggtacatcaaagtatttggggttgatttgtcccctgataatgtggctgttgctattgtttacttcgtgcaaggagttttaggcctttcgaggcttgctgtcagcttctacttaaaagataatcttcatcttgagccagcagagactgcagttatatctgggttctcagccttgccatggttggtcaagcccctctacggttttatcagtgattccatccctctctttggatatcgaagaaggtcgtacctatttctatcaggcatccttggagcactttcatggagtttgatggccgctgttgtggatgataaatatagtgcagcactctctattattcttggatctcttgcagttgccatatctgatgttgtggttgattctatggtggttgagagagctcgaggtgaatcacagagtacatctggatctctccagtcgctatgttggggatcctcagccttcggaggagtcgtgagtgcatacttcagtggttctttagtggatacttatggtgtaagatttgtttttggtgttacagcacttctgccactgatgacatctgctgttgcagttcttgtaaatgaagaacgcttacctttggggaaaagttcagtctcactttcagtttcaggttcagaattaattgagagctctaagcaacgtatcatgcagatttgggattcagtaaagcaacccagcatactcctacccaccttgttcatattcctttggcaagcaacaccgcaatcagactctgccatgtttttcttcataacaaataagctcgggtttactccagaatttctaggacgcgttacgcttgtcacatctgttgcatccttactggaatcggagtgtataatttgtttctgaaggaagttccattgaggaaaatctttcttgtgacaacagtcttaggttctgctctcggaatgacacaggttcttcttgtcactgggctcaaccggaagcttggcataagcgacgaatggttctccattggggattctttgattatcacagtccttggccaggcttcctttatgcctgtcctggtgttggctgcaaagttgtgccctgtgggagcggaagcaactttatttgccactttgatgtccatctctaacgccggaggtgttgccggaggtctggtgggcgcgggtctgacgcagttactgggagtcagcagagacaacttcgaaaaccttgctctgctgatcgcgatttgcaatctcagttccctgctacctctgcctcttctgggtctcctgccagatgaatcccgtaatgcagatggtgcacagaccaaaaatgactgatgcttgtatatctccacgcgtctttacaagacgaaagggcatacacatacactcatcggcacaaagcagcgcagctgatgacgtgaacaaaacatggaagctgatgtataggatgtattatctatgatgtatagtaagtaacgttagattaattatgaaacatatttgtaataaatttaattgaaagtataaatactccttttcataaaacgaggttt

SEQ ID NO: 19142 - protein, 415 aa, Zea mays subsp. mays
  peptide (1)..(415): Ceres Seq. ID no. 12375112
  misc_feature (148)..(407): Pfam Name: BT1 family Pfam Description: BT1 family
  misc_feature (131)..(407): Homolog of NCBI NO: 23489460 NR Description: hypothetical protein [Plasmodium yoelii yoelii]
  misc_feature (114)..(407): Homolog of NCBI NO: 17231777 NR Description: hypothetical protein [Nostoc sp. PCC 7120]
  misc_feature (143)..(407): Homolog of NCBI NO: 25408206 NR Description: hypothetical protein At2g32040 [imported] -
  misc_feature (129)..(407): Homolog of NCBI NO: 3033544 NR Description: hypothetical protein [Synechococcus sp. PCC 7942]
  misc_feature (129)..(407): Homolog of NCBI NO: 22297560 NR Description: ORF_ID:tll0016~hypothetical protein
  misc_feature (113)..(406): Homolog of NCBI NO: 23041501 NR Description: hypothetical protein [Trichodesmium erythraeum
  misc_feature (139)..(407): Homolog of NCBI NO: 16331564 NR Description: integral membrane protein [Synechocystis sp. PCC
  misc_feature (112)..(406): Homolog of NCBI NO: 23130611 NR Description: hypothetical protein [Nostoc punctiforme]
  misc_feature (94)..(407): Homolog of NCBI NO: 18402856 NR Description: expressed protein
  misc_feature (91)..(407): Homolog of NCBI NO: 34394451 NR Description: putative integral membrane protein
MGFSVLLSPPPLPLPSATAAADLYLIFGGHDRRRRRPLEHGCRCGRPPETALGGSSGRRGSYDDDGTAPGSLGLDGSSTSSSVRRTGSAKPRYQVTSKEEDTQNADREGWQYSTEGLSKSMSKSRYIKVFGVDLSPDNVAVAIVYFVQGVLGLSRLAVSFYLKDNLHLEPAETAVISGFSALPWLVKPLYGFISDSIPLFGYRRRSYLFLSGILGALSWSLMAAVVDDKYSAALSIILGSLAVAISDVVVDSMVVERARGESQSTSGSLQSLCWGSSAFGGVVSAYFSGSLVDTYGVRFVFGVTALLPLMTSAVAVLVNEERLPLGKSSVSLSVSGSELIESSKQRIMQIWDSVKQPSILLPTLFIFLWQATPQSDSAMFFFITNKLGFTPEFLGRVTLVTSVASLLESECIICF

SEQ ID NO: 19143 - protein, 295 aa, Zea mays subsp. mays
  peptide (1)..(295): Ceres Seq. ID no. 12375113
  misc_feature (28)..(287): Pfam Name: BT1 family Pfam Description: BT1 family
  misc_feature (11)..(287): Homolog of NCBI NO: 23489460 NR Description: hypothetical protein [Plasmodium yoelii yoelii]
  misc_feature (1)..(287): Homolog of NCBI NO: 17231777 NR Description: hypothetical protein [Nostoc sp. PCC 7120]
  misc_feature (23)..(287): Homolog of NCBI NO: 25408206 NR Description: hypothetical protein At2g32040 [imported] -
  misc_feature (9)..(287): Homolog of NCBI NO: 3033544 NR Description: hypothetical protein [Synechococcus sp. PCC 7942]
  misc_feature (9)..(287): Homolog of NCBI NO: 22297560 NR Description: ORF_ID:tll0016~hypothetical protein
  misc_feature (1)..(286): Homolog of NCBI NO: 23041501 NR Description: hypothetical protein [Trichodesmium erythraeum
  misc_feature (19)..(287): Homolog of NCBI NO: 16331564 NR Description: integral membrane protein [Synechocystis sp. PCC
  misc_feature (1)..(286): Homolog of NCBI NO: 23130611 NR Description: hypothetical protein [Nostoc punctiforme]
  misc_feature (1)..(287): Homolog of NCBI NO: 18402856 NR Description: expressed protein
  misc_feature (1)..(287): Homolog of NCBI NO: 34394451 NR Description: putative integral membrane protein
MSKSRYIKVFGVDLSPDNVAVAIVYFVQGVLGLSRLAVSFYLKDNLHLEPAETAVISGFSALPWLVKPLYGFISDSIPLFGYRRRSYLFLSGILGALSWSLMAAVVDDKYSAALSIILGSLAVAISDVVVDSMVVERARGESQSTSGSLQSLCWGSSAFGGVVSAYFSGSLVDTYGVRFVFGVTALLPLMTSAVAVLVNEERLPLGKSSVSLSVSGSELIESSKQRIMQIWDSVKQPSILLPTLFIFLWQATPQSDSAMFFFITNKLGFTPEFLGRVTLVTSVASLLESECIICF

SEQ ID NO: 19144 - DNA, 1721 bp, Zea mays subsp. mays
  misc_feature (1)..(1721): Ceres Seq. ID no. 12435567
  misc_feature: MA Experiment ID: 108522 Result: Up-regulated in Transcription
  misc_feature: MA Experiment 108522 PARAMETER Experiment Name: Zm_42deg_Heat_P Parameter: Age (day) Value: 8
  misc_feature: MA Experiment 108522 PARAMETER Experiment Name: Zm_42deg_Heat_P Parameter: Organism Value: Zea mays
  misc_feature: MA Experiment 108522 PARAMETER Experiment Name: Zm_42deg_Heat_P Parameter: Plant Line Value: 35A19
  misc_feature: MA Experiment 108522 PARAMETER Experiment Name: Zm_42deg_Heat_P Parameter: Temperature (deg C) Value: 42 vs. 22
  misc_feature: MA Experiment 108522 PARAMETER Experiment Name: Zm_42deg_Heat_P Parameter: Timepoint (hr) Value: 1
  misc_feature: MA Experiment 108522 PARAMETER Experiment Name: Zm_42deg_Heat_P Parameter: Tissue Value: Aerial
  misc_feature: MA Experiment ID: 108523 Result: Up-regulated in Transcription
  misc_feature: MA Experiment 108523 PARAMETER Experiment Name: Zm_42deg_Heat_P Parameter: Age (day) Value: 8
  misc_feature: MA Experiment 108523 PARAMETER Experiment Name: Zm_42deg_Heat_P Parameter: Organism Value: Zea mays
  misc_feature: MA Experiment 108523 PARAMETER Experiment Name: Zm_42deg_Heat_P Parameter: Plant Line Value: 35A19
  misc_feature: MA Experiment 108523 PARAMETER Experiment Name: Zm_42deg_Heat_P Parameter: Temperature (deg C) Value: 42 vs. 22
  misc_feature: MA Experiment 108523 PARAMETER Experiment Name: Zm_42deg_Heat_P Parameter: Timepoint (hr) Value: 6
  misc_feature: MA Experiment 108523 PARAMETER Experiment Name: Zm_42deg_Heat_P Parameter: Tissue Value: Aerial
  misc_feature: MA Experiment ID: 108527 Result: Down-regulated in Transcription
  misc_feature: MA Experiment 108527 PARAMETER Experiment Name: Zm_5mM_NO_P Parameter: Age (day) Value: 8
  misc_feature: MA Experiment 108527 PARAMETER Experiment Name: Zm_5mM_NO_P Parameter: Organism Value: Zea mays
  misc_feature: MA Experiment 108527 PARAMETER Experiment Name: Zm_5mM_NO_P Parameter: Plant Line Value: 35A19
  misc_feature: MA Experiment 108527 PARAMETER Experiment Name: Zm_5mM_NO_P Parameter: Timepoint (hr) Value: 6
  misc_feature: MA Experiment 108527 PARAMETER Experiment Name: Zm_5mM_NO_P Parameter: Tissue Value: Aerial
  misc_feature: MA Experiment 108527 PARAMETER Experiment Name: Zm_5mM_NO_P Parameter: Treatment Value: 5mM NO vs. No Treatment
  misc_feature: MA Experiment ID: 108528 Result: Up-regulated in Transcription
  misc_feature: MA Experiment 108528 PARAMETER Experiment Name: Zm_Imbibed_Seeds_P Parameter: Age (day) Value: 5 vs. 2
  misc_feature: MA Experiment 108528 PARAMETER Experiment Name: Zm_Imbibed_Seeds_P Parameter: Organism Value: Zea mays
  misc_feature: MA Experiment 108528 PARAMETER Experiment Name: Zm_Imbibed_Seeds_P Parameter: Plant Line Value: 35A19
  misc_feature: MA Experiment 108528 PARAMETER Experiment Name: Zm_Imbibed_Seeds_P Parameter: Tissue Value: Aerial vs. Embryo
  misc_feature: MA Experiment ID: 108530 Result: Up-regulated in Transcription
  misc_feature: MA Experiment 108530 PARAMETER Experiment Name: Zm_Imbibed_Seeds_P Parameter: Age (day) Value: 6 vs. 2
  misc_feature: MA Experiment 108530 PARAMETER Experiment Name: Zm_Imbibed_Seeds_P Parameter: Organism Value: Zea mays
  misc_feature: MA Experiment 108530 PARAMETER Experiment Name: Zm_Imbibed_Seeds_P Parameter: Plant Line Value: 35A19
  misc_feature: MA Experiment 108530 PARAMETER Experiment Name: Zm_Imbibed_Seeds_P Parameter: Tissue Value: Aerial vs. Embryo
  misc_feature: MA Experiment ID: 108534 Result: Up-regulated in Transcription
  misc_feature: MA Experiment 108534 PARAMETER Experiment Name: Zm_4deg_Cold_P Parameter: Age (hr) Value: 8
  misc_feature: MA Experiment 108534 PARAMETER Experiment Name: Zm_4deg_Cold_P Parameter: Organism Value: Zea mays
  misc_feature: MA Experiment 108534 PARAMETER Experiment Name: Zm_4deg_Cold_P Parameter: Plant Line Value: 35A19
  misc_feature: MA Experiment 108534 PARAMETER Experiment Name: Zm_4deg_Cold_P Parameter: Temperature (deg C) Value: 4 vs. 22
  misc_feature: MA Experiment 108534 PARAMETER Experiment Name: Zm_4deg_Cold_P Parameter: Timepoint (hr) Value: 6
  misc_feature: MA Experiment 108534 PARAMETER Experiment Name: Zm_4deg_Cold_P Parameter: Tissue Value: Aerial
  misc_feature: MA Experiment ID: 108543 Result: Down-regulated in Transcription
  misc_feature: MA Experiment ID: 108545 Result: Up-regulated in Transcription
  misc_feature: MA Experiment 108545 PARAMETER Experiment Name: Zm_Imbibed_Seeds_P Parameter: Age (day) Value: 3 vs. 2
  misc_feature: MA Experiment 108545 PARAMETER Experiment Name: Zm_Imbibed_Seeds_P Parameter: Organism Value: Zea mays
  misc_feature: MA Experiment 108545 PARAMETER Experiment Name: Zm_Imbibed_Seeds_P Parameter: Plant Line Value: 35A19
  misc_feature: MA Experiment 108545 PARAMETER Experiment Name: Zm_Imbibed_Seeds_P Parameter: Tissue Value: Aerial vs. Embryo
  misc_feature: MA Experiment ID: 108547 Result: Up-regulated in Transcription
  misc_feature: MA Experiment 108547 PARAMETER Experiment Name: Zm_Imbibed_Seeds_P Parameter: Age (day) Value: 4 vs. 2
  misc_feature: MA Experiment 108547 PARAMETER Experiment Name: Zm_Imbibed_Seeds_P Parameter: Organism Value: Zea mays
  misc_feature: MA Experiment 108547 PARAMETER Experiment Name: Zm_Imbibed_Seeds_P Parameter: Plant Line Value: 35A19
  misc_feature: MA Experiment 108547 PARAMETER Experiment Name: Zm_Imbibed_Seeds_P Parameter: Tissue Value: Aerial vs. Embryo
  misc_feature: MA Experiment ID: 108559 Result: Down-regulated in Transcription
  misc_feature: MA Experiment 108559 PARAMETER Experiment Name: Zm_5mM_NO_P Parameter: Age (day) Value: 8
  misc_feature: MA Experiment 108559 PARAMETER Experiment Name: Zm_5mM_NO_P Parameter: Organism Value: Zea mays
  misc_feature: MA Experiment 108559 PARAMETER Experiment Name: Zm_5mM_NO_P Parameter: Plant Line Value: 35A19
  misc_feature: MA Experiment 108559 PARAMETER Experiment Name: Zm_5mM_NO_P Parameter: Timepoint (hr) Value: 12
  misc_feature: MA Experiment 108559 PARAMETER Experiment Name: Zm_5mM_NO_P Parameter: Tissue Value: Aerial
  misc_feature: MA Experiment 108559 PARAMETER Experiment Name: Zm_5mM_NO_P Parameter: Treatment Value: 5mM NO vs. No Treatment
  misc_feature: MA Experiment ID: 108688 Result: Down-regulated in Transcription
  misc_feature: MA Experiment 108688 PARAMETER Experiment Name: Zm_Embryos-Flowers__P Parameter: Tissue Value: Immature Flowers vs. Aerial+
  misc_feature: MA Experiment ID: 108689 Result: Up-regulated in Transcription
  misc_feature: MA Experiment 108689 PARAMETER Experiment Name: Zm_Drought_Roots_P Parameter: Age (day) Value: 9
  misc_feature: MA Experiment 108689 PARAMETER Experiment Name: Zm_Drought_Roots_P Parameter: Organism Value: Zea mays
  misc_feature: MA Experiment 108689 PARAMETER Experiment Name: Zm_Drought_Roots_P Parameter: Plant Line Value: 35A19
  misc_feature: MA Experiment 108689 PARAMETER Experiment Name: Zm_Drought_Roots_P Parameter: Timepoint (hr) Value: 24
  misc_feature: MA Experiment 108689 PARAMETER Experiment Name: Zm_Drought_Roots_P Parameter: Tissue Value: Roots
  misc_feature: MA Experiment 108689 PARAMETER Experiment Name: Zm_Drought_Roots_P Parameter: Treatment Value: Drought vs. No Drought
  misc_feature: MA Experiment ID: 20000535 Result: Up-regulated in Transcription
  misc_feature: MA Experiment 20000535 PARAMETER Experiment Name: Zm_Hybrid_Seed_Dev_P Parameter: DAP Value: 30 vs. 12
  misc_feature: MA Experiment 20000535 PARAMETER Experiment Name: Zm_Hybrid_Seed_Dev_P Parameter: Organism Value: Zea mays
  misc_feature: MA Experiment 20000535 PARAMETER Experiment Name: Zm_Hybrid_Seed_Dev_P Parameter: Plant Line Value: 35A19
  misc_feature: MA Experiment 20000535 PARAMETER Experiment Name: Zm_Hybrid_Seed_Dev_P Parameter: Tissue Value: Embryo vs. Unfert Floret
gcacgagaccattacctagaacatcctaatcgaaaaagtgccatggctgaagcagcgccccacttcgtgctcgtgccgatgctggcgcagggccacttgctccccatgctggacctggcgcgcgtcctcgccagccacggcgcccgtgccacggtggtgctgacgcccgtcaacgccgcgcgcaacagggccttcctggagcaggccgcgggggcggggctcaccatcaacttcgccgagctcgcgttcccggggccagcgctcggcctcgccgcgggctgcgagagggtcgacatgctgcaagacctctccctcatcgtcccgttctacgatgccgtgtggctgctcgccgagccgctcgaggcgtacctcctctcgctgccccggatgccggactgcctcgtctccgactcgttcatggcgtggactgccagcgtcgcgcggcggcacggcatccttcggttcgtggtccacttctcgcccgcgtcctacgtcctcgccgcgcacatcctcgaaacgcgcggcgtctacgaccgcgccgccgacgacttcgaaccgttcgaggtgccggagttccccgtacgcgccgtggtgagcagggctacggcgcaaggggtcttccagtggcctgcaggcatggagaggttccggcgcgacacgctcgatgccgaggccaccgccgacgggatactgttcaacacgtgtgctgccctggaggacgcgttcgtggagcgcttcgcttcggaggtcggcaagaagatttgggcggtcgggccgctgttcctcctcggttccggttccgacgccggcgggatggccgggagaggcaaccgcgcggcggtggacgccgaccaaatcgtgtcctggcttgacgcgcgtccggcggcgtccgtgctctacatcagcttcggcagcatcggccgtctgttcccggctcaggccgccgagctcgccgccggactggaggcgtcgcgcctgccgttcatctggtcggccaaggagacggcgcccggcctcgacgcgggaattcgaggagcgcgtgaaggaccggggcctcgtcgtccacgggtgggcgccccagatgaccatcctgtcgcaccctgccgtgggcggcttcctgacgcactgcggctggaactccatcctggagagcctctgctacggcgtgccgctcatgacctggccgctgttcgtcgaccagttcctgaacgaggcgttggtcgtggacgtgctcggcgccggcgtccgctccggcgccaaggtgccggtgacgcacgtgacggtcgtgaagccaggggaggtgctggaagtgcaggtctggagggacggcgtcgagagggcggtcaccgacctcatggacgagggccccgcgggcgcggcgaggcgggcgagggccaaggagctcgggcaacagatgagggccgcaatggcgaagggtgggtcgtcggacaccgatgtgaggaacttggttcgccacgtcgttgaggtcgcgcggaaaaaggaggagcacgaggacacggctcttgctggaggtgaccaagtgatcacgagcaaggaaaagacgatgaacggcgccggtggaaaacactactgatgaaattcgtgtggtacggtcgtttttggctgaaagaatctctcgagttaagctagctactagccacgcaacccaacttgcatgtaccagcagcaatgacatattatgttatcgtgctttttgtgcg

SEQ ID NO: 19145 - protein, 494 aa, Zea mays subsp. mays
  peptide (1)..(494): Ceres Seq. ID no. 12435568
  misc_feature (21)..(345): Pfam Name: UDP-glucoronosyl and UDP-glucosyl transferase Pfam Description: UDP-glucoronosyl and UDP-glucosyl transferase
  misc_feature (16)..(334): Homolog of NCBI NO: 32816176 NR Description: flavonoid glucosyl-transferase [Allium cepa]
  misc_feature (16)..(334): Homolog of NCBI NO: 32816174 NR Description: flavonoid glucosyl-transferase [Allium cepa]
  misc_feature (21)..(330): Homolog of NCBI NO: 15228032 NR Description: putative glucosyl transferase; protein id:
  misc_feature (21)..(333): Homolog of NCBI NO: 34910294 NR Description: putative glucosyl transferase
  misc_feature (18)..(333): Homolog of NCBI NO: 34910292 NR Description: putative glucosyl transferase
  misc_feature (13)..(330): Homolog of NCBI NO: 15228037 NR Description: putative glucosyl transferase
  misc_feature (21)..(330): Homolog of NCBI NO: 15228035 NR Description: putative glucosyl transferase; protein id:
  misc_feature (21)..(330): Homolog of NCBI NO: 26450153 NR Description: putative glucosyl transferase [Arabidopsis
  misc_feature (11)..(333): Homolog of NCBI NO: 34910296 NR Description: putative glucosyl transferase
  misc_feature (14)..(345): Homolog of NCBI NO: 37531692 NR Description: putative glucosyltransferase
ARDHYLEHPNRKSAMAEAAPHFVLVPMLAQGHLLPMLDLARVLASHGARATVVLTPVNAARNRAFLEQAAGAGLTINFAELAFPGPALGLAAGCERVDMLQDLSLIVPFYDAVWLLAEPLEAYLLSLPRMPDCLVSDSFMAWTASVARRHGILRFVVHFSPASYVLAAHILETRGVYDRAADDFEPFEVPEFPVRAVVSRATAQGVFQWPAGMERFRRDTLDAEATADGILFNTCAALEDAFVERFASEVGKKIWAVGPLFLLGSGSDAGGMAGRGNRAAVDADQIVSWLDARPAASVLYISFGSIGRLFPAQAAELAAGLEASRLPFIWSAKETAPGLDAGIRGAREGPGPRRPRVGAPDDHPVAPCRGRLPDALRLELHPGEPLLRRAAHDLAAVRRPVPERGVGRGRARRRRPLRRQGAGDARDGREARGGAGSAGLEGRRREGGHRPHGRGPRGRGEAGEGQGARATDEGRNGEGWVVGHRCEELGSPRR

SEQ ID NO: 19146 - protein, 480 aa, Zea mays subsp. mays
  peptide (1)..(480): Ceres Seq. ID no. 12435569
  misc_feature (7)..(331): Pfam Name: UDP-glucoronosyl and UDP-glucosyl transferase Pfam Description: UDP-glucoronosyl and UDP-glucosyl transferase
  misc_feature (7)..(316): Homolog of NCBI NO: 15228032 NR Description: putative glucosyl transferase; protein id:
  misc_feature (7)..(316): Homolog of NCBI NO: 26450153 NR Description: putative glucosyl transferase [Arabidopsis
  misc_feature (7)..(319): Homolog of NCBI NO: 34910294 NR Description: putative glucosyl transferase
  misc_feature (7)..(316): Homolog of NCBI NO: 15228035 NR Description: putative glucosyl transferase; protein id:
  misc_feature (4)..(319): Homolog of NCBI NO: 34910292 NR Description: putative glucosyl transferase
  misc_feature (1)..(316): Homolog of NCBI NO: 15228037 NR Description: putative glucosyl transferase
  misc_feature (2)..(320): Homolog of NCBI NO: 32816176 NR Description: flavonoid glucosyl-transferase [Allium cepa]
  misc_feature (2)..(320): Homolog of NCBI NO: 32816174 NR Description: flavonoid glucosyl-transferase [Allium cepa]
  misc_feature (1)..(319): Homolog of NCBI NO: 34910296 NR Description: putative glucosyl transferase
  misc_feature (1)..(331): Homolog of NCBI NO: 37531692 NR Description: putative glucosyltransferase
MAEAAPHFVLVPMLAQGHLLPMLDLARVLASHGARATVVLTPVNAARNRAFLEQAAGAGLTINFAELAFPGPALGLAAGCERVDMLQDLSLIVPFYDAVWLLAEPLEAYLLSLPRMPDCLVSDSFMAWTASVARRHGILRFVVHFSPASYVLAAHILETRGVYDRAADDFEPFEVPEFPVRAVVSRATAQGVFQWPAGMERFRRDTLDAEATADGILFNTCAALEDAFVERFASEVGKKIWAVGPLFLLGSGSDAGGMAGRGNRAAVDADQIVSWLDARPAASVLYISFGSIGRLFPAQAAELAAGLEASRLPFIWSAKETAPGLDAGIRGAREGPGPRRPRVGAPDDHPVAPCRGRLPDALRLELHPGEPLLRRAAHDLAAVRRPVPERGVGRGRARRRRPLRRQGAGDARDGREARGGAGSAGLEGRRREGGHRPHGRGPRGRGEAGEGQGARATDEGRNGEGWVVGHRCEELGSPRR

SEQ ID NO: 19147 - protein, 468 aa, Zea mays subsp. mays
  peptide (1)..(468): Ceres Seq. ID no. 12435570
  misc_feature (1)..(319): Pfam Name: UDP-glucoronosyl and UDP-glucosyl transferase Pfam Description: UDP-glucoronosyl and UDP-glucosyl transferase
  misc_feature (1)..(304): Homolog of NCBI NO: 15228032 NR Description: putative glucosyl transferase; protein id:
  misc_feature (1)..(304): Homolog of NCBI NO: 26450153 NR Description: putative glucosyl transferase [Arabidopsis
  misc_feature (1)..(307): Homolog of NCBI NO: 34910294 NR Description: putative glucosyl transferase
  misc_feature (1)..(304): Homolog of NCBI NO: 15228035 NR Description: putative glucosyl transferase; protein id:
  misc_feature (1)..(307): Homolog of NCBI NO: 34910292 NR Description: putative glucosyl transferase
  misc_feature (1)..(304): Homolog of NCBI NO: 15228037 NR Description: putative glucosyl transferase
  misc_feature (1)..(308): Homolog of NCBI NO: 32816176 NR Description: flavonoid glucosyl-transferase [Allium cepa]
  misc_feature (1)..(308): Homolog of NCBI NO: 32816174 NR Description: flavonoid glucosyl-transferase [Allium cepa]
  misc_feature (1)..(307): Homolog of NCBI NO: 34910296 NR Description: putative glucosyl transferase
  misc_feature (1)..(319): Homolog of NCBI NO: 37531692 NR Description: putative glucosyltransferase
MLAQGHLLPMLDLARVLASHGARATVVLTPVNAARNRAFLEQAAGAGLTINFAELAFPGPALGLAAGCERVDMLQDLSLIVPFYDAVWLLAEPLEAYLLSLPRMPDCLVSDSFMAWTASVARRHGILRFVVHFSPASYVLAAHILETRGVYDRAADDFEPFEVPEFPVRAVVSRATAQGVFQWPAGMERFRRDTLDAEATADGILFNTCAALEDAFVERFASEVGKKIWAVGPLFLLGSGSDAGGMAGRGNRAAVDADQIVSWLDARPAASVLYISFGSIGRLFPAQAAELAAGLEASRLPFIWSAKETAPGLDAGIRGAREGPGPRRPRVGAPDDHPVAPCRGRLPDALRLELHPGEPLLRRAAHDLAAVRRPVPERGVGRGRARRRRPLRRQGAGDARDGREARGGAGSAGLEGRRREGGHRPHGRGPRGRGEAGEGQGARATDEGRNGEGWVVGHRCEELGSPRR

SEQ ID NO: 19148 - DNA, 1330 bp, Zea mays subsp. mays
  misc_feature (1)..(1330): Ceres Seq. ID no. 12383496
  misc_feature: MA Experiment ID: 108540 Result: Up-regulated in Transcription
  misc_feature: MA Experiment 108540 PARAMETER Experiment Name: Zm_20percent_PEG_P Parameter: Age (day) Value: 8
  misc_feature: MA Experiment 108540 PARAMETER Experiment Name: Zm_20percent_PEG_P Parameter: Organism Value: Zea mays
  misc_feature: MA Experiment 108540 PARAMETER Experiment Name: Zm_20percent_PEG_P Parameter: Plant Line Value: 35A19
  misc_feature: MA Experiment 108540 PARAMETER Experiment Name: Zm_20percent_PEG_P Parameter: Timepoint (hr) Value: 6
  misc_feature: MA Experiment 108540 PARAMETER Experiment Name: Zm_20percent_PEG_P Parameter: Tissue Value: Aerial
  misc_feature: MA Experiment 108540 PARAMETER Experiment Name: Zm_20percent_PEG_P Parameter: Treatment Value: 20percent PEG vs. No Treatment
  misc_feature: MA Experiment ID: 108544 Result: Down-regulated in Transcription
  misc_feature: MA Experiment ID: 108556 Result: Up-regulated in Transcription
  misc_feature: MA Experiment 108556 PARAMETER Experiment Name: Zm_Drought_P Parameter: Age (day) Value: 9
  misc_feature: MA Experiment 108556 PARAMETER Experiment Name: Zm_Drought_P Parameter: Organism Value: Zea mays
  misc_feature: MA Experiment 108556 PARAMETER Experiment Name: Zm_Drought_P Parameter: Plant Line Value: 35A19
  misc_feature: MA Experiment 108556 PARAMETER Experiment Name: Zm_Drought_P Parameter: Timepoint (hr) Value: 24
  misc_feature: MA Experiment 108556 PARAMETER Experiment Name: Zm_Drought_P Parameter: Tissue Value: Aerial
  misc_feature: MA Experiment 108556 PARAMETER Experiment Name: Zm_Drought_P Parameter: Treatment Value: Drought vs. No Drought
  misc_feature: MA Experiment ID: 108597 Result: Up-regulated in Transcription
  misc_feature: MA Experiment 108597 PARAMETER Experiment Name: Zm_100uM_ABA_P Parameter: Age (day) Value: 9
  misc_feature: MA Experiment 108597 PARAMETER Experiment Name: Zm_100uM_ABA_P Parameter: Organism Value: Zea mays
  misc_feature: MA Experiment 108597 PARAMETER Experiment Name: Zm_100uM_ABA_P Parameter: Plant Line Value: 35A19
  misc_feature: MA Experiment 108597 PARAMETER Experiment Name: Zm_100uM_ABA_P Parameter: Timepoint (hr) Value: 24
  misc_feature: MA Experiment 108597 PARAMETER Experiment Name: Zm_100uM_ABA_P Parameter: Tissue Value: Aerial
  misc_feature: MA Experiment 108597 PARAMETER Experiment Name: Zm_100uM_ABA_P Parameter: Treatment Value: 100uM ABA vs. No Treatment
  misc_feature: MA Experiment ID: 20000477 Result: Up-regulated in Transcription
  misc_feature: MA Experiment 20000477 PARAMETER Experiment Name: Zm_5mM_SA_P Parameter: Age (day) Value: 10
  misc_feature: MA Experiment 20000477 PARAMETER Experiment Name: Zm_5mM_SA_P Parameter: Organism Value: Zea mays
  misc_feature: MA Experiment 20000477 PARAMETER Experiment Name: Zm_5mM_SA_P Parameter: Plant Line Value: 35A19
  misc_feature: MA Experiment 20000477 PARAMETER Experiment Name: Zm_5mM_SA_P Parameter: Timepoint (hr) Value: 48
  misc_feature: MA Experiment 20000477 PARAMETER Experiment Name: Zm_5mM_SA_P Parameter: Tissue Value: Aerial
  misc_feature: MA Experiment 20000477 PARAMETER Experiment Name: Zm_5mM_SA_P Parameter: Treatment Value: 5mM SA vs. No Treatment
  misc_feature: MA Experiment ID: 20000479 Result: Up-regulated in Transcription
  misc_feature: MA Experiment 20000479 PARAMETER Experiment Name: Zm_Drought_P Parameter: Age (day) Value: 10
  misc_feature: MA Experiment 20000479 PARAMETER Experiment Name: Zm_Drought_P Parameter: Organism Value: Zea mays
  misc_feature: MA Experiment 20000479 PARAMETER Experiment Name: Zm_Drought_P Parameter: Plant Line Value: 35A19
  misc_feature: MA Experiment 20000479 PARAMETER Experiment Name: Zm_Drought_P Parameter: Timepoint (hr) Value: 48
  misc_feature: MA Experiment 20000479 PARAMETER Experiment Name: Zm_Drought_P Parameter: Tissue Value: Aerial
  misc_feature: MA Experiment 20000479 PARAMETER Experiment Name: Zm_Drought_P Parameter: Treatment Value: Drought vs. No Drought
  misc_feature: MA Experiment ID: 20000480 Result: Up-regulated in Transcription
  misc_feature: MA Experiment 20000480 PARAMETER Experiment Name: Zm_Drought_P Parameter: Age (day) Value: 11
  misc_feature: MA Experiment 20000480 PARAMETER Experiment Name: Zm_Drought_P Parameter: Organism Value: Zea mays
  misc_feature: MA Experiment 20000480 PARAMETER Experiment Name: Zm_Drought_P Parameter: Plant Line Value: 35A19
  misc_feature: MA Experiment 20000480 PARAMETER Experiment Name: Zm_Drought_P Parameter: Timepoint (hr) Value: 72
  misc_feature: MA Experiment 20000480 PARAMETER Experiment Name: Zm_Drought_P Parameter: Tissue Value: Aerial
  misc_feature: MA Experiment 20000480 PARAMETER Experiment Name: Zm_Drought_P Parameter: Treatment Value: Drought vs. No Drought
  misc_feature: MA Experiment ID: 20000535 Result: Down-regulated in Transcription
  misc_feature: MA Experiment 20000535 PARAMETER Experiment Name: Zm_Hybrid_Seed_Dev_P Parameter: DAP Value: 30 vs. 12
  misc_feature: MA Experiment 20000535 PARAMETER Experiment Name: Zm_Hybrid_Seed_Dev_P Parameter: Organism Value: Zea mays
  misc_feature: MA Experiment 20000535 PARAMETER Experiment Name: Zm_Hybrid_Seed_Dev_P Parameter: Plant Line Value: 35A19
  misc_feature: MA Experiment 20000535 PARAMETER Experiment Name: Zm_Hybrid_Seed_Dev_P Parameter: Tissue Value: Embryo vs. Unfert Floret
gaattttcgatagtataaacttccactccaaatttaagttcaactgacaccgtttgcagcttctttgaccgcgcggcgatcgtcaccgacggcgacctggtcacgctgacggacgcggactccggcaagccgtcgacggcccccgtcccggacctgtggcgcctgagcaccgtgcaccgcgtggaggagctcaagtcggtgatccgcatgggtcctatctgggcggcgggcatcctggtgatcacggggtcgtcgacgcagaacaccttctctctgcagcaggcgagcaccatggaccgccgcctcgcgccgggcctctccacgttcgagatccccgcggggtccatgaccgtcttcgggctgctggccatgctcttcaccctcttcgtctacgaccgcgcgctcatccgcgtggcgcgccgcttcacggggctggaccgcggcatctccttcctgcaccgcatgggcgtcggcttcgccatcagcgtgctcgccaccctggtcgccggcttcgtggagcggcaccgcagggacgcggcggcggcggccggcgccacggacgccggcacgtccccgctgtcggcctactggctggtgccgcagtacgcgctgcatggcgtggccgaggcgttcacctccgtggggcacctcgagttcatgtacgaccaggcgcccgagagcatgcgcagcacggcgacggcgctcttctggctgtccatctcgctgggaagctacgcgagcacctgctggtggacgctgtgcaccgctggagcgcggggcccggcggcgccaactggctgccggacaacatcaatcacggcaggctggattacttttactgggtcgtcacggtactgcaggtcatgaacctggtgtactacgccatttgcgccaagcggttcacgttcaagccagtgcagctcaacaagaaagaggaggaagaaggcggcaaggtacttgtggagttgcaaganaaggtttaatttgagcagcatgcactttcagctatgtgcaggtacatgtctaatagaaaggaagtactcatcagtgctaggaagatcctcagaaaaactcccaaggtattactatataaatctatgtgagcatctgtattagtcaagtagatcaagaatgcaggaaggttgttcaggcaagcaacctcagaaattgtcaaggatcacatgacagctttgtggatggcagaagctatctggtctggtcctgagacttggcacaggtgcaaaacacaactcgactatatttgtaattagaaagcaggcacgaggcacatgtctgaactctgaaacttgacgttaatgcatagtactgt

SEQ ID NO: 19149 - protein, 219 aa, Zea mays subsp. mays
  peptide (1)..(219): Ceres Seq. ID no. 12383497
  misc_feature (1)..(171): Pfam Name: POT family Pfam Description: POT family
  misc_feature (1)..(187): Homolog of NCBI NO: 4102839 NR Description: LeOPT1 [Lycopersicon esculentum]
  misc_feature (1)..(191): Homolog of NCBI NO: 34907736 NR Description: putative peptide transport protein
  misc_feature (1)..(179): Homolog of NCBI NO: 7489404 NR Description: peptide transport protein - barley
  misc_feature (1)..(186): Homolog of NCBI NO: 34895718 NR Description: putative peptide transport protein
  misc_feature (1)..(191): Homolog of NCBI NO: 34394155 NR Description: putative peptide transport protein
  misc_feature (1)..(179): Homolog of NCBI NO: 25404847 NR Description: probable peptide transporter T17F3.10
  misc_feature (1)..(179): Homolog of NCBI NO: 18409391 NR Description: putative peptide transporter
  misc_feature (1)..(179): Homolog of NCBI NO: 15391731 NR Description: nitrite transporter [Cucumis sativus]
  misc_feature (1)..(179): Homolog of NCBI NO: 7484755 NR Description: nitrite transport protein, chloroplast - cucumber
  misc_feature (1)..(184): Homolog of NCBI NO: 15221439 NR Description: peptide transporter, putative
MGPIWAAGILVITGSSTQNTFSLQQASTMDRRLAPGLSTFEIPAGSMTVFGLLAMLFTLFVYDRALIRVARRFTGLDRGISFLHRMGVGFAISVLATLVAGFVERHRRDAAAAAGATDAGTSPLSAYWLVPQYALHGVAEAFTSVGHLEFMYDQAPESMRSTATALFWLSISLGSYASTCWWTLCTAGARGPAAPTGCRTTSITAGWITFTGSSRYCRS

SEQ ID NO: 19150 - protein, 191 aa, Zea mays subsp. mays
  peptide (1)..(191): Ceres Seq. ID no. 12383498
  misc_feature (1)..(143): Pfam Name: POT family Pfam Description: POT family
  misc_feature (1)..(159): Homolog of NCBI NO: 4102839 NR Description: LeOPT1 [Lycopersicon esculentum]
  misc_feature (1)..(163): Homolog of NCBI NO: 34907736 NR Description: putative peptide transport protein
  misc_feature (1)..(151): Homolog of NCBI NO: 7489404 NR Description: peptide transport protein - barley
  misc_feature (1)..(158): Homolog of NCBI NO: 34895718 NR Description: putative peptide transport protein
  misc_feature (1)..(163): Homolog of NCBI NO: 34394155 NR Description: putative peptide transport protein
  misc_feature (1)..(151): Homolog of NCBI NO: 25404847 NR Description: probable peptide transporter T17F3.10
  misc_feature (1)..(151): Homolog of NCBI NO: 18409391 NR Description: putative peptide transporter
  misc_feature (1)..(151): Homolog of NCBI NO: 15391731 NR Description: nitrite transporter [Cucumis sativus]
  misc_feature (1)..(151): Homolog of NCBI NO: 7484755 NR Description: nitrite transport protein, chloroplast - cucumber
  misc_feature (1)..(156): Homolog of NCBI NO: 15221439 NR Description: peptide transporter, putative
MDRRLAPGLSTFEIPAGSMTVFGLLAMLFTLFVYDRALIRVARRFTGLDRGISFLHRMGVGFAISVLATLVAGFVERHRRDAAAAAGATDAGTSPLSAYWLVPQYALHGVAEAFTSVGHLEFMYDQAPESMRSTATALFWLSISLGSYASTCWWTLCTAGARGPAAPTGCRTTSITAGWITFTGSSRYCRS

SEQ ID NO: 19151 - protein, 173 aa, Zea mays subsp. mays
  peptide (1)..(173): Ceres Seq. ID no. 12383499
  misc_feature (1)..(125): Pfam Name: POT family Pfam Description: POT family
  misc_feature (1)..(141): Homolog of NCBI NO: 4102839 NR Description: LeOPT1 [Lycopersicon esculentum]
  misc_feature (1)..(145): Homolog of NCBI NO: 34907736 NR Description: putative peptide transport protein
  misc_feature (1)..(133): Homolog of NCBI NO: 7489404 NR Description: peptide transport protein - barley
  misc_feature (1)..(140): Homolog of NCBI NO: 34895718 NR Description: putative peptide transport protein
  misc_feature (1)..(145): Homolog of NCBI NO: 34394155 NR Description: putative peptide transport protein
  misc_feature (1)..(133): Homolog of NCBI NO: 25404847 NR Description: probable peptide transporter T17F3.10
  misc_feature (1)..(133): Homolog of NCBI NO: 18409391 NR Description: putative peptide transporter
  misc_feature (1)..(133): Homolog of NCBI NO: 15391731 NR Description: nitrite transporter [Cucumis sativus]
  misc_feature (1)..(133): Homolog of NCBI NO: 7484755 NR Description: nitrite transport protein, chloroplast - cucumber
  misc_feature (1)..(138): Homolog of NCBI NO: 15221439 NR Description: peptide transporter, putative
MTVFGLLAMLFTLFVYDRALIRVARRFTGLDRGISFLHRMGVGFAISVLATLVAGFVERHRRDAAAAAGATDAGTSPLSAYWLVPQYALHGVAEAFTSVGHLEFMYDQAPESMRSTATALFWLSISLGSYASTCWWTLCTAGARGPAAPTGCRTTSITAGWITFTGSSRYCRS

SEQ ID NO: 19152 - DNA, 2345 bp, Zea mays subsp. mays
  misc_feature (1)..(2345): Ceres Seq. ID no. 13637382
  misc_feature: MA Experiment ID: 108522 Result: Up-regulated in Transcription
  misc_feature: MA Experiment 108522 PARAMETER Experiment Name: Zm_42deg_Heat_P Parameter: Age (day) Value: 8
  misc_feature: MA Experiment 108522 PARAMETER Experiment Name: Zm_42deg_Heat_P Parameter: Organism Value: Zea mays
  misc_feature: MA Experiment 108522 PARAMETER Experiment Name: Zm_42deg_Heat_P Parameter: Plant Line Value: 35A19
  misc_feature: MA Experiment 108522 PARAMETER Experiment Name: Zm_42deg_Heat_P Parameter: Temperature (deg C) Value: 42 vs. 22
  misc_feature: MA Experiment 108522 PARAMETER Experiment Name: Zm_42deg_Heat_P Parameter: Timepoint (hr) Value: 1
  misc_feature: MA Experiment 108522 PARAMETER Experiment Name: Zm_42deg_Heat_P Parameter: Tissue Value: Aerial
  misc_feature: MA Experiment ID: 108523 Result: Up-regulated in Transcription
  misc_feature: MA Experiment 108523 PARAMETER Experiment Name: Zm_42deg_Heat_P Parameter: Age (day) Value: 8
  misc_feature: MA Experiment 108523 PARAMETER Experiment Name: Zm_42deg_Heat_P Parameter: Organism Value: Zea mays
  misc_feature: MA Experiment 108523 PARAMETER Experiment Name: Zm_42deg_Heat_P Parameter: Plant Line Value: 35A19
  misc_feature: MA Experiment 108523 PARAMETER Experiment Name: Zm_42deg_Heat_P Parameter: Temperature (deg C) Value: 42 vs. 22
  misc_feature: MA Experiment 108523 PARAMETER Experiment Name: Zm_42deg_Heat_P Parameter: Timepoint (hr) Value: 6
  misc_feature: MA Experiment 108523 PARAMETER Experiment Name: Zm_42deg_Heat_P Parameter: Tissue Value: Aerial
  misc_feature: MA Experiment ID: 108527 Result: Down-regulated in Transcription
  misc_feature: MA Experiment 108527 PARAMETER Experiment Name: Zm_5mM_NO_P Parameter: Age (day) Value: 8
  misc_feature: MA Experiment 108527 PARAMETER Experiment Name: Zm_5mM_NO_P Parameter: Organism Value: Zea mays
  misc_feature: MA Experiment 108527 PARAMETER Experiment Name: Zm_5mM_NO_P Parameter: Plant Line Value: 35A19
  misc_feature: MA Experiment 108527 PARAMETER Experiment Name: Zm_5mM_NO_P Parameter: Timepoint (hr) Value: 6
  misc_feature: MA Experiment 108527 PARAMETER Experiment Name: Zm_5mM_NO_P Parameter: Tissue Value: Aerial
  misc_feature: MA Experiment 108527 PARAMETER Experiment Name: Zm_5mM_NO_P Parameter: Treatment Value: 5mM NO vs. No Treatment
  misc_feature: MA Experiment ID: 108535 Result: Up-regulated in Transcription
  misc_feature: MA Experiment 108535 PARAMETER Experiment Name: Zm_Meristem_P Parameter: Age (day) Value: 8
  misc_feature: MA Experiment 108535 PARAMETER Experiment Name: Zm_Meristem_P Parameter: Organism Value: Zea mays
  misc_feature: MA Experiment 108535 PARAMETER Experiment Name: Zm_Meristem_P Parameter: Plant Line Value: 35A19
  misc_feature: MA Experiment 108535 PARAMETER Experiment Name: Zm_Meristem_P Parameter: Tissue Value: Root Meristem vs. Above Root Meristem
  misc_feature: MA Experiment ID: 108544 Result: Down-regulated in Transcription
atcagacagacgcagactctctcacccgactcgtcagacgtcagccagcagttcgaaaccaaggatcgatccaggagcttccggaaggcgaggcgcgcgcgcagcgtcgaggtgctggtgccggtgccgcccatggatcgggctcgcggatccgcgttcctgctcggcgtcctgctcgcaggatccttgttcgcgttttcagttgccatagaggagaccaagaagctcgggaccgtgatcggtatcgatctcggtaccacctactcctgtgtcggtgtgtacaagaacggtcatgtcgagatcatcgccaatgaccagggtaaccgtatcacaccctcatgggttgccttcaccgatagcgagaggctcatcgggtgaggctgccaagaaccaggcagccgtcaaccctgagaggaccatctttgacgtcaagcgtctcatcggaagaaagttcgcggacaaggaagtccagagggacatgaaacttgttccctacaagattattaacaaggatggcaagccctacattcaggtcaagatcaaggatggggagaacaaggtcttcagccctgaggagatcagtgccatgattcttggcaagatgaaggatactgctgaggcataccttggcaagaagatcaatgatgctgtcgtcactgtccctgcgtacttcaatgatgcgcagaggcaggcaaccaaggatgctggtgtcattgctggcctcaatgttgctaggatcatcaatgagccaactgctgctgctattgcctatggtttggacaagaagggtggcgagaagaacatccttgtctttgaccttggtggtggcacttttgatgtcagtatcttgaccattgacaacggtgtgtttgaggtgctggccaccaatggtgacactcatcttggaggtgaggactttgaccagaggatcatggagtacttcatcaagttgatcaagaagaagtacagcaaggacatcagcaaggacaaccgtgctcttggaaagctgaggagggaagccgagcgcgccaagagagccctcagcaaccagcaccaggtccgtgttgagatcgagtccctctttgacgggaccgatttctcggagccgctgacccgtgccaggtttgaggagctgaacaacgacctcttccgcaagaccatgggccctgtcaagaaggccatggaggatgctggccttgagaagagccagatccacgagatcgtcctggttggtggaagcaccaggattcccaaggtccagcagctcctgcgggactacttcgacggcaaggagcccaacaagggtgtcaaccctgatgaggctgttgcctttggtgccgctgtgcagggaagcatcttgagcggcgagggtggtgacgagaccaaagatatcctcctccttgatgtggctcccctcaccctgggtatcgagaccgtcggtggagtcatgaccaagttgatcccgaggaacactgtcatcccgaccaagaagtcgcaggtgttcaccacctaccaggaccagcagaccactgtctccatccaggtctttgagggtgagcgcagtatgaccaaggactgccgtcttctcggcaagttcgacctcaacggcattgcgccagctccaaggggcacaccccagatcgaggtgaccttcgaggtggacgccaacggtatcctgaacgtgaaggcggaggacaagggcacgggcaagtcggagaagatcacgatcacgaacgagaaggggcggctgagccaggaggagatcgaccgcatggtgcgggaggcggaggagttcgcggaggaggacaagaaggtgaaggagcggatcgacgcccgcaaccagctggagacgtacgtgtacaacatgaagaacacggtgggcgacaaggacaagctcgcggacaagctggaggcggaggagaaggagaaggtggaggaggccctcaaggaggcgctggagtggctggacgacaaccagtcggccgagaaggaggactacgaggagaagctcaaggaggtggaggccgtgtgcaaccccatcgtgtcggccgtgtaccagcggtcgggcggcgcccctggcggtgacgctgacggcggtgttgacgacgaccacgacgagctgtagatggttgtagatggtggtggtgacgtggagtgccgggagccgagccaaattttgtaacggtgtttagcggcggacaatacttattactaatcttggtgctgctctgccaatagccgtgctgagcgtagaaactgtttgtttgtaatttttttttcttctacttccttggttgttcaggattcggattcgaattttatgtgaaaaaagaagtcgcgctttt

SEQ ID NO: 19153 - protein, 610 aa, Zea mays subsp. mays
  peptide (1)..(610): Ceres Seq. ID no. 13637383
  misc_feature (28)..(610): Homolog of NCBI NO: 729623 NR Description: Luminal binding protein 5 precursor (BiP 5) (78
MSRSSPMTRVTVSHPHGLPSPIARGSSGEAAKNQAAVNPERTIFDVKRLIGRKFADKEVQRDMKLVPYKIINKDGKPYIQVKIKDGENKVFSPEEISAMILGKMKDTAEAYLGKKINDAVVTVPAYFNDAQRQATKDAGVIAGLNVARIINEPTAAAIAYGLDKKGGEKNILVFDLGGGTFDVSILTIDNGVFEVLATNGDTHLGGEDFDQRIMEYFIKLIKKKYSKDISKDNRALGKLRREAERAKRALSNQHQVRVEIESLFDGTDFSEPLTRARFEELNNDLFRKTMGPVKKAMEDAGLEKSQIHEIVLVGGSTRIPKVQQLLRDYFDGKEPNKGVNPDEAVAFGAAVQGSILSGEGGDETKDILLLDVAPLTLGIETVGGVMTKLIPRNTVIPTKKSQVFTTYQDQQTTVSIQVFEGERSMTKDCRLLGKFDLNGIAPAPRGTPQIEVTFEVDANGILNVKAEDKGTGKSEKITITNEKGRLSQEEIDRMVREAEEFAEEDKKVKERIDARNQLETYVYNMKNTVGDKDKLADKLEAEEKEKVEEALKEALEWLDDNQSAEKEDYEEKLKEVEAVCNPIVSAVYQRSGGAPGGDADGGVDDDHDEL

SEQ ID NO: 19154 - protein, 604 aa, Zea mays subsp. mays
  peptide (1)..(604): Ceres Seq. ID no. 13637384
  misc_feature (22)..(604): Homolog of NCBI NO: 729623 NR Description: Luminal binding protein 5 precursor (BiP 5) (78
MTRVTVSHPHGLPSPIARGSSGEAAKNQAAVNPERTIFDVKRLIGRKFADKEVQRDMKLVPYKIINKDGKPYIQVKIKDGENKVFSPEEISAMILGKMKDTAEAYLGKKINDAVVTVPAYFNDAQRQATKDAGVIAGLNVARIINEPTAAAIAYGLDKKGGEKNILVFDLGGGTFDVSILTIDNGVFEVLATNGDTHLGGEDFDQRIMEYFIKLIKKKYSKDISKDNRALGKLRREAERAKRALSNQHQVRVEIESLFDGTDFSEPLTRARFEELNNDLFRKTMGPVKKAMEDAGLEKSQIHEIVLVGGSTRIPKVQQLLRDYFDGKEPNKGVNPDEAVAFGAAVQGSILSGEGGDETKDILLLDVAPLTLGIETVGGVMTKLIPRNTVIPTKKSQVFTTYQDQQTTVSIQVFEGERSMTKDCRLLGKFDLNGIAPAPRGTPQIEVTFEVDANGILNVKAEDKGTGKSEKITITNEKGRLSQEEIDRMVREAEEFAEEDKKVKERIDARNQLETYVYNMKNTVGDKDKLADKLEAEEKEKVEEALKEALEWLDDNQSAEKEDYEEKLKEVEAVCNPIVSAVYQRSGGAPGGDADGGVDDDHDEL

SEQ ID NO: 19155 - protein, 548 aa, Zea mays subsp. mays
  peptide (1)..(548): Ceres Seq. ID no. 13637385
  misc_feature (1)..(548): Homolog of NCBI NO: 729623 NR Description: Luminal binding protein 5 precursor (BiP 5) (78
MKLVPYKIINKDGKPYIQVKIKDGENKVFSPEEISAMILGKMKDTAEAYLGKKINDAVVTVPAYFNDAQRQATKDAGVIAGLNVARIINEPTAAAIAYGLDKKGGEKNILVFDLGGGTFDVSILTIDNGVFEVLATNGDTHLGGEDFDQRIMEYFIKLIKKKYSKDISKDNRALGKLRREAERAKRALSNQHQVRVEIESLFDGTDFSEPLTRARFEELNNDLFRKTMGPVKKAMEDAGLEKSQIHEIVLVGGSTRIPKVQQLLRDYFDGKEPNKGVNPDEAVAFGAAVQGSILSGEGGDETKDILLLDVAPLTLGIETVGGVMTKLIPRNTVIPTKKSQVFTTYQDQQTTVSIQVFEGERSMTKDCRLLGKFDLNGIAPAPRGTPQIEVTFEVDANGILNVKAEDKGTGKSEKITITNEKGRLSQEEIDRMVREAEEFAEEDKKVKERIDARNQLETYVYNMKNTVGDKDKLADKLEAEEKEKVEEALKEALEWLDDNQSAEKEDYEEKLKEVEAVCNPIVSAVYQRSGGAPGGDADGGVDDDHDEL

SEQ ID NO: 19156 - DNA, 1674 bp, Zea mays subsp. mays; identical to SEQ ID NO: 10039
  misc_feature (1)..(1674): Ceres Seq. ID no. 12405979
  misc_feature: MA Experiment ID: 108503 Result: Up-regulated in Transcription
  misc_feature: MA Experiment 108503 PARAMETER Experiment Name: Zm_Drought_P Parameter: Age (day) Value: 8
  misc_feature: MA Experiment 108503 PARAMETER Experiment Name: Zm_Drought_P Parameter: Organism Value: Zea mays
  misc_feature: MA Experiment 108503 PARAMETER Experiment Name: Zm_Drought_P Parameter: Plant Line Value: 35A19
  misc_feature: MA Experiment 108503 PARAMETER Experiment Name: Zm_Drought_P Parameter: Timepoint (hr) Value: 6
  misc_feature: MA Experiment 108503 PARAMETER Experiment Name: Zm_Drought_P Parameter: Tissue Value: Aerial
  misc_feature: MA Experiment 108503 PARAMETER Experiment Name: Zm_Drought_P Parameter: Treatment Value: Drought vs. No Drought
  misc_feature: MA Experiment ID: 108504 Result: Up-regulated in Transcription
  misc_feature: MA Experiment 108504 PARAMETER Experiment Name: Zm_Drought_P Parameter: Age (day) Value: 8
  misc_feature: MA Experiment 108504 PARAMETER Experiment Name: Zm_Drought_P Parameter: Organism Value: Zea mays
  misc_feature: MA Experiment 108504 PARAMETER Experiment Name: Zm_Drought_P Parameter: Plant Line Value: 35A19
  misc_feature: MA Experiment 108504 PARAMETER Experiment Name: Zm_Drought_P Parameter: Timepoint (hr) Value: 12
  misc_feature: MA Experiment 108504 PARAMETER Experiment Name: Zm_Drought_P Parameter: Tissue Value: Aerial
  misc_feature: MA Experiment 108504 PARAMETER Experiment Name: Zm_Drought_P Parameter: Treatment Value: Drought vs. No Drought
  misc_feature: MA Experiment ID: 108513 Result: Up-regulated in Transcription
  misc_feature: MA Experiment 108513 PARAMETER Experiment Name: Zm_100uM_ABA_P Parameter: Age (day) Value: 8
  misc_feature: MA Experiment 108513 PARAMETER Experiment Name: Zm_100uM_ABA_P Parameter: Organism Value: Zea mays
  misc_feature: MA Experiment 108513 PARAMETER Experiment Name: Zm_100uM_ABA_P Parameter: Plant Line Value: 35A19
  misc_feature: MA Experiment 108513 PARAMETER Experiment Name: Zm_100uM_ABA_P Parameter: Timepoint (hr) Value: 6
  misc_feature: MA Experiment 108513 PARAMETER Experiment Name: Zm_100uM_ABA_P Parameter: Tissue Value: Aerial
  misc_feature: MA Experiment 108513 PARAMETER Experiment Name: Zm_100uM_ABA_P Parameter: Treatment Value: 100uM ABA vs. No Treatment
  misc_feature: MA Experiment ID: 108540 Result: Up-regulated in Transcription
  misc_feature: MA Experiment 108540 PARAMETER Experiment Name: Zm_20percent_PEG_P Parameter: Age (day) Value: 8
  misc_feature: MA Experiment 108540 PARAMETER Experiment Name: Zm_20percent_PEG_P Parameter: Organism Value: Zea mays
  misc_feature: MA Experiment 108540 PARAMETER Experiment Name: Zm_20percent_PEG_P Parameter: Plant Line Value: 35A19
  misc_feature: MA Experiment 108540 PARAMETER Experiment Name: Zm_20percent_PEG_P Parameter: Timepoint (hr) Value: 6
  misc_feature: MA Experiment 108540 PARAMETER Experiment Name: Zm_20percent_PEG_P Parameter: Tissue Value: Aerial
  misc_feature: MA Experiment 108540 PARAMETER Experiment Name: Zm_20percent_PEG_P Parameter: Treatment Value: 20percent PEG vs. No Treatment
  misc_feature: MA Experiment ID: 108556 Result: Up-regulated in Transcription
  misc_feature: MA Experiment 108556 PARAMETER Experiment Name: Zm_Drought_P Parameter: Age (day) Value: 9
  misc_feature: MA Experiment 108556 PARAMETER Experiment Name: Zm_Drought_P Parameter: Organism Value: Zea mays
  misc_feature: MA Experiment 108556 PARAMETER Experiment Name: Zm_Drought_P Parameter: Plant Line Value: 35A19
  misc_feature: MA Experiment 108556 PARAMETER Experiment Name: Zm_Drought_P Parameter: Timepoint (hr) Value: 24
  misc_feature: MA Experiment 108556 PARAMETER Experiment Name: Zm_Drought_P Parameter: Tissue Value: Aerial
  misc_feature: MA Experiment 108556 PARAMETER Experiment Name: Zm_Drought_P Parameter: Treatment Value: Drought vs. No Drought
  misc_feature: MA Experiment ID: 108597 Result: Up-regulated in Transcription
  misc_feature: MA Experiment 108597 PARAMETER Experiment Name: Zm_100uM_ABA_P Parameter: Age (day) Value: 9
  misc_feature: MA Experiment 108597 PARAMETER Experiment Name: Zm_100uM_ABA_P Parameter: Organism Value: Zea mays
  misc_feature: MA Experiment 108597 PARAMETER Experiment Name: Zm_100uM_ABA_P Parameter: Plant Line Value: 35A19
  misc_feature: MA Experiment 108597 PARAMETER Experiment Name: Zm_100uM_ABA_P Parameter: Timepoint (hr) Value: 24
  misc_feature: MA Experiment 108597 PARAMETER Experiment Name: Zm_100uM_ABA_P Parameter: Tissue Value: Aerial
  misc_feature: MA Experiment 108597 PARAMETER Experiment Name: Zm_100uM_ABA_P Parameter: Treatment Value: 100uM ABA vs. No Treatment
  misc_feature: MA Experiment ID: 108689 Result: Up-regulated in Transcription
  misc_feature: MA Experiment 108689 PARAMETER Experiment Name: Zm_Drought_Roots_P Parameter: Age (day) Value: 9
  misc_feature: MA Experiment 108689 PARAMETER Experiment Name: Zm_Drought_Roots_P Parameter: Organism Value: Zea mays
  misc_feature: MA Experiment 108689 PARAMETER Experiment Name: Zm_Drought_Roots_P Parameter: Plant Line Value: 35A19
  misc_feature: MA Experiment 108689 PARAMETER Experiment Name: Zm_Drought_Roots_P Parameter: Timepoint (hr) Value: 24
  misc_feature: MA Experiment 108689 PARAMETER Experiment Name: Zm_Drought_Roots_P Parameter: Tissue Value: Roots
  misc_feature: MA Experiment 108689 PARAMETER Experiment Name: Zm_Drought_Roots_P Parameter: Treatment Value: Drought vs. No Drought
  misc_feature: MA Experiment ID: 20000479 Result: Up-regulated in Transcription
  misc_feature: MA Experiment 20000479 PARAMETER Experiment Name: Zm_Drought_P Parameter: Age (day) Value: 10
  misc_feature: MA Experiment 20000479 PARAMETER Experiment Name: Zm_Drought_P Parameter: Organism Value: Zea mays
  misc_feature: MA Experiment 20000479 PARAMETER Experiment Name: Zm_Drought_P Parameter: Plant Line Value: 35A19
  misc_feature: MA Experiment 20000479 PARAMETER Experiment Name: Zm_Drought_P Parameter: Timepoint (hr) Value: 48
  misc_feature: MA Experiment 20000479 PARAMETER Experiment Name: Zm_Drought_P Parameter: Tissue Value: Aerial
  misc_feature: MA Experiment 20000479 PARAMETER Experiment Name: Zm_Drought_P Parameter: Treatment Value: Drought vs. No Drought
  misc_feature: MA Experiment ID: 20000480 Result: Up-regulated in Transcription
  misc_feature: MA Experiment 20000480 PARAMETER Experiment Name: Zm_Drought_P Parameter: Age (day) Value: 11
  misc_feature: MA Experiment 20000480 PARAMETER Experiment Name: Zm_Drought_P Parameter: Organism Value: Zea mays
  misc_feature: MA Experiment 20000480 PARAMETER Experiment Name: Zm_Drought_P Parameter: Plant Line Value: 35A19
  misc_feature: MA Experiment 20000480 PARAMETER Experiment Name: Zm_Drought_P Parameter: Timepoint (hr) Value: 72
  misc_feature: MA Experiment 20000480 PARAMETER Experiment Name: Zm_Drought_P Parameter: Tissue Value: Aerial
  misc_feature: MA Experiment 20000480 PARAMETER Experiment Name: Zm_Drought_P Parameter: Treatment Value: Drought vs. No Drought
  misc_feature: MA Experiment ID: 20000492 Result: Down-regulated in Transcription
  misc_feature: MA Experiment 20000492 PARAMETER Experiment Name: Zm_Hybrid_Seed_Dev_P Parameter: DAP Value: 12
  misc_feature: MA Experiment 20000492 PARAMETER Experiment Name: Zm_Hybrid_Seed_Dev_P Parameter: Organism Value: Zea mays
  misc_feature: MA Experiment 20000492 PARAMETER Experiment Name: Zm_Hybrid_Seed_Dev_P Parameter: Plant Line Value: 35A19
  misc_feature: MA Experiment 20000492 PARAMETER Experiment Name: Zm_Hybrid_Seed_Dev_P Parameter: Tissue Value: Fert Kernel vs. Unfert Floret
  misc_feature: MA Experiment ID: 20001608 Result: Down-regulated in Transcription
  misc_feature: MA Experiment 20001608 PARAMETER Experiment Name: Zm_50ppm_KNO3_L-to-H_P Parameter: Age (day) Value: 21
  misc_feature: MA Experiment 20001608 PARAMETER Experiment Name: Zm_50ppm_KNO3_L-to-H_P Parameter: Organism Value: Zea mays
  misc_feature: MA Experiment 20001608 PARAMETER Experiment Name: Zm_50ppm_KNO3_L-to-H_P Parameter: Plant Line Value: 35A19
  misc_feature: MA Experiment 20001608 PARAMETER Experiment Name: Zm_50ppm_KNO3_L-to-H_P Parameter: Timepoint (hr) Value: 48
  misc_feature: MA Experiment 20001608 PARAMETER Experiment Name: Zm_50ppm_KNO3_L-to-H_P Parameter: Tissue Value: Shoots
  misc_feature: MA Experiment 20001608 PARAMETER Experiment Name: Zm_50ppm_KNO3_L-to-H_P Parameter: Treatment Value: 50ppm KNO3 vs. 50ppm KCl

SEQ ID NO: 19157 - protein, 264 aa, Zea mays subsp. mays; identical to SEQ ID NO: 10040
  peptide (1)..(264): Ceres Seq. ID no. 12405980
  misc_feature (1)..(253): Pfam Name: Protein phosphatase 2C Pfam Description: Protein phosphatase 2C
  misc_feature (1)..(264): Homolog of NCBI NO: 34908256 NR Description: putative protein phosphatase 2C [Oryza sativa
  misc_feature (1)..(262): Homolog of NCBI NO: 7768151 NR Description: protein phpsphatase 2C (PP2C) [Fagus sylvatica]
  misc_feature (1)..(264): Homolog of NCBI NO: 10432446 NR Description: protein phosphatase 2C [Nicotiana tabacum]
  misc_feature (1)..(198): Homolog of NCBI NO: 15227078 NR Description: protein phosphatase 2C (PP2C), putative; protein At2g29380.1 [Arabidopsis thaliana] >gi|25352214|pir||F84695
  misc_feature (229)..(262): Homolog of NCBI NO: 15227078 NR Description: protein phosphatase 2C (PP2C), putative; protein At2g29380.1 [Arabidopsis thaliana] >gi|25352214|pir||F84695
  misc_feature (1)..(262): Homolog of NCBI NO: 15237839 NR Description: protein phosphatase 2C (PP2C); protein id: supported by cDNA: gi_15809791, supported by cDNA: gi_16226418, by cDNA: gi_18377816 [Arabidopsis thaliana]
  misc_feature (1)..(262): Homolog of NCBI NO: 16226419 NR Description: AT5g59220/mnc17_110 [Arabidopsis thaliana]
  misc_feature (1)..(262): Homolog of NCBI NO: 33309516 NR Description: protein phosphatase 2C [Prunus avium]
  misc_feature (1)..(214): Homolog of NCBI NO: 15229745 NR Description: protein phosphatase 2C (PP2C); protein id: supported by cDNA: gi_18389241 [Arabidopsis thaliana] Protein phosphatase 2C (PP2C) >gi|1076391|pir||S55457
  misc_feature (227)..(262): Homolog of NCBI NO: 15229745 NR Description: protein phosphatase 2C (PP2C); protein id: supported by cDNA: gi_18389241 [Arabidopsis thaliana] Protein phosphatase 2C (PP2C) >gi|1076391|pir||S55457
  misc_feature (149)..(149): Xaa is any aa, unknown or other

SEQ ID NO: 19158 - protein, 260 aa, Zea mays subsp. mays; identical to SEQ ID NO: 10041
  peptide (1)..(260): Ceres Seq. ID no. 12405981
  misc_feature (1)..(249): Pfam Name: Protein phosphatase 2C Pfam Description: Protein phosphatase 2C
  misc_feature (1)..(260): Homolog of NCBI NO: 34908256 NR Description: putative protein phosphatase 2C [Oryza sativa
  misc_feature (1)..(258): Homolog of NCBI NO: 7768151 NR Description: protein phpsphatase 2C (PP2C) [Fagus sylvatica]
  misc_feature (1)..(260): Homolog of NCBI NO: 10432446 NR Description: protein phosphatase 2C [Nicotiana tabacum]
  misc_feature (1)..(194): Homolog of NCBI NO: 15227078 NR Description: protein phosphatase 2C (PP2C), putative; protein At2g29380.1 [Arabidopsis thaliana] >gi|25352214|pir||F84695
  misc_feature (225)..(258): Homolog of NCBI NO: 15227078 NR Description: protein phosphatase 2C (PP2C), putative; protein At2g29380.1 [Arabidopsis thaliana] >gi|25352214|pir||F84695
  misc_feature (1)..(258): Homolog of NCBI NO: 15237839 NR Description: protein phosphatase 2C (PP2C); protein id: supported by cDNA: gi_15809791, supported by cDNA: gi_16226418, by cDNA: gi_18377816 [Arabidopsis thaliana]
  misc_feature (1)..(258): Homolog of NCBI NO: 16226419 NR Description: AT5g59220/mnc17_110 [Arabidopsis thaliana]
  misc_feature (1)..(258): Homolog of NCBI NO: 33309516 NR Description: protein phosphatase 2C [Prunus avium]
  misc_feature (1)..(210): Homolog of NCBI NO: 15229745 NR Description: protein phosphatase 2C (PP2C); protein id: supported by cDNA: gi_18389241 [Arabidopsis thaliana] Protein phosphatase 2C (PP2C) >gi|1076391|pir||S55457
  misc_feature (223)..(258): Homolog of NCBI NO: 15229745 NR Description: protein phosphatase 2C (PP2C); protein id: supported by cDNA: gi_18389241 [Arabidopsis thaliana] Protein phosphatase 2C (PP2C) >gi|1076391|pir||S55457
  misc_feature (145)..(145): Xaa is any aa, unknown or other

SEQ ID NO: 19159 - protein, 259 aa, Zea mays subsp. mays; identical to SEQ ID NO: 10042
  peptide (1)..(259): Ceres Seq. ID no. 12405982
  misc_feature (1)..(248): Pfam Name: Protein phosphatase 2C Pfam Description: Protein phosphatase 2C
  misc_feature (1)..(259): Homolog of NCBI NO: 34908256 NR Description: putative protein phosphatase 2C [Oryza sativa
  misc_feature (1)..(257): Homolog of NCBI NO: 7768151 NR Description: protein phpsphatase 2C (PP2C) [Fagus sylvatica]
  misc_feature (1)..(259): Homolog of NCBI NO: 10432446 NR Description: protein phosphatase 2C [Nicotiana tabacum]
  misc_feature (1)..(193): Homolog of NCBI NO: 15227078 NR Description: protein phosphatase 2C (PP2C), putative; protein At2g29380.1 [Arabidopsis thaliana] >gi|25352214|pir||F84695
  misc_feature (224)..(257): Homolog of NCBI NO: 15227078 NR Description: protein phosphatase 2C (PP2C), putative; protein At2g29380.1 [Arabidopsis thaliana] >gi|25352214|pir||F84695
  misc_feature (1)..(257): Homolog of NCBI NO: 15237839 NR Description: protein phosphatase 2C (PP2C); protein id: supported by cDNA: gi_15809791, supported by cDNA: gi_16226418, by cDNA: gi_18377816 [Arabidopsis thaliana]
  misc_feature (1)..(257): Homolog of NCBI NO: 16226419 NR Description: AT5g59220/mnc17_110 [Arabidopsis thaliana]
  misc_feature (1)..(257): Homolog of NCBI NO: 33309516 NR Description: protein phosphatase 2C [Prunus avium]
  misc_feature (1)..(209): Homolog of NCBI NO: 15229745 NR Description: protein phosphatase 2C (PP2C); protein id: supported by cDNA: gi_18389241 [Arabidopsis thaliana] Protein phosphatase 2C (PP2C) >gi|1076391|pir||S55457
  misc_feature (222)..(257): Homolog of NCBI NO: 15229745 NR Description: protein phosphatase 2C (PP2C); protein id: supported by cDNA: gi_18389241 [Arabidopsis thaliana] Protein phosphatase 2C (PP2C) >gi|1076391|pir||S55457
  misc_feature (144)..(144): Xaa is any aa, unknown or other

SEQ ID NO: 19160 - DNA, 1914 bp, Zea mays subsp. mays
  misc_feature (1)..(1914): Ceres Seq. ID no. 12419897
  misc_feature: MA Experiment ID: 108528 Result: Up-regulated in Transcription
  misc_feature: MA Experiment 108528 PARAMETER Experiment Name: Zm_Imbibed_Seeds_P Parameter: Age (day) Value: 5 vs. 2
  misc_feature: MA Experiment 108528 PARAMETER Experiment Name: Zm_Imbibed_Seeds_P Parameter: Organism Value: Zea mays
  misc_feature: MA Experiment 108528 PARAMETER Experiment Name: Zm_Imbibed_Seeds_P Parameter: Plant Line Value: 35A19
  misc_feature: MA Experiment 108528 PARAMETER Experiment Name: Zm_Imbibed_Seeds_P Parameter: Tissue Value: Aerial vs. Embryo
  misc_feature: MA Experiment ID: 108529 Result: Down-regulated in Transcription
  misc_feature: MA Experiment 108529 PARAMETER Experiment Name: Zm_Imbibed_Seeds_P Parameter: Age (day) Value: 5 vs. 2
  misc_feature: MA Experiment 108529 PARAMETER Experiment Name: Zm_Imbibed_Seeds_P Parameter: Organism Value: Zea mays
  misc_feature: MA Experiment 108529 PARAMETER Experiment Name: Zm_Imbibed_Seeds_P Parameter: Plant Line Value: 35A19
  misc_feature: MA Experiment 108529 PARAMETER Experiment Name: Zm_Imbibed_Seeds_P Parameter: Tissue Value: Roots vs. Embryo
  misc_feature: MA Experiment ID: 108530 Result: Up-regulated in Transcription
  misc_feature: MA Experiment 108530 PARAMETER Experiment Name: Zm_Imbibed_Seeds_P Parameter: Age (day) Value: 6 vs. 2
  misc_feature: MA Experiment 108530 PARAMETER Experiment Name: Zm_Imbibed_Seeds_P Parameter: Organism Value: Zea mays
  misc_feature: MA Experiment 108530 PARAMETER Experiment Name: Zm_Imbibed_Seeds_P Parameter: Plant Line Value: 35A19
  misc_feature: MA Experiment 108530 PARAMETER Experiment Name: Zm_Imbibed_Seeds_P Parameter: Tissue Value: Aerial vs. Embryo
  misc_feature: MA Experiment ID: 108536 Result: Down-regulated in Transcription
  misc_feature: MA Experiment 108536 PARAMETER Experiment Name: Zm_Meristem_P Parameter: Age (day) Value: 8
  misc_feature: MA Experiment 108536 PARAMETER Experiment Name: Zm_Meristem_P Parameter: Organism Value: Zea mays
  misc_feature: MA Experiment 108536 PARAMETER Experiment Name: Zm_Meristem_P Parameter: Plant Line Value: 35A19
  misc_feature: MA Experiment 108536 PARAMETER Experiment Name: Zm_Meristem_P Parameter: Tissue Value: Shoot Meristem vs. Above Shoot Meristem
  misc_feature: MA Experiment ID: 108545 Result: Up-regulated in Transcription
  misc_feature: MA Experiment 108545 PARAMETER Experiment Name: Zm_Imbibed_Seeds_P Parameter: Age (day) Value: 3 vs. 2
  misc_feature: MA Experiment 108545 PARAMETER Experiment Name: Zm_Imbibed_Seeds_P Parameter: Organism Value: Zea mays
  misc_feature: MA Experiment 108545 PARAMETER Experiment Name: Zm_Imbibed_Seeds_P Parameter: Plant Line Value: 35A19
  misc_feature: MA Experiment 108545 PARAMETER Experiment Name: Zm_Imbibed_Seeds_P Parameter: Tissue Value: Aerial vs. Embryo
  misc_feature: MA Experiment ID: 108547 Result: Up-regulated in Transcription
  misc_feature: MA Experiment 108547 PARAMETER Experiment Name: Zm_Imbibed_Seeds_P Parameter: Age (day) Value: 4 vs. 2
  misc_feature: MA Experiment 108547 PARAMETER Experiment Name: Zm_Imbibed_Seeds_P Parameter: Organism Value: Zea mays
  misc_feature: MA Experiment 108547 PARAMETER Experiment Name: Zm_Imbibed_Seeds_P Parameter: Plant Line Value: 35A19
  misc_feature: MA Experiment 108547 PARAMETER Experiment Name: Zm_Imbibed_Seeds_P Parameter: Tissue Value: Aerial vs. Embryo
  misc_feature: MA Experiment ID: 108559 Result: Down-regulated in Transcription
  misc_feature: MA Experiment 108559 PARAMETER Experiment Name: Zm_5mM_NO_P Parameter: Age (day) Value: 8
  misc_feature: MA Experiment 108559 PARAMETER Experiment Name: Zm_5mM_NO_P Parameter: Organism Value: Zea mays
  misc_feature: MA Experiment 108559 PARAMETER Experiment Name: Zm_5mM_NO_P Parameter: Plant Line Value: 35A19
  misc_feature: MA Experiment 108559 PARAMETER Experiment Name: Zm_5mM_NO_P Parameter: Timepoint (hr) Value: 12
  misc_feature: MA Experiment 108559 PARAMETER Experiment Name: Zm_5mM_NO_P Parameter: Tissue Value: Aerial
  misc_feature: MA Experiment 108559 PARAMETER Experiment Name: Zm_5mM_NO_P Parameter: Treatment Value: 5mM NO vs. No Treatment
  misc_feature: MA Experiment ID: 20000477 Result: Down-regulated in Transcription
  misc_feature: MA Experiment 20000477 PARAMETER Experiment Name: Zm_5mM_SA_P Parameter: Age (day) Value: 10
  misc_feature: MA Experiment 20000477 PARAMETER Experiment Name: Zm_5mM_SA_P Parameter: Organism Value: Zea mays
  misc_feature: MA Experiment 20000477 PARAMETER Experiment Name: Zm_5mM_SA_P Parameter: Plant Line Value: 35A19
  misc_feature: MA Experiment 20000477 PARAMETER Experiment Name: Zm_5mM_SA_P Parameter: Timepoint (hr) Value: 48
  misc_feature: MA Experiment 20000477 PARAMETER Experiment Name: Zm_5mM_SA_P Parameter: Tissue Value: Aerial
  misc_feature: MA Experiment 20000477 PARAMETER Experiment Name: Zm_5mM_SA_P Parameter: Treatment Value: 5mM SA vs. No Treatment
  misc_feature: MA Experiment ID: 20000478 Result: Down-regulated in Transcription
  misc_feature: MA Experiment 20000478 PARAMETER Experiment Name: Zm_5mM_SA_P Parameter: Age (day) Value: 11
  misc_feature: MA Experiment 20000478 PARAMETER Experiment Name: Zm_5mM_SA_P Parameter: Organism Value: Zea mays
  misc_feature: MA Experiment 20000478 PARAMETER Experiment Name: Zm_5mM_SA_P Parameter: Plant Line Value: 35A19
  misc_feature: MA Experiment 20000478 PARAMETER Experiment Name: Zm_5mM_SA_P Parameter: Timepoint (hr) Value: 72
  misc_feature: MA Experiment 20000478 PARAMETER Experiment Name: Zm_5mM_SA_P Parameter: Tissue Value: Aerial
  misc_feature: MA Experiment 20000478 PARAMETER Experiment Name: Zm_5mM_SA_P Parameter: Treatment Value: 5mM SA vs. No Treatment
  misc_feature: MA Experiment ID: 20000479 Result: Down-regulated in Transcription
  misc_feature: MA Experiment 20000479 PARAMETER Experiment Name: Zm_Drought_P Parameter: Age (day) Value: 10
  misc_feature: MA Experiment 20000479 PARAMETER Experiment Name: Zm_Drought_P Parameter: Organism Value: Zea mays
  misc_feature: MA Experiment 20000479 PARAMETER Experiment Name: Zm_Drought_P Parameter: Plant Line Value: 35A19
  misc_feature: MA Experiment 20000479 PARAMETER Experiment Name: Zm_Drought_P Parameter: Timepoint (hr) Value: 48
  misc_feature: MA Experiment 20000479 PARAMETER Experiment Name: Zm_Drought_P Parameter: Tissue Value: Aerial
  misc_feature: MA Experiment 20000479 PARAMETER Experiment Name: Zm_Drought_P Parameter: Treatment Value: Drought vs. No Drought
  misc_feature: MA Experiment ID: 20000535 Result: Up-regulated in Transcription
  misc_feature: MA Experiment 20000535 PARAMETER Experiment Name: Zm_Hybrid_Seed_Dev_P Parameter: DAP Value: 30 vs. 12
  misc_feature: MA Experiment 20000535 PARAMETER Experiment Name: Zm_Hybrid_Seed_Dev_P Parameter: Organism Value: Zea mays
  misc_feature: MA Experiment 20000535 PARAMETER Experiment Name: Zm_Hybrid_Seed_Dev_P Parameter: Plant Line Value: 35A19
  misc_feature: MA Experiment 20000535 PARAMETER Experiment Name: Zm_Hybrid_Seed_Dev_P Parameter: Tissue Value: Embryo vs. Unfert Floret
  misc_feature: MA Experiment ID: 20000626 Result: Down-regulated in Transcription
  misc_feature: MA Experiment 20000626 PARAMETER Experiment Name: Zm_Herbicide-Treatments_P Parameter: Timepoint (hr) Value: 12
  misc_feature: MA Experiment 20000626 PARAMETER Experiment Name: Zm_Herbicide-Treatments_P Parameter: Tissue Value: Aerial
  misc_feature: MA Experiment 20000626 PARAMETER Experiment Name: Zm_Herbicide-Treatments_P Parameter: Treatment Value: Roundup vs. No Treatment
gcacgagaccattacctagaacatcctaatcaaaaaagttcttctgatctctgacttctgagcgaggagtggacgagtggtgtgccgtcgtccggttcccgttggtttggcgatgaggcgcgctcgcggtcgccgcgggctgctgcttctcctcggcgtggcgctctcggcggctgcgctgctccgtggctgcgcggggcagcaaggggaggacggctcggacgcccctgcggcggcggcggcggagacggcccccatggaggagaaggagcgcagggcgctgtacgccgccatcgagagcttcgtcggcaaggggtggaacggctccggggctctaccccagacccctgcggctggtctccccatccagggggtgtcatgtgatctcttcaatggcctgtggtacccaacagtgatgagcattggcccagtccttgacaactcgctgcagtgcggccccgacgccaagttcagcgcccagctgttcgacctgaggcgcctccggacgctgtctttctacagctgcttcccggcgagcaaccccacggccatcccgaccggcagctgggagaagctggcggggacgctggagacgctggagttccgcaccaacccgggcctgaacggcgccatcccggcgtccctcggccgcctggccagcctgcagtcgctggtgctcgtggagaacaacctgacggggcccgtgcccgcggagctgggcgcgctgtcgaggctgagacggctggtgctgtccgggaacgggctgtcggggccgatcccggtgacactcggtggcctcacggggctcctgaagatggacctgagcagcaacctgctgcagggcagcatcccgccggagctcgcggggctcaggagcctcacgctgctggacctcaggaacaacagcctcaccggcgggctgcccccagttcgtgcagggcatggcgtcgctgcaggacctgctgctctcgaacaacccgctgggcggcggcctgccgcagtccggctggggggcgctggcgggcctggccacgctggacctgtccaacgtcggcctcgtgggcgccataccggggtccatggcggccctgacggggctccggttcctggcgctggaccacaaccgcctgacgggggccgtgccgcccgagctcgcccggctgcccagcatcggcgcgctgtacctgaacggcaacaacctgacggggacgctggagttctcggccgggttctaccagcgcatggggcggcggttcgcgtcgtgggacaaccccgggctgtgctacaacgtcgcggccgtggacgcggcccacgcgccgtcgggcgtggtggtgtgcaaggacctgcaggagcccagcgtgggcggcggcgcgcgggacggggacggggacggggacgcggaggaggacgggacgaagcccgaggcgggctccatcctcgtggcctcctcgtcgtccggcatgccggttggcagtgtcggtgggctcgggtacctggtggtggttcggggaatggcggctgcggttcttgggttggtgtccctcctacaatagcaagcaagcaggttcagaagaagaacacggagaaacttgaagtaatgctaggtaggttagcacgaagtagtttctgcgcgttctctgtgatcttttggcatttgtttttggctgctggtggcttaccatcgtcagatggtgacggaggaaggagggaacatggatctggatggtgtgagccacagattacattacagtagtagagtaaactatgagagttcttgtggactgaaggtgtgtagtggtggatagggtagcttctccggggttcttttgtgtgtaattagcctgtgtcgccctgtggtgtcatgttacaacagcaagtggaaatctaagctggttcgtccgttgttggagaatc

SEQ ID NO: 19161 - protein, 546 aa, Zea mays subsp. mays
  peptide (1)..(546): Ceres Seq. ID no. 12419898
  misc_feature (283)..(438): Pfam Name: High molecular weight glutenin subunit Pfam Description: High molecular weight glutenin subunit
  misc_feature (142)..(270): Homolog of NCBI NO: 15230865 NR Description: leucine rich repeat protein family; protein id:
  misc_feature (142)..(270): Homolog of NCBI NO: 11994758 NR Description: contains similarity to elicitor-inducible
  misc_feature (142)..(270): Homolog of NCBI NO: 15222215 NR Description: leucine rich repeat protein family; protein id:
  misc_feature (159)..(270): Homolog of NCBI NO: 18409119 NR Description: leucine rich repeat protein family
  misc_feature (49)..(271): Homolog of NCBI NO: 11994758 NR Description: contains similarity to elicitor-inducible
  misc_feature (47)..(271): Homolog of NCBI NO: 15230865 NR Description: leucine rich repeat protein family; protein id:
  misc_feature (49)..(271): Homolog of NCBI NO: 15222215 NR Description: leucine rich repeat protein family; protein id:
  misc_feature (44)..(271): Homolog of NCBI NO: 18409119 NR Description: leucine rich repeat protein family
  misc_feature (130)..(276): Homolog of NCBI NO: 34894182 NR Description: P0439B06.12 [Oryza sativa (japonica
  misc_feature (1)..(278): Homolog of NCBI NO: 34894182 NR Description: P0439B06.12 [Oryza sativa (japonica
MRRARGRRGLLLLLGVALSAAALLRGCAGQQGEDGSDAPAAAAAETAPMEEKERRALYAAIESFVGKGWNGSGALPQTPAAGLPIQGVSCDLFNGLWYPTVMSIGPVLDNSLQCGPDAKFSAQLFDLRRLRTLSFYSCFPASNPTAIPTGSWEKLAGTLETLEFRTNPGLNGAIPASLGRLASLQSLVLVENNLTGPVPAELGALSRLRRLVLSGNGLSGPIPVTLGGLTGLLKMDLSSNLLQGSIPPELAGLRSLTLLDLRNNSLTGGLPPVRAGHGVAAGPAALEQPAGRRPAAVRLGGAGGPGHAGPVQRRPRGRHTGVHGGPDGAPVPGAGPQPPDGGRAARARPAAQHRRAVPERQQPDGDAGVLGRVLPAHGAAVRVVGQPRAVLQRRGRGRGPRAVGRGGVQGPAGAQRGRRRAGRGRGRGRGGGRDEARGGLHPRGLLVVRHAGWQCRWARVPGGGSGNGGCGSWVGVPPTIASKQVQKKNTEKLEVMLGRLARSSFCAFSVIFWHLFLAAGGLPSSDGDGGRREHGSGWCEPQITLQ

SEQ ID NO: 19162 - protein, 498 aa, Zea mays subsp. mays
  peptide (1)..(498): Ceres Seq. ID no. 12419899
  misc_feature (235)..(390): Pfam Name: High molecular weight glutenin subunit Pfam Description: High molecular weight glutenin subunit
  misc_feature (94)..(222): Homolog of NCBI NO: 15230865 NR Description: leucine rich repeat protein family; protein id:
  misc_feature (94)..(222): Homolog of NCBI NO: 11994758 NR Description: contains similarity to elicitor-inducible
  misc_feature (94)..(222): Homolog of NCBI NO: 15222215 NR Description: leucine rich repeat protein family; protein id:
  misc_feature (111)..(222): Homolog of NCBI NO: 18409119 NR Description: leucine rich repeat protein family
  misc_feature (1)..(223): Homolog of NCBI NO: 11994758 NR Description: contains similarity to elicitor-inducible
  misc_feature (1)..(223): Homolog of NCBI NO: 15230865 NR Description: leucine rich repeat protein family; protein id:
  misc_feature (1)..(223): Homolog of NCBI NO: 15222215 NR Description: leucine rich repeat protein family; protein id:
  misc_feature (1)..(223): Homolog of NCBI NO: 18409119 NR Description: leucine rich repeat protein family
  misc_feature (82)..(228): Homolog of NCBI NO: 34894182 NR Description: P0439B06.12 [Oryza sativa (japonica
  misc_feature (1)..(230): Homolog of NCBI NO: 34894182 NR Description: P0439B06.12 [Oryza sativa (japonica
MEEKERRALYAAIESFVGKGWNGSGALPQTPAAGLPIQGVSCDLFNGLWYPTVMSIGPVLDNSLQCGPDAKFSAQLFDLRRLRTLSFYSCFPASNPTAIPTGSWEKLAGTLETLEFRTNPGLNGAIPASLGRLASLQSLVLVENNLTGPVPAELGALSRLRRLVLSGNGLSGPIPVTLGGLTGLLKMDLSSNLLQGSIPPELAGLRSLTLLDLRNNSLTGGLPPVRAGHGVAAGPAALEQPAGRRPAAVRLGGAGGPGHAGPVQRRPRGRHTGVHGGPDGAPVPGAGPQPPDGGRAARARPAAQHRRAVPERQQPDGDAGVLGRVLPAHGAAVRVVGQPRAVLQRRGRGRGPRAVGRGGVQGPAGAQRGRRRAGRGRGRGRGGGRDEARGGLHPRGLLVVRHAGWQCRWARVPGGGSGNGGCGSWVGVPPTIASKQVQKKNTEKLEVMLGRLARSSFCAFSVIFWHLFLAAGGLPSSDGDGGRREHGSGWCEPQITLQ

SEQ ID NO: 19163 - protein, 445 aa, Zea mays subsp. mays
  peptide (1)..(445): Ceres Seq. ID no. 12419900
  misc_feature (182)..(337): Pfam Name: High molecular weight glutenin subunit Pfam Description: High molecular weight glutenin subunit
  misc_feature (41)..(169): Homolog of NCBI NO: 15230865 NR Description: leucine rich repeat protein family; protein id:
  misc_feature (41)..(169): Homolog of NCBI NO: 11994758 NR Description: contains similarity to elicitor-inducible
  misc_feature (41)..(169): Homolog of NCBI NO: 15222215 NR Description: leucine rich repeat protein family; protein id:
  misc_feature (58)..(169): Homolog of NCBI NO: 18409119 NR Description: leucine rich repeat protein family
  misc_feature (1)..(170): Homolog of NCBI NO: 11994758 NR Description: contains similarity to elicitor-inducible
  misc_feature (1)..(170): Homolog of NCBI NO: 15230865 NR Description: leucine rich repeat protein family; protein id:
  misc_feature (1)..(170): Homolog of NCBI NO: 15222215 NR Description: leucine rich repeat protein family; protein id:
  misc_feature (1)..(170): Homolog of NCBI NO: 18409119 NR Description: leucine rich repeat protein family
  misc_feature (29)..(175): Homolog of NCBI NO: 34894182 NR Description: P0439B06.12 [Oryza sativa (japonica
  misc_feature (1)..(177): Homolog of NCBI NO: 34894182 NR Description: P0439B06.12 [Oryza sativa (japonica
MSIGPVLDNSLQCGPDAKFSAQLFDLRRLRTLSFYSCFPASNPTAIPTGSWEKLAGTLETLEFRTNPGLNGAIPASLGRLASLQSLVLVENNLTGPVPAELGALSRLRRLVLSGNGLSGPIPVTLGGLTGLLKMDLSSNLLQGSIPPELAGLRSLTLLDLRNNSLTGGLPPVRAGHGVAAGPAALEQPAGRRPAAVRLGGAGGPGHAGPVQRRPRGRHTGVHGGPDGAPVPGAGPQPPDGGRAARARPAAQHRRAVPERQQPDGDAGVLGRVLPAHGAAVRVVGQPRAVLQRRGRGRGPRAVGRGGVQGPAGAQRGRRRAGRGRGRGRGGGRDEARGGLHPRGLLVVRHAGWQCRWARVPGGGSGNGGCGSWVGVPPTIASKQVQKKNTEKLEVMLGRLARSSFCAFSVIFWHLFLAAGGLPSSDGDGGRREHGSGWCEPQITLQ

SEQ ID NO: 19164 - DNA, 2516 bp, Zea mays subsp. mays
  misc_feature (1)..(2516): Ceres Seq. ID no. 12419327
  misc_feature: MA Experiment ID: 108523 Result: Down-regulated in Transcription
  misc_feature: MA Experiment 108523 PARAMETER Experiment Name: Zm_42deg_Heat_P Parameter: Age (day) Value: 8
  misc_feature: MA Experiment 108523 PARAMETER Experiment Name: Zm_42deg_Heat_P Parameter: Organism Value: Zea mays
  misc_feature: MA Experiment 108523 PARAMETER Experiment Name: Zm_42deg_Heat_P Parameter: Plant Line Value: 35A19
  misc_feature: MA Experiment 108523 PARAMETER Experiment Name: Zm_42deg_Heat_P Parameter: Temperature (deg C) Value: 42 vs. 22
  misc_feature: MA Experiment 108523 PARAMETER Experiment Name: Zm_42deg_Heat_P Parameter: Timepoint (hr) Value: 6
  misc_feature: MA Experiment 108523 PARAMETER Experiment Name: Zm_42deg_Heat_P Parameter: Tissue Value: Aerial
  misc_feature: MA Experiment ID: 108527 Result: Down-regulated in Transcription
  misc_feature: MA Experiment 108527 PARAMETER Experiment Name: Zm_5mM_NO_P Parameter: Age (day) Value: 8
  misc_feature: MA Experiment 108527 PARAMETER Experiment Name: Zm_5mM_NO_P Parameter: Organism Value: Zea mays
  misc_feature: MA Experiment 108527 PARAMETER Experiment Name: Zm_5mM_NO_P Parameter: Plant Line Value: 35A19
  misc_feature: MA Experiment 108527 PARAMETER Experiment Name: Zm_5mM_NO_P Parameter: Timepoint (hr) Value: 6
  misc_feature: MA Experiment 108527 PARAMETER Experiment Name: Zm_5mM_NO_P Parameter: Tissue Value: Aerial
  misc_feature: MA Experiment 108527 PARAMETER Experiment Name: Zm_5mM_NO_P Parameter: Treatment Value: 5mM NO vs. No Treatment
gcacgagaccattacctagaacatcctaatcgaaaagtactcccgtgcgctagtgcgctcggcgctgcccccgtccgcccgcagtccgtccccgctcgccgcccatgcgctcgccggccgcccctcggcgctcccccatctcctcccgctccgcccccgccctccgtctggtagtccgtcgccgctcctcccgcacgccagcacgacctagtagacggctcgaagcgaagacggtcccatttccagtctccgtggtcaagatggatttagaggtatccgagggttcaggtactaatgccacctcggatgaccaatcggtgcaaacgctgcctagaagggcaaagcttttggagtattttcaaccggagttagttgaggtcaatggcgtgatgaaggctatttgcaaatattgcggggcgatgttgaggagttcaagcacaaatagccttagaaaccacgttgcggatacatgtcctaaaatttcagttgaggaccgcaagcaattcattgctacaatggaaaaaggaccagcggaagcttcatttgtgtttgactctcaaaaggctcgtgagtgtatggttaagtggtgcatcagtgccgaggtcgcattcaacaagtttgacgatcctttctttgctcagtggatggagtcaatgcagccatcattcagcggtgttgggcgtcaaacaatgcaaaatgattgtattaccagattcaagatgatgaggcaagagctaagaaatgagctacaaagtcttaactctcggatttgcttgacaactaatctttggacctcaaatcagaagttgggttatctttgcttgacagcccactacattaatgcagactttatcttgaaaaaaaagattattgcgttcaaatatttgaaatatccacatacaggcctagcaatcaaagaaggaattacagagtgtctcaaagagtgggggataaaagagaagatgtttactatcacattagataatgtttctaacaatctgtcagtgcgtgaccttcgagaaagtgggctatttggaggcgatcttcgtattgtccaatgttgtgcacacatattgattctcttagttcaagatggaatggcaattgctcatggagcaatctataagattcgtgagctggtcagacatatcaattcctcaccctcccgcatacaagcttttaatgggattgctgagaggtcttgattgccttcaaaggatagattaattcttgacgttccaaaccgttggaattcgacacacgacatgattatggaggccattgagtacaaggttgtcttgaaaagatatgctgaagaacaacttgagccttcaccaaatgatgaagagtggacaaattctgaggcaattggagagtttcttgaggcatttgagaaagctacaaaagcattctcgacacatagaagtccaacatctcatttgtttttacataatgtgctatgtatccatcgaactctgagaaatacaaattggcaaatcaattgtgtgcttaaggattcggcacgggcgatggatgctaagttcgataaatactgggagaagggcaagtataacatgacacttgtcttagccaccatacttgatccatcaaagaagatggattttttggacttcttttatgagaagatgtctcaatattttgttgacatccagataaacgtggtcttggttaaacaatgtctcaccaaattatttgaaaaatatgcaacacttgttcaaatagataataaaagttcaccttttattgatataaggactagtaatttaggctcaacagttcttggaaaaagaaggttggatgaagaattttctcaatggtcccaaataagaggaagacgttttccaaagtctgagcttgacacatacttagaggaagaacttgtgagaatagatgaaagatttgaaattctaaattggtggaggacaaatgcaaacaaatacccggtgctttcagctatggcgcgtgatattttagcaatacctttgagcactgttccttcggagtttgcgttcagcgctggtggtcgtattcttgatgataatcgaagcacaatgacaccagaaacacttgaatgctttgtatgctgtaaggattggttatatgaatacccaaatattcaagcttagttgatctgacttccttcaaacatgttgaacagtacggcattcaagggagatttatgcatcattctgcgggctcctgtagctgcttagggatgacccttccactgctgctcgcttcaagcttgatcagatactctttctactgatacgcaaggtgtaaaactgccgtgttatgtggtagattggtgtgtgtactgttttctttatgtgtaaaactgtctgcttgatcaggggtgagtattgttttctttatcactctggattcatggtaatgagttcctatttcagtatttcttgccaaaaagattgttgtgcattaaggatatttgacagatgttctttgttatttctctcaagacctgaaagtttatc

SEQ ID NO: 19165 - protein, 366 aa, Zea mays subsp. mays
  peptide (1)..(366): Ceres Seq. ID no. 12419328
  misc_feature (103)..(366): Homolog of NCBI NO: 15228474 NR Description: putative transposase; protein id: At3g42170.1
  misc_feature (186)..(366): Homolog of NCBI NO: 4580990 NR Description: putative transposase [Arabidopsis thaliana]
  misc_feature (93)..(366): Homolog of NCBI NO: 8778836 NR Description: T6D22.19 [Arabidopsis thaliana]
  misc_feature (59)..(349): Homolog of NCBI NO: 32490366 NR Description: OSJNBa0049H08.1 [Oryza sativa (japonica
  misc_feature (124)..(366): Homolog of NCBI NO: 37535596 NR Description: putative Tam3-transposase
  misc_feature (51)..(366): Homolog of NCBI NO: 15223892 NR Description: transposase, putative; protein id: At1g42110.1
  misc_feature (77)..(366): Homolog of NCBI NO: 34894320 NR Description: unnamed protein product [Oryza sativa (japonica
  misc_feature (3)..(366): Homolog of NCBI NO: 37531504 NR Description: putative transposable element
  misc_feature (8)..(366): Homolog of NCBI NO: 14702012 NR Description: putative transposase [Oryza sativa (japonica
  misc_feature (53)..(366): Homolog of NCBI NO: 34908974 NR Description: P0003D09.25 [Oryza sativa (japonica
MRSPAAPRRSPISSRSAPALRLVVRRRSSRTPARPSRRLEAKTVPFPVSVVKMDLEVSEGSGTNATSDDQSVQTLPRRAKLLEYFQPELVEVNGVMKAICKYCGAMLRSSSTNSLRNHVADTCPKISVEDRKQFIATMEKGPAEASFVFDSQKARECMVKWCISAEVAFNKFDDPFFAQWMESMQPSFSGVGRQTMQNDCITRFKMMRQELRNELQSLNSRICLTTNLWTSNQKLGYLCLTAHYINADFILKKKIIAFKYLKYPHTGLAIKEGITECLKEWGIKEKMFTITLDNVSNNLSVRDLRESGLFGGDLRIVQCCAHILILLVQDGMAIAHGAIYKIRELVRHINSSPSRIQAFNGIAERS

SEQ ID NO: 19166 - protein, 314 aa, Zea mays subsp. mays
  peptide (1)..(314): Ceres Seq. ID no. 12419329
  misc_feature (51)..(314): Homolog of NCBI NO: 15228474 NR Description: putative transposase; protein id: At3g42170.1
  misc_feature (134)..(314): Homolog of NCBI NO: 4580990 NR Description: putative transposase [Arabidopsis thaliana]
  misc_feature (41)..(314): Homolog of NCBI NO: 8778836 NR Description: T6D22.19 [Arabidopsis thaliana]
  misc_feature (7)..(297): Homolog of NCBI NO: 32490366 NR Description: OSJNBa0049H08.1 [Oryza sativa (japonica
  misc_feature (72)..(314): Homolog of NCBI NO: 37535596 NR Description: putative Tam3-transposase
  misc_feature (1)..(314): Homolog of NCBI NO: 15223892 NR Description: transposase, putative; protein id: At1g42110.1
  misc_feature (25)..(314): Homolog of NCBI NO: 34894320 NR Description: unnamed protein product [Oryza sativa (japonica
  misc_feature (1)..(314): Homolog of NCBI NO: 37531504 NR Description: putative transposable element
  misc_feature (1)..(314): Homolog of NCBI NO: 14702012 NR Description: putative transposase [Oryza sativa (japonica
  misc_feature (1)..(314): Homolog of NCBI NO: 34908974 NR Description: P0003D09.25 [Oryza sativa (japonica
MDLEVSEGSGTNATSDDQSVQTLPRRAKLLEYFQPELVEVNGVMKAICKYCGAMLRSSSTNSLRNHVADTCPKISVEDRKQFIATMEKGPAEASFVFDSQKARECMVKWCISAEVAFNKFDDPFFAQWMESMQPSFSGVGRQTMQNDCITRFKMMRQELRNELQSLNSRICLTTNLWTSNQKLGYLCLTAHYINADFILKKKIIAFKYLKYPHTGLAIKEGITECLKEWGIKEKMFTITLDNVSNNLSVRDLRESGLFGGDLRIVQCCAHILILLVQDGMAIAHGAIYKIRELVRHINSSPSRIQAFNGIAERS

SEQ ID NO: 19167 - protein, 293 aa, Zea mays subsp. mays
  peptide (1)..(293): Ceres Seq. ID no. 12419330
  misc_feature (203)..(285): Pfam Name: hAT family dimerisation domain Pfam Description: hAT family dimerisation domain
  misc_feature (1)..(292): Homolog of NCBI NO: 8778836 NR Description: T6D22.19 [Arabidopsis thaliana]
  misc_feature (1)..(285): Homolog of NCBI NO: 37535596 NR Description: putative Tam3-transposase
  misc_feature (1)..(292): Homolog of NCBI NO: 15223892 NR Description: transposase, putative; protein id: At1g42110.1
  misc_feature (1)..(285): Homolog of NCBI NO: 34894320 NR Description: unnamed protein product [Oryza sativa (japonica
  misc_feature (1)..(287): Homolog of NCBI NO: 15228474 NR Description: putative transposase; protein id: At3g42170.1
  misc_feature (1)..(291): Homolog of NCBI NO: 4580990 NR Description: putative transposase [Arabidopsis thaliana]
  misc_feature (1)..(212): Homolog of NCBI NO: 34901990 NR Description: hypothetical protein [Oryza sativa (japonica
  misc_feature (1)..(285): Homolog of NCBI NO: 37531504 NR Description: putative transposable element
  misc_feature (1)..(287): Homolog of NCBI NO: 14702012 NR Description: putative transposase [Oryza sativa (japonica
  misc_feature (1)..(286): Homolog of NCBI NO: 34908974 NR Description: P0003D09.25 [Oryza sativa (japonica
MIMEAIEYKVVLKRYAEEQLEPSPNDEEWTNSEAIGEFLEAFEKATKAFSTHRSPTSHLFLHNVLCIHRTLRNTNWQINCVLKDSARAMDAKFDKYWEKGKYNMTLVLATILDPSKKMDFLDFFYEKMSQYFVDIQINVVLVKQCLTKLFEKYATLVQIDNKSSPFIDIRTSNLGSTVLGKRRLDEEFSQWSQIRGRRFPKSELDTYLEEELVRIDERFEILNWWRTNANKYPVLSAMARDILAIPLSTVPSEFAFSAGGRILDDNRSTMTPETLECFVCCKDWLYEYPNIQA

SEQ ID NO: 19168 - DNA, 2187 bp, Zea mays subsp. mays; identical to SEQ ID NO: 14180
  misc_feature (1)..(2187): Ceres Seq. ID no. 13666028
  misc_feature: MA Experiment ID: 108527 Result: Up-regulated in Transcription
  misc_feature: MA Experiment 108527 PARAMETER Experiment Name: Zm_5mM_NO_P Parameter: Age (day) Value: 8
  misc_feature: MA Experiment 108527 PARAMETER Experiment Name: Zm_5mM_NO_P Parameter: Organism Value: Zea mays
  misc_feature: MA Experiment 108527 PARAMETER Experiment Name: Zm_5mM_NO_P Parameter: Plant Line Value: 35A19
  misc_feature: MA Experiment 108527 PARAMETER Experiment Name: Zm_5mM_NO_P Parameter: Timepoint (hr) Value: 6
  misc_feature: MA Experiment 108527 PARAMETER Experiment Name: Zm_5mM_NO_P Parameter: Tissue Value: Aerial
  misc_feature: MA Experiment 108527 PARAMETER Experiment Name: Zm_5mM_NO_P Parameter: Treatment Value: 5mM NO vs. No Treatment
  misc_feature: MA Experiment ID: 108528 Result: Down-regulated in Transcription
  misc_feature: MA Experiment 108528 PARAMETER Experiment Name: Zm_Imbibed_Seeds_P Parameter: Age (day) Value: 5 vs. 2
  misc_feature: MA Experiment 108528 PARAMETER Experiment Name: Zm_Imbibed_Seeds_P Parameter: Organism Value: Zea mays
  misc_feature: MA Experiment 108528 PARAMETER Experiment Name: Zm_Imbibed_Seeds_P Parameter: Plant Line Value: 35A19
  misc_feature: MA Experiment 108528 PARAMETER Experiment Name: Zm_Imbibed_Seeds_P Parameter: Tissue Value: Aerial vs. Embryo
  misc_feature: MA Experiment ID: 108530 Result: Down-regulated in Transcription
  misc_feature: MA Experiment 108530 PARAMETER Experiment Name: Zm_Imbibed_Seeds_P Parameter: Age (day) Value: 6 vs. 2
  misc_feature: MA Experiment 108530 PARAMETER Experiment Name: Zm_Imbibed_Seeds_P Parameter: Organism Value: Zea mays
  misc_feature: MA Experiment 108530 PARAMETER Experiment Name: Zm_Imbibed_Seeds_P Parameter: Plant Line Value: 35A19
  misc_feature: MA Experiment 108530 PARAMETER Experiment Name: Zm_Imbibed_Seeds_P Parameter: Tissue Value: Aerial vs. Embryo
  misc_feature: MA Experiment ID: 108536 Result: Up-regulated in Transcription
  misc_feature: MA Experiment 108536 PARAMETER Experiment Name: Zm_Meristem_P Parameter: Age (day) Value: 8
  misc_feature: MA Experiment 108536 PARAMETER Experiment Name: Zm_Meristem_P Parameter: Organism Value: Zea mays
  misc_feature: MA Experiment 108536 PARAMETER Experiment Name: Zm_Meristem_P Parameter: Plant Line Value: 35A19
  misc_feature: MA Experiment 108536 PARAMETER Experiment Name: Zm_Meristem_P Parameter: Tissue Value: Shoot Meristem vs. Above Shoot Meristem
  misc_feature: MA Experiment ID: 108545 Result: Down-regulated in Transcription
  misc_feature: MA Experiment 108545 PARAMETER Experiment Name: Zm_Imbibed_Seeds_P Parameter: Age (day) Value: 3 vs. 2
  misc_feature: MA Experiment 108545 PARAMETER Experiment Name: Zm_Imbibed_Seeds_P Parameter: Organism Value: Zea mays
  misc_feature: MA Experiment 108545 PARAMETER Experiment Name: Zm_Imbibed_Seeds_P Parameter: Plant Line Value: 35A19
  misc_feature: MA Experiment 108545 PARAMETER Experiment Name: Zm_Imbibed_Seeds_P Parameter: Tissue Value: Aerial vs. Embryo
  misc_feature: MA Experiment ID: 108547 Result: Down-regulated in Transcription
  misc_feature: MA Experiment 108547 PARAMETER Experiment Name: Zm_Imbibed_Seeds_P Parameter: Age (day) Value: 4 vs. 2
  misc_feature: MA Experiment 108547 PARAMETER Experiment Name: Zm_Imbibed_Seeds_P Parameter: Organism Value: Zea mays
  misc_feature: MA Experiment 108547 PARAMETER Experiment Name: Zm_Imbibed_Seeds_P Parameter: Plant Line Value: 35A19
  misc_feature: MA Experiment 108547 PARAMETER Experiment Name: Zm_Imbibed_Seeds_P Parameter: Tissue Value: Aerial vs. Embryo
  misc_feature: MA Experiment ID: 108559 Result: Up-regulated in Transcription
  misc_feature: MA Experiment 108559 PARAMETER Experiment Name: Zm_5mM_NO_P Parameter: Age (day) Value: 8
  misc_feature: MA Experiment 108559 PARAMETER Experiment Name: Zm_5mM_NO_P Parameter: Organism Value: Zea mays
  misc_feature: MA Experiment 108559 PARAMETER Experiment Name: Zm_5mM_NO_P Parameter: Plant Line Value: 35A19
  misc_feature: MA Experiment 108559 PARAMETER Experiment Name: Zm_5mM_NO_P Parameter: Timepoint (hr) Value: 12
  misc_feature: MA Experiment 108559 PARAMETER Experiment Name: Zm_5mM_NO_P Parameter: Tissue Value: Aerial
  misc_feature: MA Experiment 108559 PARAMETER Experiment Name: Zm_5mM_NO_P Parameter: Treatment Value: 5mM NO vs. No Treatment
  misc_feature: MA Experiment ID: 20000478 Result: Down-regulated in Transcription
  misc_feature: MA Experiment 20000478 PARAMETER Experiment Name: Zm_5mM_SA_P Parameter: Age (day) Value: 11
  misc_feature: MA Experiment 20000478 PARAMETER Experiment Name: Zm_5mM_SA_P Parameter: Organism Value: Zea mays
  misc_feature: MA Experiment 20000478 PARAMETER Experiment Name: Zm_5mM_SA_P Parameter: Plant Line Value: 35A19
  misc_feature: MA Experiment 20000478 PARAMETER Experiment Name: Zm_5mM_SA_P Parameter: Timepoint (hr) Value: 72
  misc_feature: MA Experiment 20000478 PARAMETER Experiment Name: Zm_5mM_SA_P Parameter: Tissue Value: Aerial
  misc_feature: MA Experiment 20000478 PARAMETER Experiment Name: Zm_5mM_SA_P Parameter: Treatment Value: 5mM SA vs. No Treatment
  misc_feature: MA Experiment ID: 20000533 Result: Up-regulated in Transcription
  misc_feature: MA Experiment 20000533 PARAMETER Experiment Name: Zm_0.001percent_MeJA_P Parameter: Age (day) Value: 11
  misc_feature: MA Experiment 20000533 PARAMETER Experiment Name: Zm_0.001percent_MeJA_P Parameter: Organism Value: Zea mays
  misc_feature: MA Experiment 20000533 PARAMETER Experiment Name: Zm_0.001percent_MeJA_P Parameter: Plant Line Value: 35A19
  misc_feature: MA Experiment 20000533 PARAMETER Experiment Name: Zm_0.001percent_MeJA_P Parameter: Timepoint (hr) Value: 72
  misc_feature: MA Experiment 20000533 PARAMETER Experiment Name: Zm_0.001percent_MeJA_P Parameter: Tissue Value: Aerial
  misc_feature: MA Experiment 20000533 PARAMETER Experiment Name: Zm_0.001percent_MeJA_P Parameter: Treatment Value: 0.001percent MeJA vs. No Treatment
  misc_feature: MA Experiment ID: 20000626 Result: Up-regulated in Transcription
  misc_feature: MA Experiment 20000626 PARAMETER Experiment Name: Zm_Herbicide-Treatments_P Parameter: Timepoint (hr) Value: 12
  misc_feature: MA Experiment 20000626 PARAMETER Experiment Name: Zm_Herbicide-Treatments_P Parameter: Tissue Value: Aerial
  misc_feature: MA Experiment 20000626 PARAMETER Experiment Name: Zm_Herbicide-Treatments_P Parameter: Treatment Value: Roundup vs. No Treatment
  misc_feature: MA Experiment ID: 20000627 Result: Up-regulated in Transcription
  misc_feature: MA Experiment 20000627 PARAMETER Experiment Name: Zm_Herbicide-Treatments_P Parameter: Timepoint (hr) Value: 12
  misc_feature: MA Experiment 20000627 PARAMETER Experiment Name: Zm_Herbicide-Treatments_P Parameter: Tissue Value: Aerial
  misc_feature: MA Experiment 20000627 PARAMETER Experiment Name: Zm_Herbicide-Treatments_P Parameter: Treatment Value: Finale vs. No Treatment
  misc_feature: MA Experiment ID: 20000629 Result: Up-regulated in Transcription
  misc_feature: MA Experiment 20000629 PARAMETER Experiment Name: Zm_Herbicide-Treatments_P Parameter: Timepoint (hr) Value: 12
  misc_feature: MA Experiment 20000629 PARAMETER Experiment Name: Zm_Herbicide-Treatments_P Parameter: Tissue Value: Aerial
  misc_feature: MA Experiment 20000629 PARAMETER Experiment Name: Zm_Herbicide-Treatments_P Parameter: Treatment Value: Trimec vs. No Treatment

SEQ ID NO: 19169 - protein, 606 aa, Zea mays subsp. mays; identical to SEQ ID NO: 14181
  peptide (1)..(606): Ceres Seq. ID no. 13666029
  misc_feature (1)..(606): Homolog of NCBI NO: 1706328 NR Description: Pyruvate decarboxylase isozyme 2 (PDC)
  misc_feature (1)..(606): Homolog of NCBI NO: 29373077 NR Description: pyruvate decarboxylase 1 [Lotus corniculatus]
  misc_feature (33)..(606): Homolog of NCBI NO: 10732644 NR Description: pyruvate decarboxylase 1 [Vitis vinifera]
  misc_feature (20)..(606): Homolog of NCBI NO: 24745919 NR Description: pyruvate decarboxylase [Solanum tuberosum]
  misc_feature (1)..(606): Homolog of NCBI NO: 10121330 NR Description: pyruvate decarboxylase [Fragaria x ananassa]
  misc_feature (1)..(606): Homolog of NCBI NO: 17225598 NR Description: pyruvate decarboxylase [Fragaria x ananassa]
  misc_feature (9)..(606): Homolog of NCBI NO: 3970823 NR Description: pyruvate decarboxylase [Zea mays]
  misc_feature (9)..(606): Homolog of NCBI NO: 118390 NR Description: Pyruvate decarboxylase isozyme 1 (PDC)
  misc_feature (45)..(569): Homolog of NCBI NO: 11268382 NR Description: probable pyruvate decarboxylase (EC 4.1.1.1) - yeast (Schizosaccharomyces pombe) >gi|1749736|dbj|BAA13925.1|
  misc_feature (43)..(532): Homolog of NCBI NO: 2501327 NR Description: Pyruvate decarboxylase >gi|2131152|pir||S70684

SEQ ID NO: 19170 - protein, 579 aa, Zea mays subsp. mays; identical to SEQ ID NO: 14182
  peptide (1)..(579): Ceres Seq. ID no. 13666030
  misc_feature (1)..(579): Homolog of NCBI NO: 1706328 NR Description: Pyruvate decarboxylase isozyme 2 (PDC)
  misc_feature (1)..(579): Homolog of NCBI NO: 29373077 NR Description: pyruvate decarboxylase 1 [Lotus corniculatus]
  misc_feature (6)..(579): Homolog of NCBI NO: 10732644 NR Description: pyruvate decarboxylase 1 [Vitis vinifera]
  misc_feature (1)..(579): Homolog of NCBI NO: 24745919 NR Description: pyruvate decarboxylase [Solanum tuberosum]
  misc_feature (1)..(579): Homolog of NCBI NO: 10121330 NR Description: pyruvate decarboxylase [Fragaria x ananassa]
  misc_feature (1)..(579): Homolog of NCBI NO: 17225598 NR Description: pyruvate decarboxylase [Fragaria x ananassa]
  misc_feature (1)..(579): Homolog of NCBI NO: 3970823 NR Description: pyruvate decarboxylase [Zea mays]
  misc_feature (1)..(579): Homolog of NCBI NO: 118390 NR Description: Pyruvate decarboxylase isozyme 1 (PDC)
  misc_feature (18)..(542): Homolog of NCBI NO: 11268382 NR Description: probable pyruvate decarboxylase (EC 4.1.1.1) - yeast (Schizosaccharomyces pombe) >gi|1749736|dbj|BAA13925.1|
  misc_feature (16)..(505): Homolog of NCBI NO: 2501327 NR Description: Pyruvate decarboxylase >gi|2131152|pir||S70684

SEQ ID NO: 19171 - protein, 371 aa, Zea mays subsp. mays; identical to SEQ ID NO: 14183
  peptide (1)..(371): Ceres Seq. ID no. 13666031
  misc_feature (1)..(371): Homolog of NCBI NO: 1706328 NR Description: Pyruvate decarboxylase isozyme 2 (PDC)
  misc_feature (1)..(371): Homolog of NCBI NO: 29373077 NR Description: pyruvate decarboxylase 1 [Lotus corniculatus]
  misc_feature (1)..(371): Homolog of NCBI NO: 10732644 NR Description: pyruvate decarboxylase 1 [Vitis vinifera]
  misc_feature (1)..(371): Homolog of NCBI NO: 24745919 NR Description: pyruvate decarboxylase [Solanum tuberosum]
  misc_feature (1)..(371): Homolog of NCBI NO: 10121330 NR Description: pyruvate decarboxylase [Fragaria x ananassa]
  misc_feature (1)..(371): Homolog of NCBI NO: 17225598 NR Description: pyruvate decarboxylase [Fragaria x ananassa]
  misc_feature (1)..(371): Homolog of NCBI NO: 3970823 NR Description: pyruvate decarboxylase [Zea mays]
  misc_feature (1)..(371): Homolog of NCBI NO: 118390 NR Description: Pyruvate decarboxylase isozyme 1 (PDC)
  misc_feature (1)..(334): Homolog of NCBI NO: 11268382 NR Description: probable pyruvate decarboxylase (EC 4.1.1.1) - yeast (Schizosaccharomyces pombe) >gi|1749736|dbj|BAA13925.1|
  misc_feature (1)..(297): Homolog of NCBI NO: 2501327 NR Description: Pyruvate decarboxylase >gi|2131152|pir||S70684

SEQ ID NO: 19172 - DNA, 1174 bp, Zea mays subsp. mays; identical to SEQ ID NO: 5862
  misc_feature (1)..(1174): Ceres Seq. ID no. 12381799
  misc_feature: MA Experiment ID: 108522 Result: Up-regulated in Transcription
  misc_feature: MA Experiment 108522 PARAMETER Experiment Name: Zm_42deg_Heat_P Parameter: Age (day) Value: 8
  misc_feature: MA Experiment 108522 PARAMETER Experiment Name: Zm_42deg_Heat_P Parameter: Organism Value: Zea mays
  misc_feature: MA Experiment 108522 PARAMETER Experiment Name: Zm_42deg_Heat_P Parameter: Plant Line Value: 35A19
  misc_feature: MA Experiment 108522 PARAMETER Experiment Name: Zm_42deg_Heat_P Parameter: Temperature (deg C) Value: 42 vs. 22
  misc_feature: MA Experiment 108522 PARAMETER Experiment Name: Zm_42deg_Heat_P Parameter: Timepoint (hr) Value: 1
  misc_feature: MA Experiment 108522 PARAMETER Experiment Name: Zm_42deg_Heat_P Parameter: Tissue Value: Aerial
  misc_feature: MA Experiment ID: 108527 Result: Down-regulated in Transcription
  misc_feature: MA Experiment 108527 PARAMETER Experiment Name: Zm_5mM_NO_P Parameter: Age (day) Value: 8
  misc_feature: MA Experiment 108527 PARAMETER Experiment Name: Zm_5mM_NO_P Parameter: Organism Value: Zea mays
  misc_feature: MA Experiment 108527 PARAMETER Experiment Name: Zm_5mM_NO_P Parameter: Plant Line Value: 35A19
  misc_feature: MA Experiment 108527 PARAMETER Experiment Name: Zm_5mM_NO_P Parameter: Timepoint (hr) Value: 6
  misc_feature: MA Experiment 108527 PARAMETER Experiment Name: Zm_5mM_NO_P Parameter: Tissue Value: Aerial
  misc_feature: MA Experiment 108527 PARAMETER Experiment Name: Zm_5mM_NO_P Parameter: Treatment Value: 5mM NO vs. No Treatment
  misc_feature: MA Experiment ID: 108528 Result: Up-regulated in Transcription
  misc_feature: MA Experiment 108528 PARAMETER Experiment Name: Zm_Imbibed_Seeds_P Parameter: Age (day) Value: 5 vs. 2
  misc_feature: MA Experiment 108528 PARAMETER Experiment Name: Zm_Imbibed_Seeds_P Parameter: Organism Value: Zea mays
  misc_feature: MA Experiment 108528 PARAMETER Experiment Name: Zm_Imbibed_Seeds_P Parameter: Plant Line Value: 35A19
  misc_feature: MA Experiment 108528 PARAMETER Experiment Name: Zm_Imbibed_Seeds_P Parameter: Tissue Value: Aerial vs. Embryo
  misc_feature: MA Experiment ID: 108530 Result: Up-regulated in Transcription
  misc_feature: MA Experiment 108530 PARAMETER Experiment Name: Zm_Imbibed_Seeds_P Parameter: Age (day) Value: 6 vs. 2
  misc_feature: MA Experiment 108530 PARAMETER Experiment Name: Zm_Imbibed_Seeds_P Parameter: Organism Value: Zea mays
  misc_feature: MA Experiment 108530 PARAMETER Experiment Name: Zm_Imbibed_Seeds_P Parameter: Plant Line Value: 35A19
  misc_feature: MA Experiment 108530 PARAMETER Experiment Name: Zm_Imbibed_Seeds_P Parameter: Tissue Value: Aerial vs. Embryo
  misc_feature: MA Experiment ID: 108545 Result: Up-regulated in Transcription
  misc_feature: MA Experiment 108545 PARAMETER Experiment Name: Zm_Imbibed_Seeds_P Parameter: Age (day) Value: 3 vs. 2
  misc_feature: MA Experiment 108545 PARAMETER Experiment Name: Zm_Imbibed_Seeds_P Parameter: Organism Value: Zea mays
  misc_feature: MA Experiment 108545 PARAMETER Experiment Name: Zm_Imbibed_Seeds_P Parameter: Plant Line Value: 35A19
  misc_feature: MA Experiment 108545 PARAMETER Experiment Name: Zm_Imbibed_Seeds_P Parameter: Tissue Value: Aerial vs. Embryo
  misc_feature: MA Experiment ID: 108547 Result: Up-regulated in Transcription
  misc_feature: MA Experiment 108547 PARAMETER Experiment Name: Zm_Imbibed_Seeds_P Parameter: Age (day) Value: 4 vs. 2
  misc_feature: MA Experiment 108547 PARAMETER Experiment Name: Zm_Imbibed_Seeds_P Parameter: Organism Value: Zea mays
  misc_feature: MA Experiment 108547 PARAMETER Experiment Name: Zm_Imbibed_Seeds_P Parameter: Plant Line Value: 35A19
  misc_feature: MA Experiment 108547 PARAMETER Experiment Name: Zm_Imbibed_Seeds_P Parameter: Tissue Value: Aerial vs. Embryo
  misc_feature: MA Experiment ID: 108556 Result: Down-regulated in Transcription
  misc_feature: MA Experiment 108556 PARAMETER Experiment Name: Zm_Drought_P Parameter: Age (day) Value: 9
  misc_feature: MA Experiment 108556 PARAMETER Experiment Name: Zm_Drought_P Parameter: Organism Value: Zea mays
  misc_feature: MA Experiment 108556 PARAMETER Experiment Name: Zm_Drought_P Parameter: Plant Line Value: 35A19
  misc_feature: MA Experiment 108556 PARAMETER Experiment Name: Zm_Drought_P Parameter: Timepoint (hr) Value: 24
  misc_feature: MA Experiment 108556 PARAMETER Experiment Name: Zm_Drought_P Parameter: Tissue Value: Aerial
  misc_feature: MA Experiment 108556 PARAMETER Experiment Name: Zm_Drought_P Parameter: Treatment Value: Drought vs. No Drought
  misc_feature: MA Experiment ID: 20000480 Result: Down-regulated in Transcription
  misc_feature: MA Experiment 20000480 PARAMETER Experiment Name: Zm_Drought_P Parameter: Age (day) Value: 11
  misc_feature: MA Experiment 20000480 PARAMETER Experiment Name: Zm_Drought_P Parameter: Organism Value: Zea mays
  misc_feature: MA Experiment 20000480 PARAMETER Experiment Name: Zm_Drought_P Parameter: Plant Line Value: 35A19
  misc_feature: MA Experiment 20000480 PARAMETER Experiment Name: Zm_Drought_P Parameter: Timepoint (hr) Value: 72
  misc_feature: MA Experiment 20000480 PARAMETER Experiment Name: Zm_Drought_P Parameter: Tissue Value: Aerial
  misc_feature: MA Experiment 20000480 PARAMETER Experiment Name: Zm_Drought_P Parameter: Treatment Value: Drought vs. No Drought

SEQ ID NO: 19173 - protein, 316 aa, Zea mays subsp. mays; identical to SEQ ID NO: 5863
  peptide (1)..(316): Ceres Seq. ID no. 12381800
  misc_feature (146)..(313): Pfam Name: PAP_fibrillin Pfam Description: PAP_fibrillin
  misc_feature (103)..(316): Homolog of NCBI NO: 38346556 NR Description: OSJNBa0035M09.17 [Oryza sativa (japonica
  misc_feature (119)..(316): Homolog of NCBI NO: 15241221 NR Description: putative protein; protein id: At5g19940.1, by cDNA: 32193., supported by cDNA: gi_15529231, supported by gi_16974384 [Arabidopsis thaliana] >gi|15529232|gb|AAK97710.1|

SEQ ID NO: 19174 - protein, 221 aa, Zea mays subsp. mays; identical to SEQ ID NO: 5864
  peptide (1)..(221): Ceres Seq. ID no. 12381801
  misc_feature (51)..(218): Pfam Name: PAP_fibrillin Pfam Description: PAP_fibrillin
  misc_feature (8)..(221): Homolog of NCBI NO: 38346556 NR Description: OSJNBa0035M09.17 [Oryza sativa (japonica
  misc_feature (24)..(221): Homolog of NCBI NO: 15241221 NR Description: putative protein; protein id: At5g19940.1, by cDNA: 32193., supported by cDNA: gi_15529231, supported by gi_16974384 [Arabidopsis thaliana] >gi|15529232|gb|AAK97710.1|

SEQ ID NO: 19175 - protein, 219 aa, Zea mays subsp. mays; identical to SEQ ID NO: 5865
  peptide (1)..(219): Ceres Seq. ID no. 12381802
  misc_feature (49)..(216): Pfam Name: PAP_fibrillin Pfam Description: PAP_fibrillin
  misc_feature (6)..(219): Homolog of NCBI NO: 38346556 NR Description: OSJNBa0035M09.17 [Oryza sativa (japonica
  misc_feature (22)..(219): Homolog of NCBI NO: 15241221 NR Description: putative protein; protein id: At5g19940.1, by cDNA: 32193., supported by cDNA: gi_15529231, supported by gi_16974384 [Arabidopsis thaliana] >gi|15529232|gb|AAK97710.1|

SEQ ID NO: 19176 - DNA, 722 bp, Zea mays subsp. mays
  misc_feature (1)..(722): Ceres Seq. ID no. 12420098
  misc_feature: MA Experiment ID: 108515 Result: Down-regulated in Transcription
  misc_feature: MA Experiment 108515 PARAMETER Experiment Name: Zm_2mM_SA_P Parameter: Age (day) Value: 8
  misc_feature: MA Experiment 108515 PARAMETER Experiment Name: Zm_2mM_SA_P Parameter: Organism Value: Zea mays
  misc_feature: MA Experiment 108515 PARAMETER Experiment Name: Zm_2mM_SA_P Parameter: Plant Line Value: 35A19
  misc_feature: MA Experiment 108515 PARAMETER Experiment Name: Zm_2mM_SA_P Parameter: Timepoint (hr) Value: 12
  misc_feature: MA Experiment 108515 PARAMETER Experiment Name: Zm_2mM_SA_P Parameter: Tissue Value: Aerial
  misc_feature: MA Experiment 108515 PARAMETER Experiment Name: Zm_2mM_SA_P Parameter: Treatment Value: 2mM SA vs. No Treatment
  misc_feature: MA Experiment ID: 108529 Result: Down-regulated in Transcription
  misc_feature: MA Experiment 108529 PARAMETER Experiment Name: Zm_Imbibed_Seeds_P Parameter: Age (day) Value: 5 vs. 2
  misc_feature: MA Experiment 108529 PARAMETER Experiment Name: Zm_Imbibed_Seeds_P Parameter: Organism Value: Zea mays
  misc_feature: MA Experiment 108529 PARAMETER Experiment Name: Zm_Imbibed_Seeds_P Parameter: Plant Line Value: 35A19
  misc_feature: MA Experiment 108529 PARAMETER Experiment Name: Zm_Imbibed_Seeds_P Parameter: Tissue Value: Roots vs. Embryo
  misc_feature: MA Experiment ID: 108534 Result: Up-regulated in Transcription
  misc_feature: MA Experiment 108534 PARAMETER Experiment Name: Zm_4deg_Cold_P Parameter: Age (hr) Value: 8
  misc_feature: MA Experiment 108534 PARAMETER Experiment Name: Zm_4deg_Cold_P Parameter: Organism Value: Zea mays
  misc_feature: MA Experiment 108534 PARAMETER Experiment Name: Zm_4deg_Cold_P Parameter: Plant Line Value: 35A19
  misc_feature: MA Experiment 108534 PARAMETER Experiment Name: Zm_4deg_Cold_P Parameter: Temperature (deg C) Value: 4 vs. 22
  misc_feature: MA Experiment 108534 PARAMETER Experiment Name: Zm_4deg_Cold_P Parameter: Timepoint (hr) Value: 6
  misc_feature: MA Experiment 108534 PARAMETER Experiment Name: Zm_4deg_Cold_P Parameter: Tissue Value: Aerial
  misc_feature: MA Experiment ID: 108535 Result: Up-regulated in Transcription
  misc_feature: MA Experiment 108535 PARAMETER Experiment Name: Zm_Meristem_P Parameter: Age (day) Value: 8
  misc_feature: MA Experiment 108535 PARAMETER Experiment Name: Zm_Meristem_P Parameter: Organism Value: Zea mays
  misc_feature: MA Experiment 108535 PARAMETER Experiment Name: Zm_Meristem_P Parameter: Plant Line Value: 35A19
  misc_feature: MA Experiment 108535 PARAMETER Experiment Name: Zm_Meristem_P Parameter: Tissue Value: Root Meristem vs. Above Root Meristem
  misc_feature: MA Experiment ID: 108543 Result: Up-regulated in Transcription
  misc_feature: MA Experiment ID: 108544 Result: Down-regulated in Transcription
  misc_feature: MA Experiment ID: 108545 Result: Up-regulated in Transcription
  misc_feature: MA Experiment 108545 PARAMETER Experiment Name: Zm_Imbibed_Seeds_P Parameter: Age (day) Value: 3 vs. 2
  misc_feature: MA Experiment 108545 PARAMETER Experiment Name: Zm_Imbibed_Seeds_P Parameter: Organism Value: Zea mays
  misc_feature: MA Experiment 108545 PARAMETER Experiment Name: Zm_Imbibed_Seeds_P Parameter: Plant Line Value: 35A19
  misc_feature: MA Experiment 108545 PARAMETER Experiment Name: Zm_Imbibed_Seeds_P Parameter: Tissue Value: Aerial vs. Embryo
  misc_feature: MA Experiment ID: 108546 Result: Down-regulated in Transcription
  misc_feature: MA Experiment 108546 PARAMETER Experiment Name: Zm_Imbibed_Seeds_P Parameter: Age (day) Value: 3 vs. 2
  misc_feature: MA Experiment 108546 PARAMETER Experiment Name: Zm_Imbibed_Seeds_P Parameter: Organism Value: Zea mays
  misc_feature: MA Experiment 108546 PARAMETER Experiment Name: Zm_Imbibed_Seeds_P Parameter: Plant Line Value: 35A19
  misc_feature: MA Experiment 108546 PARAMETER Experiment Name: Zm_Imbibed_Seeds_P Parameter: Tissue Value: Roots vs. Embryo
  misc_feature: MA Experiment ID: 108597 Result: Down-regulated in Transcription
  misc_feature: MA Experiment 108597 PARAMETER Experiment Name: Zm_100uM_ABA_P Parameter: Age (day) Value: 9
  misc_feature: MA Experiment 108597 PARAMETER Experiment Name: Zm_100uM_ABA_P Parameter: Organism Value: Zea mays
  misc_feature: MA Experiment 108597 PARAMETER Experiment Name: Zm_100uM_ABA_P Parameter: Plant Line Value: 35A19
  misc_feature: MA Experiment 108597 PARAMETER Experiment Name: Zm_100uM_ABA_P Parameter: Timepoint (hr) Value: 24
  misc_feature: MA Experiment 108597 PARAMETER Experiment Name: Zm_100uM_ABA_P Parameter: Tissue Value: Aerial
  misc_feature: MA Experiment 108597 PARAMETER Experiment Name: Zm_100uM_ABA_P Parameter: Treatment Value: 100uM ABA vs. No Treatment
  misc_feature: MA Experiment ID: 20000477 Result: Down-regulated in Transcription
  misc_feature: MA Experiment 20000477 PARAMETER Experiment Name: Zm_5mM_SA_P Parameter: Age (day) Value: 10
  misc_feature: MA Experiment 20000477 PARAMETER Experiment Name: Zm_5mM_SA_P Parameter: Organism Value: Zea mays
  misc_feature: MA Experiment 20000477 PARAMETER Experiment Name: Zm_5mM_SA_P Parameter: Plant Line Value: 35A19
  misc_feature: MA Experiment 20000477 PARAMETER Experiment Name: Zm_5mM_SA_P Parameter: Timepoint (hr) Value: 48
  misc_feature: MA Experiment 20000477 PARAMETER Experiment Name: Zm_5mM_SA_P Parameter: Tissue Value: Aerial
  misc_feature: MA Experiment 20000477 PARAMETER Experiment Name: Zm_5mM_SA_P Parameter: Treatment Value: 5mM SA vs. No Treatment
  misc_feature: MA Experiment ID: 20000480 Result: Down-regulated in Transcription
  misc_feature: MA Experiment 20000480 PARAMETER Experiment Name: Zm_Drought_P Parameter: Age (day) Value: 11
  misc_feature: MA Experiment 20000480 PARAMETER Experiment Name: Zm_Drought_P Parameter: Organism Value: Zea mays
  misc_feature: MA Experiment 20000480 PARAMETER Experiment Name: Zm_Drought_P Parameter: Plant Line Value: 35A19
  misc_feature: MA Experiment 20000480 PARAMETER Experiment Name: Zm_Drought_P Parameter: Timepoint (hr) Value: 72
  misc_feature: MA Experiment 20000480 PARAMETER Experiment Name: Zm_Drought_P Parameter: Tissue Value: Aerial
  misc_feature: MA Experiment 20000480 PARAMETER Experiment Name: Zm_Drought_P Parameter: Treatment Value: Drought vs. No Drought
  misc_feature: MA Experiment ID: 20000626 Result: Down-regulated in Transcription
  misc_feature: MA Experiment 20000626 PARAMETER Experiment Name: Zm_Herbicide-Treatments_P Parameter: Timepoint (hr) Value: 12
  misc_feature: MA Experiment 20000626 PARAMETER Experiment Name: Zm_Herbicide-Treatments_P Parameter: Tissue Value: Aerial
  misc_feature: MA Experiment 20000626 PARAMETER Experiment Name: Zm_Herbicide-Treatments_P Parameter: Treatment Value: Roundup vs. No Treatment
  misc_feature: MA Experiment ID: 20000627 Result: Down-regulated in Transcription
  misc_feature: MA Experiment 20000627 PARAMETER Experiment Name: Zm_Herbicide-Treatments_P Parameter: Timepoint (hr) Value: 12
  misc_feature: MA Experiment 20000627 PARAMETER Experiment Name: Zm_Herbicide-Treatments_P Parameter: Tissue Value: Aerial
  misc_feature: MA Experiment 20000627 PARAMETER Experiment Name: Zm_Herbicide-Treatments_P Parameter: Treatment Value: Finale vs. No Treatment
  misc_feature: MA Experiment ID: 20000628 Result: Down-regulated in Transcription
  misc_feature: MA Experiment 20000628 PARAMETER Experiment Name: Zm_Herbicide-Treatments_P Parameter: Timepoint (hr) Value: 12
  misc_feature: MA Experiment 20000628 PARAMETER Experiment Name: Zm_Herbicide-Treatments_P Parameter: Tissue Value: Aerial
  misc_feature: MA Experiment 20000628 PARAMETER Experiment Name: Zm_Herbicide-Treatments_P Parameter: Treatment Value: Glean vs. No Treatment
  misc_feature: MA Experiment ID: 20001608 Result: Up-regulated in Transcription
  misc_feature: MA Experiment 20001608 PARAMETER Experiment Name: Zm_50ppm_KNO3_L-to-H_P Parameter: Age (day) Value: 21
  misc_feature: MA Experiment 20001608 PARAMETER Experiment Name: Zm_50ppm_KNO3_L-to-H_P Parameter: Organism Value: Zea mays
  misc_feature: MA Experiment 20001608 PARAMETER Experiment Name: Zm_50ppm_KNO3_L-to-H_P Parameter: Plant Line Value: 35A19
  misc_feature: MA Experiment 20001608 PARAMETER Experiment Name: Zm_50ppm_KNO3_L-to-H_P Parameter: Timepoint (hr) Value: 48
  misc_feature: MA Experiment 20001608 PARAMETER Experiment Name: Zm_50ppm_KNO3_L-to-H_P Parameter: Tissue Value: Shoots
  misc_feature: MA Experiment 20001608 PARAMETER Experiment Name: Zm_50ppm_KNO3_L-to-H_P Parameter: Treatment Value: 50ppm KNO3 vs. 50ppm KCl
acatcatcacttgcagcttcacaagcaaactaaaacacagcggctaaaggcacagctctccagcattcatccagaaagaagagaaggaaccaagccaacagccaaccatgatcagcgccaagagggtcgctcatctggctaagaagtggcagaggatggctgcccaagggaggcagcgcctcacctggggcggcgcaggcgcggcagcaaagcaagccggcgagagctgcagctccgtggcgagcaagggccactgcgccgtgtacacggccgacggggcgcggttcgaggtgcccctggcgtgcctcagcactctggtcttcagggagctcctggaaatgtcgcaggaggagttcggcttctccggcggcgatggcagtggcaggatcacgctgccctgcgacacggcggtcatggagtacgccatgtgcttgctcaggagaagcgcctctgctgagctagagcaggcgttccttagcaccgtggcggcaacgtcgtgctgccactacgccagccgtgtggcgctggcgacgtgcgtaggagccggccctgcgggttgctgtttagtgatgttcttcagtacgtgtgtataggtagtagataaagtattattattcggagccttctgatcctgcaactgatcaagtaaggtgttagtgttctgtacgtatgtatgattcgctggatatgattggcttatgaaaattgtgaggactacttac

SEQ ID NO: 19177 - protein, 161 aa, Zea mays subsp. mays
  peptide (1)..(161): Ceres Seq. ID no. 12420099
  misc_feature (1)..(111): Pfam Name: Auxin responsive protein Pfam Description: Auxin responsive protein
  misc_feature (1)..(131): Homolog of NCBI NO: 38603942 NR Description: At1g29420 [Arabidopsis thaliana]
  misc_feature (1)..(128): Homolog of NCBI NO: 26452075 NR Description: putative auxin-induced protein [Arabidopsis
  misc_feature (1)..(131): Homolog of NCBI NO: 21553494 NR Description: auxin-induced protein, putative [Arabidopsis
  misc_feature (10)..(136): Homolog of NCBI NO: 25403067 NR Description: probable auxin-induced protein, 48806-48408
  misc_feature (1)..(131): Homolog of NCBI NO: 15218951 NR Description: auxin-induced protein, putative
  misc_feature (1)..(131): Homolog of NCBI NO: 18397103 NR Description: auxin-induced protein, putative
  misc_feature (1)..(131): Homolog of NCBI NO: 18397123 NR Description: auxin-induced protein, putative
  misc_feature (1)..(136): Homolog of NCBI NO: 18397101 NR Description: auxin-induced protein, putative
  misc_feature (1)..(136): Homolog of NCBI NO: 21592571 NR Description: auxin-induced protein, putative [Arabidopsis
  misc_feature (1)..(136): Homolog of NCBI NO: 20149052 NR Description: auxin-induced SAUR-like protein [Capsicum annuum]
MISAKRVAHLAKKWQRMAAQGRQRLTWGGAGAAAKQAGESCSSVASKGHCAVYTADGARFEVPLACLSTLVFRELLEMSQEEFGFSGGDGSGRITLPCDTAVMEYAMCLLRRSASAELEQAFLSTVAATSCCHYASRVALATCVGAGPAGCCLVMFFSTCV

SEQ ID NO: 19178 - protein, 145 aa, Zea mays subsp. mays
  peptide (1)..(145): Ceres Seq. ID no. 12420100
  misc_feature (1)..(95): Pfam Name: Auxin responsive protein Pfam Description: Auxin responsive protein
  misc_feature (1)..(115): Homolog of NCBI NO: 38603942 NR Description: At1g29420 [Arabidopsis thaliana]
  misc_feature (1)..(112): Homolog of NCBI NO: 26452075 NR Description: putative auxin-induced protein [Arabidopsis
  misc_feature (1)..(115): Homolog of NCBI NO: 21553494 NR Description: auxin-induced protein, putative [Arabidopsis
  misc_feature (1)..(120): Homolog of NCBI NO: 25403067 NR Description: probable auxin-induced protein, 48806-48408
  misc_feature (1)..(115): Homolog of NCBI NO: 15218951 NR Description: auxin-induced protein, putative
  misc_feature (1)..(115): Homolog of NCBI NO: 18397103 NR Description: auxin-induced protein, putative
  misc_feature (1)..(115): Homolog of NCBI NO: 18397123 NR Description: auxin-induced protein, putative
  misc_feature (1)..(120): Homolog of NCBI NO: 18397101 NR Description: auxin-induced protein, putative
  misc_feature (1)..(120): Homolog of NCBI NO: 21592571 NR Description: auxin-induced protein, putative [Arabidopsis
  misc_feature (1)..(120): Homolog of NCBI NO: 20149052 NR Description: auxin-induced SAUR-like protein [Capsicum annuum]
MAAQGRQRLTWGGAGAAAKQAGESCSSVASKGHCAVYTADGARFEVPLACLSTLVFRELLEMSQEEFGFSGGDGSGRITLPCDTAVMEYAMCLLRRSASAELEQAFLSTVAATSCCHYASRVALATCVGAGPAGCCLVMFFSTCV

SEQ ID NO: 19179 - protein, 84 aa, Zea mays subsp. mays
  peptide (1)..(84): Ceres Seq. ID no. 12420101
  misc_feature (1)..(54): Homolog of NCBI NO: 38603942 NR Description: At1g29420 [Arabidopsis thaliana]
  misc_feature (1)..(51): Homolog of NCBI NO: 26452075 NR Description: putative auxin-induced protein [Arabidopsis
  misc_feature (1)..(54): Homolog of NCBI NO: 21553494 NR Description: auxin-induced protein, putative [Arabidopsis
  misc_feature (1)..(59): Homolog of NCBI NO: 25403067 NR Description: probable auxin-induced protein, 48806-48408
  misc_feature (1)..(54): Homolog of NCBI NO: 15218951 NR Description: auxin-induced protein, putative
  misc_feature (1)..(54): Homolog of NCBI NO: 18397103 NR Description: auxin-induced protein, putative
  misc_feature (1)..(54): Homolog of NCBI NO: 18397123 NR Description: auxin-induced protein, putative
  misc_feature (1)..(59): Homolog of NCBI NO: 18397101 NR Description: auxin-induced protein, putative
  misc_feature (1)..(59): Homolog of NCBI NO: 21592571 NR Description: auxin-induced protein, putative [Arabidopsis
  misc_feature (1)..(59): Homolog of NCBI NO: 20149052 NR Description: auxin-induced SAUR-like protein [Capsicum annuum]
MSQEEFGFSGGDGSGRITLPCDTAVMEYAMCLLRRSASAELEQAFLSTVAATSCCHYASRVALATCVGAGPAGCCLVMFFSTCV

SEQ ID NO: 19180 - DNA, 1291 bp, Zea mays subsp. mays
  misc_feature (1)..(1291): Ceres Seq. ID no. 13494909
  misc_feature: MA Experiment ID: 108544 Result: Down-regulated in Transcription
  misc_feature: MA Experiment ID: 20000492 Result: Up-regulated in Transcription
  misc_feature: MA Experiment 20000492 PARAMETER Experiment Name: Zm_Hybrid_Seed_Dev_P Parameter: DAP Value: 12
  misc_feature: MA Experiment 20000492 PARAMETER Experiment Name: Zm_Hybrid_Seed_Dev_P Parameter: Organism Value: Zea mays
  misc_feature: MA Experiment 20000492 PARAMETER Experiment Name: Zm_Hybrid_Seed_Dev_P Parameter: Plant Line Value: 35A19
  misc_feature: MA Experiment 20000492 PARAMETER Experiment Name: Zm_Hybrid_Seed_Dev_P Parameter: Tissue Value: Fert Kernel vs. Unfert Floret
  misc_feature: MA Experiment ID: 20001606 Result: Up-regulated in Transcription
  misc_feature: MA Experiment 20001606 PARAMETER Experiment Name: Zm_50ppm_KNO3_L-to-H_P Parameter: Age (day) Value: 19
  misc_feature: MA Experiment 20001606 PARAMETER Experiment Name: Zm_50ppm_KNO3_L-to-H_P Parameter: Organism Value: Zea mays
  misc_feature: MA Experiment 20001606 PARAMETER Experiment Name: Zm_50ppm_KNO3_L-to-H_P Parameter: Plant Line Value: 35A19
  misc_feature: MA Experiment 20001606 PARAMETER Experiment Name: Zm_50ppm_KNO3_L-to-H_P Parameter: Timepoint (hr) Value: 8
  misc_feature: MA Experiment 20001606 PARAMETER Experiment Name: Zm_50ppm_KNO3_L-to-H_P Parameter: Tissue Value: Shoots
  misc_feature: MA Experiment 20001606 PARAMETER Experiment Name: Zm_50ppm_KNO3_L-to-H_P Parameter: Treatment Value: 50ppm KNO3 vs. 50ppm KCl
gcccttccaaaccatccccgaagcttccagtgcgtcgcgccgcaaccatgagcgacggtaaggactccctcgacctctccgccctcggcgccgccatccccaactcggccgagctcagcgcggaagacaaggctaaccttgtggcgtcgatcaagaacacgctcgagggattggcatcgcggcataccgacgtgctcgagaacctcgagcccaaggtcaggaagcgcgttgagaagctcagggagatccagggcgaacacgatgaacttgaggcgaagtttttcgaagagagagctgctctagaagctaagtatcagaagttgtatgaaccactttactcaaagcgttatgaaattgtcaatggtgtggtcgagattgagggtatcacaaaagaaagtgcagctgaaaccccagaggagcaaaaaagtggagatgagacctctgctgagcaaaaagaagaaaaaggtgtaccagctttctggcttaatgcaatgaagaatcatgaaattttagctgaggagatccaggagagggatgaggaagctctcaagtacctcaaggacatcaagtggtacaggatcagcgagccgaagggttttaagcttgaatttcactttggtacgaatatgttcttcaagaattcggtgcttacaaaaacatatcacatgatcgatgaggatgaaccaattctggagaaagccattggtactgaaattgaatggtaccctgggaagtgcttgacacaaaaagtgctaaaaaagaagccacggaaggggtcaaagaacacgaaacctatcacaaaaaccgaagattgtgagagcttcttcaacttcttcagtccacctcaagtccctgatgacgacgaggaaattgatgaggacacagctgaacagttgcagaaccaaatggagcaagattatgatattggatctaccatcagagacaagattatcccacatgctgtctcgtggttcactggagaggctgctcaagatgaggactttgaagttatggatggcgaggacgacgacgatgaagacgacgatgatgaagacgacgaggatgaagatgacgatgattatgatacaaagaagaccaagggaactgctggaggggaagggcagcagggtgaacgacctgcagagtgcaagcaacagtgaggtgtgatgtcattaagttggttttgtggggccgttgggtgggggttcttgttggttttattttatggaactggcggggggatttttctgggacatgttacatgtgggtctgtattgggtttcagaagggc

SEQ ID NO: 19181 - protein, 385 aa, Zea mays subsp. mays
  peptide (1)..(385): Ceres Seq. ID no. 13494910
  misc_feature (73)..(330): Pfam Name: Nucleosome assembly protein (NAP) Pfam Description: Nucleosome assembly protein (NAP)
  misc_feature (150)..(352): Homolog of NCBI NO: 9294025 NR Description: nucleosome assembly protein-like [Arabidopsis
  misc_feature (16)..(385): Homolog of NCBI NO: 8777435 NR Description: nucleosome assembly protein [Arabidopsis thaliana]
  misc_feature (16)..(385): Homolog of NCBI NO: 18423918 NR Description: nucleosome assembly protein [Arabidopsis
  misc_feature (35)..(385): Homolog of NCBI NO: 7488816 NR Description: nucleosome assembly protein 1 - garden pea
  misc_feature (16)..(385): Homolog of NCBI NO: 15236115 NR Description: nucleosome assembly protein I-related protein
  misc_feature (16)..(385): Homolog of NCBI NO: 549975 NR Description: nucleosome assembly protein I-like protein
  misc_feature (35)..(385): Homolog of NCBI NO: 2129840 NR Description: nucleosome assembly protein 1 - soybean
  misc_feature (16)..(384): Homolog of NCBI NO: 29569109 NR Description: nucleosome/chromatin assembly factor group A [Zea
  misc_feature (16)..(385): Homolog of NCBI NO: 15224782 NR Description: nucleosome assembly protein -related [Arabidopsis
  misc_feature (16)..(385): Homolog of NCBI NO: 21898560 NR Description: nucleosome/chromatin assembly factor group A [Zea
PSKPSPKLPVRRAATMSDGKDSLDLSALGAAIPNSAELSAEDKANLVASIKNTLEGLASRHTDVLENLEPKVRKRVEKLREIQGEHDELEAKFFEERAALEAKYQKLYEPLYSKRYEIVNGVVEIEGITKESAAETPEEQKSGDETSAEQKEEKGVPAFWLNAMKNHEILAEEIQERDEEALKYLKDIKWYRISEPKGFKLEFHFGTNMFFKNSVLTKTYHMIDEDEPILEKAIGTEIEWYPGKCLTQKVLKKKPRKGSKNTKPITKTEDCESFFNFFSPPQVPDDDEEIDEDTAEQLQNQMEQDYDIGSTIRDKIIPHAVSWFTGEAAQDEDFEVMDGEDDDDEDDDDEDDEDEDDDDYDTKKTKGTAGGEGQQGERPAECKQQ

SEQ ID NO: 19182 - protein, 370 aa, Zea mays subsp. mays
  peptide (1)..(370): Ceres Seq. ID no. 13494911
  misc_feature (58)..(315): Pfam Name: Nucleosome assembly protein (NAP) Pfam Description: Nucleosome assembly protein (NAP)
  misc_feature (135)..(337): Homolog of NCBI NO: 9294025 NR Description: nucleosome assembly protein-like [Arabidopsis
  misc_feature (1)..(370): Homolog of NCBI NO: 8777435 NR Description: nucleosome assembly protein [Arabidopsis thaliana]
  misc_feature (1)..(370): Homolog of NCBI NO: 18423918 NR Description: nucleosome assembly protein [Arabidopsis
  misc_feature (20)..(370): Homolog of NCBI NO: 7488816 NR Description: nucleosome assembly protein 1 - garden pea
  misc_feature (1)..(370): Homolog of NCBI NO: 15236115 NR Description: nucleosome assembly protein I-related protein
  misc_feature (1)..(370): Homolog of NCBI NO: 549975 NR Description: nucleosome assembly protein I-like protein
  misc_feature (20)..(370): Homolog of NCBI NO: 2129840 NR Description: nucleosome assembly protein 1 - soybean
  misc_feature (1)..(369): Homolog of NCBI NO: 29569109 NR Description: nucleosome/chromatin assembly factor group A [Zea
  misc_feature (1)..(370): Homolog of NCBI NO: 15224782 NR Description: nucleosome assembly protein -related [Arabidopsis
  misc_feature (1)..(370): Homolog of NCBI NO: 21898560 NR Description: nucleosome/chromatin assembly factor group A [Zea
MSDGKDSLDLSALGAAIPNSAELSAEDKANLVASIKNTLEGLASRHTDVLENLEPKVRKRVEKLREIQGEHDELEAKFFEERAALEAKYQKLYEPLYSKRYEIVNGVVEIEGITKESAAETPEEQKSGDETSAEQKEEKGVPAFWLNAMKNHEILAEEIQERDEEALKYLKDIKWYRISEPKGFKLEFHFGTNMFFKNSVLTKTYHMIDEDEPILEKAIGTEIEWYPGKCLTQKVLKKKPRKGSKNTKPITKTEDCESFFNFFSPPQVPDDDEEIDEDTAEQLQNQMEQDYDIGSTIRDKIIPHAVSWFTGEAAQDEDFEVMDGEDDDDEDDDDEDDEDEDDDDYDTKKTKGTAGGEGQQGERPAECKQQ

SEQ ID NO: 19183 - protein, 222 aa, Zea mays subsp. mays
  peptide (1)..(222): Ceres Seq. ID no. 13494912
  misc_feature (1)..(167): Pfam Name: Nucleosome assembly protein (NAP) Pfam Description: Nucleosome assembly protein (NAP)
  misc_feature (1)..(221): Homolog of NCBI NO: 29569109 NR Description: nucleosome/chromatin assembly factor group A [Zea
  misc_feature (1)..(222): Homolog of NCBI NO: 15224782 NR Description: nucleosome assembly protein -related [Arabidopsis
  misc_feature (1)..(222): Homolog of NCBI NO: 8777435 NR Description: nucleosome assembly protein [Arabidopsis thaliana]
  misc_feature (1)..(222): Homolog of NCBI NO: 7488816 NR Description: nucleosome assembly protein 1 - garden pea
  misc_feature (1)..(222): Homolog of NCBI NO: 549975 NR Description: nucleosome assembly protein I-like protein
  misc_feature (1)..(222): Homolog of NCBI NO: 2129840 NR Description: nucleosome assembly protein 1 - soybean
  misc_feature (1)..(222): Homolog of NCBI NO: 15236115 NR Description: nucleosome assembly protein I-related protein
  misc_feature (1)..(222): Homolog of NCBI NO: 18423918 NR Description: nucleosome assembly protein [Arabidopsis
  misc_feature (1)..(189): Homolog of NCBI NO: 9294025 NR Description: nucleosome assembly protein-like [Arabidopsis
  misc_feature (1)..(222): Homolog of NCBI NO: 21898560 NR Description: nucleosome/chromatin assembly factor group A [Zea
MKNHEILAEEIQERDEEALKYLKDIKWYRISEPKGFKLEFHFGTNMFFKNSVLTKTYHMIDEDEPILEKAIGTEIEWYPGKCLTQKVLKKKPRKGSKNTKPITKTEDCESFFNFFSPPQVPDDDEEIDEDTAEQLQNQMEQDYDIGSTIRDKIIPHAVSWFTGEAAQDEDFEVMDGEDDDDEDDDDEDDEDEDDDDYDTKKTKGTAGGEGQQGERPAECKQQ

SEQ ID NO: 19184 - DNA, 488 bp, Zea mays subsp. mays
  misc_feature (1)..(488): Ceres Seq. ID no. 2790550
  misc_feature: MA Experiment ID: 108597 Result: Up-regulated in Transcription
  misc_feature: MA Experiment 108597 PARAMETER Experiment Name: Zm_100uM_ABA_P Parameter: Age (day) Value: 9
  misc_feature: MA Experiment 108597 PARAMETER Experiment Name: Zm_100uM_ABA_P Parameter: Organism Value: Zea mays
  misc_feature: MA Experiment 108597 PARAMETER Experiment Name: Zm_100uM_ABA_P Parameter: Plant Line Value: 35A19
  misc_feature: MA Experiment 108597 PARAMETER Experiment Name: Zm_100uM_ABA_P Parameter: Timepoint (hr) Value: 24
  misc_feature: MA Experiment 108597 PARAMETER Experiment Name: Zm_100uM_ABA_P Parameter: Tissue Value: Aerial
  misc_feature: MA Experiment 108597 PARAMETER Experiment Name: Zm_100uM_ABA_P Parameter: Treatment Value: 100uM ABA vs. No Treatment
  misc_feature: MA Experiment ID: 20000480 Result: Up-regulated in Transcription
  misc_feature: MA Experiment 20000480 PARAMETER Experiment Name: Zm_Drought_P Parameter: Age (day) Value: 11
  misc_feature: MA Experiment 20000480 PARAMETER Experiment Name: Zm_Drought_P Parameter: Organism Value: Zea mays
  misc_feature: MA Experiment 20000480 PARAMETER Experiment Name: Zm_Drought_P Parameter: Plant Line Value: 35A19
  misc_feature: MA Experiment 20000480 PARAMETER Experiment Name: Zm_Drought_P Parameter: Timepoint (hr) Value: 72
  misc_feature: MA Experiment 20000480 PARAMETER Experiment Name: Zm_Drought_P Parameter: Tissue Value: Aerial
  misc_feature: MA Experiment 20000480 PARAMETER Experiment Name: Zm_Drought_P Parameter: Treatment Value: Drought vs. No Drought
  misc_feature: MA Experiment ID: 20000487 Result: Up-regulated in Transcription
  misc_feature: MA Experiment 20000487 PARAMETER Experiment Name: Zm_50mM_NH4NO3_L_to_H_P Parameter: Organism Value: Zea mays
  misc_feature: MA Experiment 20000487 PARAMETER Experiment Name: Zm_50mM_NH4NO3_L_to_H_P Parameter: Timepoint (hr) Value: 4
  misc_feature: MA Experiment 20000487 PARAMETER Experiment Name: Zm_50mM_NH4NO3_L_to_H_P Parameter: Tissue Value: Leaves
  misc_feature: MA Experiment 20000487 PARAMETER Experiment Name: Zm_50mM_NH4NO3_L_to_H_P Parameter: Treatment Value: 50mM NH4NO3 vs. 100mM Mannitol
  misc_feature: MA Experiment ID: 20000535 Result: Up-regulated in Transcription
  misc_feature: MA Experiment 20000535 PARAMETER Experiment Name: Zm_Hybrid_Seed_Dev_P Parameter: DAP Value: 30 vs. 12
  misc_feature: MA Experiment 20000535 PARAMETER Experiment Name: Zm_Hybrid_Seed_Dev_P Parameter: Organism Value: Zea mays
  misc_feature: MA Experiment 20000535 PARAMETER Experiment Name: Zm_Hybrid_Seed_Dev_P Parameter: Plant Line Value: 35A19
  misc_feature: MA Experiment 20000535 PARAMETER Experiment Name: Zm_Hybrid_Seed_Dev_P Parameter: Tissue Value: Embryo vs. Unfert Floret
gaactggtctatcggcgccgccttcacgccgagagttccctctttctcgcttgctcactcgcgtcgacgactgggctaccggcgcctccaccctccgcctggtgtccttcgccgtcgacgagcgcacaccagggtacagtacgtattgctcgtgatttgtgtaactacggagcaagctgcatacagcacaagatagaagatgggtatccttgagaggatcaaggagattgaggccgagatggctcggactcagaaaaataaagcaacagaatatcatcttggacaactgaaggcaaaactagcaaagttgaggacacaactattagagcctccaargggttccagcggaggtggagatggttttgaagtcacaaagtttgggcatggtcgtgttgcacttattggatttcccagtgttggaaagtcaactcttttaacgatgttgactgggacacattctgaagctgcatcatatgagttcacaacgs

SEQ ID NO: 19185 - protein, 96 aa, Zea mays subsp. mays
  peptide (1)..(96): Ceres Seq. ID no. 2790551
  misc_feature (1)..(95): Pfam Name: GTP1/OBG family Pfam Description: GTP1/OBG family
  misc_feature (1)..(95): Homolog of NCBI NO: 30584259 NR Description: Homo sapiens developmentally regulated GTP
  misc_feature (1)..(95): Homolog of NCBI NO: 12653443 NR Description: developmentally regulated GTP-binding protein 2
  misc_feature (1)..(95): Homolog of NCBI NO: 10946678 NR Description: developmentally regulated GTP binding protein 2
  misc_feature (1)..(95): Homolog of NCBI NO: 4557537 NR Description: developmentally regulated GTP binding protein 2
  misc_feature (1)..(95): Homolog of NCBI NO: 13877991 NR Description: putative developmentally regulated GTP-binding
  misc_feature (1)..(95): Homolog of NCBI NO: 7441590 NR Description: GTP binding protein - garden pea
  misc_feature (1)..(95): Homolog of NCBI NO: 8778457 NR Description: F1L3.17 [Arabidopsis thaliana]
  misc_feature (1)..(95): Homolog of NCBI NO: 15220113 NR Description: developmentally regulated GTP-binding protein
  misc_feature (1)..(95): Homolog of NCBI NO: 2058456 NR Description: GTP-binding protein [Arabidopsis thaliana]
  misc_feature (1)..(95): Homolog of NCBI NO: 15218561 NR Description: putative GTP-binding protein; protein id:
  misc_feature (46)..(46): Xaa is any aa, unknown or other
MGILERIKEIEAEMARTQKNKATEYHLGQLKAKLAKLRTQLLEPPXGSSGGGDGFEVTKFGHGRVALIGFPSVGKSTLLTMLTGTHSEAASYEFTT

SEQ ID NO: 19186 - protein, 83 aa, Zea mays subsp. mays
  peptide (1)..(83): Ceres Seq. ID no. 2790552
  misc_feature (1)..(82): Pfam Name: GTP1/OBG family Pfam Description: GTP1/OBG family
  misc_feature (1)..(82): Homolog of NCBI NO: 30584259 NR Description: Homo sapiens developmentally regulated GTP
  misc_feature (1)..(82): Homolog of NCBI NO: 12653443 NR Description: developmentally regulated GTP-binding protein 2
  misc_feature (1)..(82): Homolog of NCBI NO: 10946678 NR Description: developmentally regulated GTP binding protein 2
  misc_feature (1)..(82): Homolog of NCBI NO: 4557537 NR Description: developmentally regulated GTP binding protein 2
  misc_feature (1)..(82): Homolog of NCBI NO: 13877991 NR Description: putative developmentally regulated GTP-binding
  misc_feature (1)..(82): Homolog of NCBI NO: 7441590 NR Description: GTP binding protein - garden pea
  misc_feature (1)..(82): Homolog of NCBI NO: 8778457 NR Description: F1L3.17 [Arabidopsis thaliana]
  misc_feature (1)..(82): Homolog of NCBI NO: 15220113 NR Description: developmentally regulated GTP-binding protein
  misc_feature (1)..(82): Homolog of NCBI NO: 2058456 NR Description: GTP-binding protein [Arabidopsis thaliana]
  misc_feature (1)..(82): Homolog of NCBI NO: 15218561 NR Description: putative GTP-binding protein; protein id:
  misc_feature (33)..(33): Xaa is any aa, unknown or other
MARTQKNKATEYHLGQLKAKLAKLRTQLLEPPXGSSGGGDGFEVTKFGHGRVALIGFPSVGKSTLLTMLTGTHSEAASYEFTT

SEQ ID NO: 19187 - protein, 70 aa, Zea mays subsp. mays
  peptide (1)..(70): Ceres Seq. ID no. 2790553
ELVYRRRLHAESSLFLACSLASTTGLPAPPPSAWCPSPSTSAHQGTVRIARDLCNYGASCIQHKIEDGYP

SEQ ID NO: 19188 - DNA, 1616 bp, Zea mays subsp. mays; identical to SEQ ID NO: 10150
  misc_feature (1)..(1616): Ceres Seq. ID no. 12637795
  misc_feature: MA Experiment ID: 108530 Result: Down-regulated in Transcription
  misc_feature: MA Experiment 108530 PARAMETER Experiment Name: Zm_Imbibed_Seeds_P Parameter: Age (day) Value: 6 vs. 2
  misc_feature: MA Experiment 108530 PARAMETER Experiment Name: Zm_Imbibed_Seeds_P Parameter: Organism Value: Zea mays
  misc_feature: MA Experiment 108530 PARAMETER Experiment Name: Zm_Imbibed_Seeds_P Parameter: Plant Line Value: 35A19
  misc_feature: MA Experiment 108530 PARAMETER Experiment Name: Zm_Imbibed_Seeds_P Parameter: Tissue Value: Aerial vs. Embryo
  misc_feature: MA Experiment ID: 108535 Result: Up-regulated in Transcription
  misc_feature: MA Experiment 108535 PARAMETER Experiment Name: Zm_Meristem_P Parameter: Age (day) Value: 8
  misc_feature: MA Experiment 108535 PARAMETER Experiment Name: Zm_Meristem_P Parameter: Organism Value: Zea mays
  misc_feature: MA Experiment 108535 PARAMETER Experiment Name: Zm_Meristem_P Parameter: Plant Line Value: 35A19
  misc_feature: MA Experiment 108535 PARAMETER Experiment Name: Zm_Meristem_P Parameter: Tissue Value: Root Meristem vs. Above Root Meristem
  misc_feature: MA Experiment ID: 108544 Result: Down-regulated in Transcription
  misc_feature: MA Experiment ID: 108556 Result: Down-regulated in Transcription
  misc_feature: MA Experiment 108556 PARAMETER Experiment Name: Zm_Drought_P Parameter: Age (day) Value: 9
  misc_feature: MA Experiment 108556 PARAMETER Experiment Name: Zm_Drought_P Parameter: Organism Value: Zea mays
  misc_feature: MA Experiment 108556 PARAMETER Experiment Name: Zm_Drought_P Parameter: Plant Line Value: 35A19
  misc_feature: MA Experiment 108556 PARAMETER Experiment Name: Zm_Drought_P Parameter: Timepoint (hr) Value: 24
  misc_feature: MA Experiment 108556 PARAMETER Experiment Name: Zm_Drought_P Parameter: Tissue Value: Aerial
  misc_feature: MA Experiment 108556 PARAMETER Experiment Name: Zm_Drought_P Parameter: Treatment Value: Drought vs. No Drought

SEQ ID NO: 19189 - protein, 455 aa, Zea mays subsp. mays; identical to SEQ ID NO: 10151
  peptide (1)..(455): Ceres Seq. ID no. 12637796
  misc_feature (95)..(298): Pfam Name: DEAD/DEAH box helicase Pfam Description: DEAD/DEAH box helicase
  misc_feature (46)..(455): Homolog of NCBI NO: 2500522 NR Description: Eukaryotic initiation factor 4A (eIF-4A) (eIF4A)
  misc_feature (46)..(455): Homolog of NCBI NO: 2341061 NR Description: translational initiation factor eIF-4A [Zea mays]
  misc_feature (46)..(455): Homolog of NCBI NO: 2286151 NR Description: translation initiation factor [Zea mays]
  misc_feature (46)..(455): Homolog of NCBI NO: 1170509 NR Description: EUKARYOTIC INITIATION FACTOR 4A (EIF-4A) (EIF4A)
  misc_feature (46)..(455): Homolog of NCBI NO: 547712 NR Description: Eukaryotic initiation factor 4A (eIF-4A) (eIF4A)
  misc_feature (46)..(455): Homolog of NCBI NO: 2500518 NR Description: Eukaryotic initiation factor 4A-11 (eIF-4A-11)
  misc_feature (46)..(455): Homolog of NCBI NO: 2119933 NR Description: translation initiation factor eIF-4A.11 - common
  misc_feature (46)..(455): Homolog of NCBI NO: 2119938 NR Description: translation initiation factor eIF-4A.14 - common
  misc_feature (46)..(455): Homolog of NCBI NO: 2500520 NR Description: Eukaryotic initiation factor 4A-14 (eIF-4A-14)
  misc_feature (46)..(455): Homolog of NCBI NO: 1170511 NR Description: Eukaryotic initiation factor 4A-10 (eIF-4A-10)

SEQ ID NO: 19190 - protein, 410 aa, Zea mays subsp. mays; identical to SEQ ID NO: 10152
  peptide (1)..(410): Ceres Seq. ID no. 12637797
  misc_feature (50)..(253): Pfam Name: DEAD/DEAH box helicase Pfam Description: DEAD/DEAH box helicase
  misc_feature (1)..(410): Homolog of NCBI NO: 2500522 NR Description: Eukaryotic initiation factor 4A (eIF-4A) (eIF4A)
  misc_feature (1)..(410): Homolog of NCBI NO: 2341061 NR Description: translational initiation factor eIF-4A [Zea mays]
  misc_feature (1)..(410): Homolog of NCBI NO: 2286151 NR Description: translation initiation factor [Zea mays]
  misc_feature (1)..(410): Homolog of NCBI NO: 1170509 NR Description: EUKARYOTIC INITIATION FACTOR 4A (EIF-4A) (EIF4A)
  misc_feature (1)..(410): Homolog of NCBI NO: 547712 NR Description: Eukaryotic initiation factor 4A (eIF-4A) (eIF4A)
  misc_feature (1)..(410): Homolog of NCBI NO: 2500518 NR Description: Eukaryotic initiation factor 4A-11 (eIF-4A-11)
  misc_feature (1)..(410): Homolog of NCBI NO: 2119933 NR Description: translation initiation factor eIF-4A.11 - common
  misc_feature (1)..(410): Homolog of NCBI NO: 2119938 NR Description: translation initiation factor eIF-4A.14 - common
  misc_feature (1)..(410): Homolog of NCBI NO: 2500520 NR Description: Eukaryotic initiation factor 4A-14 (eIF-4A-14)
  misc_feature (1)..(410): Homolog of NCBI NO: 1170511 NR Description: Eukaryotic initiation factor 4A-10 (eIF-4A-10)

SEQ ID NO: 19191 - protein, 391 aa, Zea mays subsp. mays; identical to SEQ ID NO: 10153
  peptide (1)..(391): Ceres Seq. ID no. 12637798
  misc_feature (31)..(234): Pfam Name: DEAD/DEAH box helicase Pfam Description: DEAD/DEAH box helicase
  misc_feature (1)..(391): Homolog of NCBI NO: 2500522 NR Description: Eukaryotic initiation factor 4A (eIF-4A) (eIF4A)
  misc_feature (1)..(391): Homolog of NCBI NO: 2341061 NR Description: translational initiation factor eIF-4A [Zea mays]
  misc_feature (1)..(391): Homolog of NCBI NO: 2286151 NR Description: translation initiation factor [Zea mays]
  misc_feature (1)..(391): Homolog of NCBI NO: 1170509 NR Description: EUKARYOTIC INITIATION FACTOR 4A (EIF-4A) (EIF4A)
  misc_feature (1)..(391): Homolog of NCBI NO: 547712 NR Description: Eukaryotic initiation factor 4A (eIF-4A) (eIF4A)
  misc_feature (1)..(391): Homolog of NCBI NO: 2500518 NR Description: Eukaryotic initiation factor 4A-11 (eIF-4A-11)
  misc_feature (1)..(391): Homolog of NCBI NO: 2119933 NR Description: translation initiation factor eIF-4A.11 - common
  misc_feature (1)..(391): Homolog of NCBI NO: 2119938 NR Description: translation initiation factor eIF-4A.14 - common
  misc_feature (1)..(391): Homolog of NCBI NO: 2500520 NR Description: Eukaryotic initiation factor 4A-14 (eIF-4A-14)
  misc_feature (1)..(391): Homolog of NCBI NO: 1170511 NR Description: Eukaryotic initiation factor 4A-10 (eIF-4A-10)

SEQ ID NO: 19192 - DNA, 1094 bp, Zea mays subsp. mays
  misc_feature (1)..(1094): Ceres Seq. ID no. 12381845
  misc_feature: MA Experiment ID: 108527 Result: Up-regulated in Transcription
  misc_feature: MA Experiment 108527 PARAMETER Experiment Name: Zm_5mM_NO_P Parameter: Age (day) Value: 8
  misc_feature: MA Experiment 108527 PARAMETER Experiment Name: Zm_5mM_NO_P Parameter: Organism Value: Zea mays
  misc_feature: MA Experiment 108527 PARAMETER Experiment Name: Zm_5mM_NO_P Parameter: Plant Line Value: 35A19
  misc_feature: MA Experiment 108527 PARAMETER Experiment Name: Zm_5mM_NO_P Parameter: Timepoint (hr) Value: 6
  misc_feature: MA Experiment 108527 PARAMETER Experiment Name: Zm_5mM_NO_P Parameter: Tissue Value: Aerial
  misc_feature: MA Experiment 108527 PARAMETER Experiment Name: Zm_5mM_NO_P Parameter: Treatment Value: 5mM NO vs. No Treatment
  misc_feature: MA Experiment ID: 108533 Result: Up-regulated in Transcription
  misc_feature: MA Experiment 108533 PARAMETER Experiment Name: Zm_4deg_Cold_P Parameter: Age (hr) Value: 8
  misc_feature: MA Experiment 108533 PARAMETER Experiment Name: Zm_4deg_Cold_P Parameter: Organism Value: Zea mays
  misc_feature: MA Experiment 108533 PARAMETER Experiment Name: Zm_4deg_Cold_P Parameter: Plant Line Value: 35A19
  misc_feature: MA Experiment 108533 PARAMETER Experiment Name: Zm_4deg_Cold_P Parameter: Temperature (deg C) Value: 4 vs. 22
  misc_feature: MA Experiment 108533 PARAMETER Experiment Name: Zm_4deg_Cold_P Parameter: Timepoint (hr) Value: 1
  misc_feature: MA Experiment 108533 PARAMETER Experiment Name: Zm_4deg_Cold_P Parameter: Tissue Value: Aerial
  misc_feature: MA Experiment ID: 108534 Result: Up-regulated in Transcription
  misc_feature: MA Experiment 108534 PARAMETER Experiment Name: Zm_4deg_Cold_P Parameter: Age (hr) Value: 8
  misc_feature: MA Experiment 108534 PARAMETER Experiment Name: Zm_4deg_Cold_P Parameter: Organism Value: Zea mays
  misc_feature: MA Experiment 108534 PARAMETER Experiment Name: Zm_4deg_Cold_P Parameter: Plant Line Value: 35A19
  misc_feature: MA Experiment 108534 PARAMETER Experiment Name: Zm_4deg_Cold_P Parameter: Temperature (deg C) Value: 4 vs. 22
  misc_feature: MA Experiment 108534 PARAMETER Experiment Name: Zm_4deg_Cold_P Parameter: Timepoint (hr) Value: 6
  misc_feature: MA Experiment 108534 PARAMETER Experiment Name: Zm_4deg_Cold_P Parameter: Tissue Value: Aerial
  misc_feature: MA Experiment ID: 108535 Result: Down-regulated in Transcription
  misc_feature: MA Experiment 108535 PARAMETER Experiment Name: Zm_Meristem_P Parameter: Age (day) Value: 8
  misc_feature: MA Experiment 108535 PARAMETER Experiment Name: Zm_Meristem_P Parameter: Organism Value: Zea mays
  misc_feature: MA Experiment 108535 PARAMETER Experiment Name: Zm_Meristem_P Parameter: Plant Line Value: 35A19
  misc_feature: MA Experiment 108535 PARAMETER Experiment Name: Zm_Meristem_P Parameter: Tissue Value: Root Meristem vs. Above Root Meristem
  misc_feature: MA Experiment ID: 108687 Result: Down-regulated in Transcription
  misc_feature: MA Experiment 108687 PARAMETER Experiment Name: Zm_Embryos-Flowers__P Parameter: Tissue Value: Embryo vs. Aerial+
  misc_feature: MA Experiment ID: 108689 Result: Up-regulated in Transcription
  misc_feature: MA Experiment 108689 PARAMETER Experiment Name: Zm_Drought_Roots_P Parameter: Age (day) Value: 9
  misc_feature: MA Experiment 108689 PARAMETER Experiment Name: Zm_Drought_Roots_P Parameter: Organism Value: Zea mays
  misc_feature: MA Experiment 108689 PARAMETER Experiment Name: Zm_Drought_Roots_P Parameter: Plant Line Value: 35A19
  misc_feature: MA Experiment 108689 PARAMETER Experiment Name: Zm_Drought_Roots_P Parameter: Timepoint (hr) Value: 24
  misc_feature: MA Experiment 108689 PARAMETER Experiment Name: Zm_Drought_Roots_P Parameter: Tissue Value: Roots
  misc_feature: MA Experiment 108689 PARAMETER Experiment Name: Zm_Drought_Roots_P Parameter: Treatment Value: Drought vs. No Drought
  misc_feature: MA Experiment ID: 20000477 Result: Up-regulated in Transcription
  misc_feature: MA Experiment 20000477 PARAMETER Experiment Name: Zm_5mM_SA_P Parameter: Age (day) Value: 10
  misc_feature: MA Experiment 20000477 PARAMETER Experiment Name: Zm_5mM_SA_P Parameter: Organism Value: Zea mays
  misc_feature: MA Experiment 20000477 PARAMETER Experiment Name: Zm_5mM_SA_P Parameter: Plant Line Value: 35A19
  misc_feature: MA Experiment 20000477 PARAMETER Experiment Name: Zm_5mM_SA_P Parameter: Timepoint (hr) Value: 48
  misc_feature: MA Experiment 20000477 PARAMETER Experiment Name: Zm_5mM_SA_P Parameter: Tissue Value: Aerial
  misc_feature: MA Experiment 20000477 PARAMETER Experiment Name: Zm_5mM_SA_P Parameter: Treatment Value: 5mM SA vs. No Treatment
  misc_feature: MA Experiment ID: 20000479 Result: Up-regulated in Transcription
  misc_feature: MA Experiment 20000479 PARAMETER Experiment Name: Zm_Drought_P Parameter: Age (day) Value: 10
  misc_feature: MA Experiment 20000479 PARAMETER Experiment Name: Zm_Drought_P Parameter: Organism Value: Zea mays
  misc_feature: MA Experiment 20000479 PARAMETER Experiment Name: Zm_Drought_P Parameter: Plant Line Value: 35A19
  misc_feature: MA Experiment 20000479 PARAMETER Experiment Name: Zm_Drought_P Parameter: Timepoint (hr) Value: 48
  misc_feature: MA Experiment 20000479 PARAMETER Experiment Name: Zm_Drought_P Parameter: Tissue Value: Aerial
  misc_feature: MA Experiment 20000479 PARAMETER Experiment Name: Zm_Drought_P Parameter: Treatment Value: Drought vs. No Drought
gcacgagaccattacctagaacatcctaatcgaaaaaggagatacttgaagcctcaccagagaccacaaggagggatattcgcaggacccggtttttgcagcacgaggtgtggaggctgctctgccataccaaaaagcagacagaggaccaaggaaggaagcagggatccggctttgctctgcaaccatgagctccctgtacgacgtctcctgcttcgcggctggccttgctgggaacgtcttcgccctcgccctcttcctgtcgccggtgccgacgttcaagagggtcctcaaggccaagtcgacggagcagttcgatgggctgccctacctgctgtccctgctcaactgctgcatctgcctctggtacggcctcccgtgggtctccgacggcggcagggccctcgtcgccaccgtcaactgcaccggcgccctgttccagctcgcctacatctcgctcttcatcttctacgccgacagcaggaccactcggctcaaggtcgcggggcttctggtgctagtggtcttcgcgttcgcgctcatcgcacacgccagcatcgccttcttcgaccagccgctccggcagctgttcgttggcagcgtcagcatggcgtccctggtctccatgttcgcttccccgctggctgtcatgggtgtggtggtccgcaccgagtgcgtggagttcatgcccttctacctctctctgtccacgttcctgatgagcgcatccttcgcagtgtacgggcttctcctgcgtgatttcttcatatacttcccgaatgggctcggagtcatcctgggagcaatgcagctggtgctgtacgcgtactacagccggagatggaaaagcagcgactcgtcagcaccgttgcttgcctgatcatgtagccgagttcgtcagtccaattgcccgtgccgtgctttctgttgttctctgttctgccatcctgtaattctaggagaggagctaggcggtgttttggaacagattaatcgtactgctacgaaatatattttttgagatagattattttaaatagagatggtcataaagtttattcgtcttctaagagaattttgaatacgatcatttt

SEQ ID NO: 19193 - protein, 252 aa, Zea mays subsp. mays
  peptide (1)..(252): Ceres Seq. ID no. 12381846
ARDHYLEHPNRKRRYLKPHQRPQGGIFAGPGFCSTRCGGCSAIPKSRQRTKEGSRDPALLCNHELPVRRLLLRGWPCWERLRPRPLPVAGADVQEGPQGQVDGAVRWAALPAVPAQLLHLPLVRPPVGLRRRQGPRRHRQLHRRPVPARLHLALHLLRRQQDHSAQGRGASGASGLRVRAHRTRQHRLLRPAAPAAVRWQRQHGVPGLHVRFPAGCHGCGGPHRVRGVHALLPLSVHVPDERILRSVRASPA

SEQ ID NO: 19194 - protein, 230 aa, Zea mays subsp. mays
  peptide (1)..(230): Ceres Seq. ID no. 12381847
  misc_feature (10)..(99): Pfam Name: MtN3/saliva family Pfam Description: MtN3/saliva family
  misc_feature (13)..(215): Homolog of NCBI NO: 18413388 NR Description: putative protein
  misc_feature (6)..(217): Homolog of NCBI NO: 34912454 NR Description: P0681B11.31 [Oryza sativa (japonica
  misc_feature (13)..(218): Homolog of NCBI NO: 15238678 NR Description: MtN3 protein-like; protein id: At5g53190.1
  misc_feature (10)..(215): Homolog of NCBI NO: 30683457 NR Description: nodulin MtN3 family protein [Arabidopsis thaliana]
  misc_feature (10)..(215): Homolog of NCBI NO: 27754697 NR Description: putative cytochrome c oxidoreductase [Arabidopsis
  misc_feature (13)..(218): Homolog of NCBI NO: 34146818 NR Description: At5g53190 [Arabidopsis thaliana]
  misc_feature (13)..(224): Homolog of NCBI NO: 18394992 NR Description: expressed protein
  misc_feature (7)..(226): Homolog of NCBI NO: 34907420 NR Description: P0018C10.36 [Oryza sativa (japonica
  misc_feature (1)..(229): Homolog of NCBI NO: 18400517 NR Description: expressed protein
  misc_feature (1)..(183): Homolog of NCBI NO: 34911484 NR Description: putative MtN3 [Oryza sativa (japonica
MSSLYDVSCFAAGLAGNVFALALFLSPVPTFKRVLKAKSTEQFDGLPYLLSLLNCCICLWYGLPWVSDGGRALVATVNCTGALFQLAYISLFIFYADSRTTRLKVAGLLVLVVFAFALIAHASIAFFDQPLRQLFVGSVSMASLVSMFASPLAVMGVVVRTECVEFMPFYLSLSTFLMSASFAVYGLLLRDFFIYFPNGLGVILGAMQLVLYAYYSRRWKSSDSSAPLLA

SEQ ID NO: 19195 - DNA, 716 bp, Zea mays subsp. mays
  misc_feature (1)..(716): Ceres Seq. ID no. 12419788
  misc_feature: MA Experiment ID: 108522 Result: Up-regulated in Transcription
  misc_feature: MA Experiment 108522 PARAMETER Experiment Name: Zm_42deg_Heat_P Parameter: Age (day) Value: 8
  misc_feature: MA Experiment 108522 PARAMETER Experiment Name: Zm_42deg_Heat_P Parameter: Organism Value: Zea mays
  misc_feature: MA Experiment 108522 PARAMETER Experiment Name: Zm_42deg_Heat_P Parameter: Plant Line Value: 35A19
  misc_feature: MA Experiment 108522 PARAMETER Experiment Name: Zm_42deg_Heat_P Parameter: Temperature (deg C) Value: 42 vs. 22
  misc_feature: MA Experiment 108522 PARAMETER Experiment Name: Zm_42deg_Heat_P Parameter: Timepoint (hr) Value: 1
  misc_feature: MA Experiment 108522 PARAMETER Experiment Name: Zm_42deg_Heat_P Parameter: Tissue Value: Aerial
  misc_feature: MA Experiment ID: 108523 Result: Up-regulated in Transcription
  misc_feature: MA Experiment 108523 PARAMETER Experiment Name: Zm_42deg_Heat_P Parameter: Age (day) Value: 8
  misc_feature: MA Experiment 108523 PARAMETER Experiment Name: Zm_42deg_Heat_P Parameter: Organism Value: Zea mays
  misc_feature: MA Experiment 108523 PARAMETER Experiment Name: Zm_42deg_Heat_P Parameter: Plant Line Value: 35A19
  misc_feature: MA Experiment 108523 PARAMETER Experiment Name: Zm_42deg_Heat_P Parameter: Temperature (deg C) Value: 42 vs. 22
  misc_feature: MA Experiment 108523 PARAMETER Experiment Name: Zm_42deg_Heat_P Parameter: Timepoint (hr) Value: 6
  misc_feature: MA Experiment 108523 PARAMETER Experiment Name: Zm_42deg_Heat_P Parameter: Tissue Value: Aerial
  misc_feature: MA Experiment ID: 108689 Result: Up-regulated in Transcription
  misc_feature: MA Experiment 108689 PARAMETER Experiment Name: Zm_Drought_Roots_P Parameter: Age (day) Value: 9
  misc_feature: MA Experiment 108689 PARAMETER Experiment Name: Zm_Drought_Roots_P Parameter: Organism Value: Zea mays
  misc_feature: MA Experiment 108689 PARAMETER Experiment Name: Zm_Drought_Roots_P Parameter: Plant Line Value: 35A19
  misc_feature: MA Experiment 108689 PARAMETER Experiment Name: Zm_Drought_Roots_P Parameter: Timepoint (hr) Value: 24
  misc_feature: MA Experiment 108689 PARAMETER Experiment Name: Zm_Drought_Roots_P Parameter: Tissue Value: Roots
  misc_feature: MA Experiment 108689 PARAMETER Experiment Name: Zm_Drought_Roots_P Parameter: Treatment Value: Drought vs. No Drought
  misc_feature: MA Experiment ID: 20000534 Result: Up-regulated in Transcription
  misc_feature: MA Experiment 20000534 PARAMETER Experiment Name: Zm_Hybrid_Pollen_P Parameter: Age (day) Value: 8
  misc_feature: MA Experiment 20000534 PARAMETER Experiment Name: Zm_Hybrid_Pollen_P Parameter: Organism Value: Zea mays
  misc_feature: MA Experiment 20000534 PARAMETER Experiment Name: Zm_Hybrid_Pollen_P Parameter: Plant Line Value: 35A19
  misc_feature: MA Experiment 20000534 PARAMETER Experiment Name: Zm_Hybrid_Pollen_P Parameter: Tissue Value: Pollen vs. Aerial
gcacgagaccattacctagaacatcctaatcaaaaaaaaaggccggaggtgagccccgcatccgcggccaagtacccatgacgacgaggctgacagcgacgttgttgctctccagaaccctcgtccgccgcgtaacctcgcgaaccccgacacccctcggccctttcggtctcgaaccatccgcaggaatccccatctcctggtccagacgcgcctcctcgaccgcctcgggagatcggggccaggaaccgccaccggccatggattcgcctatcaaggtggtttctcacctggggagcggacgagggggagagggagagggaggggccgcagcgatcgacgcggggaagtcggcacggaggccgctcagcctgtggcccgggatgtaccactccccggtgaccaacgcgctctgggaggcgcgatccagcatcttcgagcggatgatggacgctgggaacggcgcttcctctgccgagcagcggccgcagactgagctgctcgtcaagacgcccgcgcagagccggaccagcatcgtgtacaagttcgccaccgacgacatcctcagggagcagtaccgggacccctggaacgagttgcgcatcggcaagctgctcgaggatcttgacgccctcgccggcaccatcgccgtcaagcactgttcaggggaagatagcacaacaagaccccttttggttgtgactgcttctgttgac

SEQ ID NO: 19196 - protein, 213 aa, Zea mays subsp. mays
  peptide (1)..(213): Ceres Seq. ID no. 12419789
  misc_feature (169)..(212): Homolog of NCBI NO: 15224555 NR Description: hypothetical protein; protein id: At2g30720.1
  misc_feature (86)..(152): Homolog of NCBI NO: 15224555 NR Description: hypothetical protein; protein id: At2g30720.1
  misc_feature (94)..(212): Homolog of NCBI NO: 15238956 NR Description: putative protein; protein id: At5g48370.1
MTTRLTATLLLSRTLVRRVTSRTPTPLGPFGLEPSAGIPISWSRRASSTASGDRGQEPPPAMDSPIKVVSHLGSGRGGEGEGGAAAIDAGKSARRPLSLWPGMYHSPVTNALWEARSSIFERMMDAGNGASSAEQRPQTELLVKTPAQSRTSIVYKFATDDILREQYRDPWNELRIGKLLEDLDALAGTIAVKHCSGEDSTTRPLLVVTASVD

SEQ ID NO: 19197 - protein, 152 aa, Zea mays subsp. mays
  peptide (1)..(152): Ceres Seq. ID no. 12419790
  misc_feature (108)..(151): Homolog of NCBI NO: 15224555 NR Description: hypothetical protein; protein id: At2g30720.1
  misc_feature (25)..(91): Homolog of NCBI NO: 15224555 NR Description: hypothetical protein; protein id: At2g30720.1
  misc_feature (33)..(151): Homolog of NCBI NO: 15238956 NR Description: putative protein; protein id: At5g48370.1
MDSPIKVVSHLGSGRGGEGEGGAAAIDAGKSARRPLSLWPGMYHSPVTNALWEARSSIFERMMDAGNGASSAEQRPQTELLVKTPAQSRTSIVYKFATDDILREQYRDPWNELRIGKLLEDLDALAGTIAVKHCSGEDSTTRPLLVVTASVD

SEQ ID NO: 19198 - protein, 111 aa, Zea mays subsp. mays
  peptide (1)..(111): Ceres Seq. ID no. 12419791
  misc_feature (67)..(110): Homolog of NCBI NO: 15224555 NR Description: hypothetical protein; protein id: At2g30720.1
  misc_feature (1)..(50): Homolog of NCBI NO: 15224555 NR Description: hypothetical protein; protein id: At2g30720.1
  misc_feature (1)..(110): Homolog of NCBI NO: 15238956 NR Description: putative protein; protein id: At5g48370.1
MYHSPVTNALWEARSSIFERMMDAGNGASSAEQRPQTELLVKTPAQSRTSIVYKFATDDILREQYRDPWNELRIGKLLEDLDALAGTIAVKHCSGEDSTTRPLLVVTASVD

SEQ ID NO: 19199 - DNA, 1903 bp, Zea mays subsp. mays
  misc_feature (1)..(1903): Ceres Seq. ID no. 12436393
  misc_feature: MA Experiment ID: 108528 Result: Up-regulated in Transcription
  misc_feature: MA Experiment 108528 PARAMETER Experiment Name: Zm_Imbibed_Seeds_P Parameter: Age (day) Value: 5 vs. 2
  misc_feature: MA Experiment 108528 PARAMETER Experiment Name: Zm_Imbibed_Seeds_P Parameter: Organism Value: Zea mays
  misc_feature: MA Experiment 108528 PARAMETER Experiment Name: Zm_Imbibed_Seeds_P Parameter: Plant Line Value: 35A19
  misc_feature: MA Experiment 108528 PARAMETER Experiment Name: Zm_Imbibed_Seeds_P Parameter: Tissue Value: Aerial vs. Embryo
  misc_feature: MA Experiment ID: 108530 Result: Up-regulated in Transcription
  misc_feature: MA Experiment 108530 PARAMETER Experiment Name: Zm_Imbibed_Seeds_P Parameter: Age (day) Value: 6 vs. 2
  misc_feature: MA Experiment 108530 PARAMETER Experiment Name: Zm_Imbibed_Seeds_P Parameter: Organism Value: Zea mays
  misc_feature: MA Experiment 108530 PARAMETER Experiment Name: Zm_Imbibed_Seeds_P Parameter: Plant Line Value: 35A19
  misc_feature: MA Experiment 108530 PARAMETER Experiment Name: Zm_Imbibed_Seeds_P Parameter: Tissue Value: Aerial vs. Embryo
  misc_feature: MA Experiment ID: 108534 Result: Up-regulated in Transcription
  misc_feature: MA Experiment 108534 PARAMETER Experiment Name: Zm_4deg_Cold_P Parameter: Age (hr) Value: 8
  misc_feature: MA Experiment 108534 PARAMETER Experiment Name: Zm_4deg_Cold_P Parameter: Organism Value: Zea mays
  misc_feature: MA Experiment 108534 PARAMETER Experiment Name: Zm_4deg_Cold_P Parameter: Plant Line Value: 35A19
  misc_feature: MA Experiment 108534 PARAMETER Experiment Name: Zm_4deg_Cold_P Parameter: Temperature (deg C) Value: 4 vs. 22
  misc_feature: MA Experiment 108534 PARAMETER Experiment Name: Zm_4deg_Cold_P Parameter: Timepoint (hr) Value: 6
  misc_feature: MA Experiment 108534 PARAMETER Experiment Name: Zm_4deg_Cold_P Parameter: Tissue Value: Aerial
gcccaacacccaattgaagacgtcccaatcccaaccctactcccttgcctccccctaatgacatcgcctggcggcgtcttctccgccgcgctcgtcgccgaggacttcccttgggtggacatggaggaggagatggggatggccccggacatgtaccgcgaggtgttcgacctcgcgcagcgcgggacacgagcctttcgcgaccgcctcttcgacgaggcaatatcctgttacactaaagctcaaaatttgagaccagatccaattatccttggcaatcgaagtttgactttctgccggttaagtcaactgttgagggagagatcagcagccgactctgaatatcagcccttgaatggccttgatcctacaactcatgcagagttagctctgaaggatgcagagaagatattatctatcaacagtaattctcctagaccatatattctcaaggcatatgcgctatttctgatggagcattaccatgaggcacgtgagacccttcttgctggtcttcaagttgatcccctcagtcatgtcttgcaaacctgtctgaatgatctggataggaatacaaatattgcagctggggcaaggcgtgcaaggttagctaggattgatgattttgagtgcacattatgctttaagctattgtatgaacctgtcactacaccatgtggccattcattttgtcgctcttgtctacatcagtcaatggatcatggtaataagtgccccatgtgtcggacagtattatttatcggtccaagaacatgccctataagtgtaacattaagcaacataattcagagaaatttcccagaagaatatgctgagaggaggtcagaacatgagactatgacatatgctggtgttgatttgatgcctctctttgtcatggatgttgtacttccatcccaaaagatggcactgaacatatttgaacctcgctacagactgatggtacggagaataatggaagggaaccatcggatgggaatggttgctattgattcggcaacgggtactgtagcagattgtggctgtgaggtggaaatttcagagtgtgaaccacttccacatgggcgcttttatttagaggtggaaggcacacgtcggtttcgtatcgtgcgatcatgggatcaagatggatatagagttgctgaagttgaatggttgaaagatatacctctgccagaaggttcacaagggagaagagaactaatggaactggccaatggagcttcagagctggccagggcatatatcagacatgctagagataccgtacggactgcaaggcgaacaagacatctggatcttgagggcatgcctgggccacaggacccggaaaaatttagtttctggctagccaacttgataagtttgaggccctcggatagattagatacgttacgccttcgcgacactagggagagaatttctagtagcatcagtttgctccgtgattccgaacaaggctgccgtgtacaatgacggaaacagtacaagaatcgtttccacagaccaattcgttcgtctaggagtatatcgatttggagctactccgtgattccgaacaaggctgccgtgtacaatgacggaaacagtacaagaatcgtttccacgtaccaattcgttcgtctaggagtatatcgatttggagctactccgtgattccgaacaaggctgccgtatacaatgacggaaacagtacaagaatcgtttccacagaccaattcgttcgtctaggagtatatcgatttggagctagggatgtaatatgatttagaaaatatccgtccagatccagactcgaagatggtgaatactggttcggatggaattttcggatatccggtctttttttgataacggatacaaatacggatattttattcgc

SEQ ID NO: 19200 - protein, 498 aa, Zea mays subsp. mays
  peptide (1)..(498): Ceres Seq. ID no. 12436394
  misc_feature (295)..(489): Pfam Name: ATP-dependent protease La (LON) domain Pfam Description: ATP-dependent protease La (LON) domain
  misc_feature (193)..(288): Homolog of NCBI NO: 34878512 NR Description: similar to hypothetical protein FLJ23749 [Rattus
  misc_feature (295)..(482): Homolog of NCBI NO: 34878512 NR Description: similar to hypothetical protein FLJ23749 [Rattus
  misc_feature (216)..(482): Homolog of NCBI NO: 18676903 NR Description: unnamed protein product [Homo sapiens]
  misc_feature (203)..(482): Homolog of NCBI NO: 10439066 NR Description: unnamed protein product [Homo sapiens]
  misc_feature (206)..(481): Homolog of NCBI NO: 38348242 NR Description: FLJ45273 protein [Homo sapiens]
  misc_feature (203)..(482): Homolog of NCBI NO: 26449305 NR Description: hypothetical protein [Macaca fascicularis]
  misc_feature (193)..(482): Homolog of NCBI NO: 40217796 NR Description: hypothetical protein FLJ23749 [Homo sapiens]
  misc_feature (193)..(482): Homolog of NCBI NO: 38089190 NR Description: similar to hypothetical protein FLJ23749 [Mus
  misc_feature (42)..(498): Homolog of NCBI NO: 21554128 NR Description: unknown [Arabidopsis thaliana]
  misc_feature (42)..(498): Homolog of NCBI NO: 18394639 NR Description: expressed protein
AQHPIEDVPIPTLLPCLPLMTSPGGVFSAALVAEDFPWVDMEEEMGMAPDMYREVFDLAQRGTRAFRDRLFDEAISCYTKAQNLRPDPIILGNRSLTFCRLSQLLRERSAADSEYQPLNGLDPTTHAELALKDAEKILSINSNSPRPYILKAYALFLMEHYHEARETLLAGLQVDPLSHVLQTCLNDLDRNTNIAAGARRARLARIDDFECTLCFKLLYEPVTTPCGHSFCRSCLHQSMDHGNKCPMCRTVLFIGPRTCPISVTLSNIIQRNFPEEYAERRSEHETMTYAGVDLMPLFVMDVVLPSQKMALNIFEPRYRLMVRRIMEGNHRMGMVAIDSATGTVADCGCEVEISECEPLPHGRFYLEVEGTRRFRIVRSWDQDGYRVAEVEWLKDIPLPEGSQGRRELMELANGASELARAYIRHARDTVRTARRTRHLDLEGMPGPQDPEKFSFWLANLISLRPSDRLDTLRLRDTRERISSSISLLRDSEQGCRVQ

SEQ ID NO: 19201 - protein, 479 aa, Zea mays subsp. mays
  peptide (1)..(479): Ceres Seq. ID no. 12436395
  misc_feature (276)..(470): Pfam Name: ATP-dependent protease La (LON) domain Pfam Description: ATP-dependent protease La (LON) domain
  misc_feature (184)..(463): Homolog of NCBI NO: 26449305 NR Description: hypothetical protein [Macaca fascicularis]
  misc_feature (174)..(269): Homolog of NCBI NO: 34878512 NR Description: similar to hypothetical protein FLJ23749 [Rattus
  misc_feature (276)..(463): Homolog of NCBI NO: 34878512 NR Description: similar to hypothetical protein FLJ23749 [Rattus
  misc_feature (197)..(463): Homolog of NCBI NO: 18676903 NR Description: unnamed protein product [Homo sapiens]
  misc_feature (184)..(463): Homolog of NCBI NO: 10439066 NR Description: unnamed protein product [Homo sapiens]
  misc_feature (187)..(462): Homolog of NCBI NO: 38348242 NR Description: FLJ45273 protein [Homo sapiens]
  misc_feature (174)..(463): Homolog of NCBI NO: 40217796 NR Description: hypothetical protein FLJ23749 [Homo sapiens]
  misc_feature (174)..(463): Homolog of NCBI NO: 38089190 NR Description: similar to hypothetical protein FLJ23749 [Mus
  misc_feature (23)..(479): Homolog of NCBI NO: 21554128 NR Description: unknown [Arabidopsis thaliana]
  misc_feature (23)..(479): Homolog of NCBI NO: 18394639 NR Description: expressed protein
MTSPGGVFSAALVAEDFPWVDMEEEMGMAPDMYREVFDLAQRGTRAFRDRLFDEAISCYTKAQNLRPDPIILGNRSLTFCRLSQLLRERSAADSEYQPLNGLDPTTHAELALKDAEKILSINSNSPRPYILKAYALFLMEHYHEARETLLAGLQVDPLSHVLQTCLNDLDRNTNIAAGARRARLARIDDFECTLCFKLLYEPVTTPCGHSFCRSCLHQSMDHGNKCPMCRTVLFIGPRTCPISVTLSNIIQRNFPEEYAERRSEHETMTYAGVDLMPLFVMDVVLPSQKMALNIFEPRYRLMVRRIMEGNHRMGMVAIDSATGTVADCGCEVEISECEPLPHGRFYLEVEGTRRFRIVRSWDQDGYRVAEVEWLKDIPLPEGSQGRRELMELANGASELARAYIRHARDTVRTARRTRHLDLEGMPGPQDPEKFSFWLANLISLRPSDRLDTLRLRDTRERISSSISLLRDSEQGCRVQ

SEQ ID NO: 19202 - protein, 458 aa, Zea mays subsp. mays
  peptide (1)..(458): Ceres Seq. ID no. 12436396
  misc_feature (255)..(449): Pfam Name: ATP-dependent protease La (LON) domain Pfam Description: ATP-dependent protease La (LON) domain
  misc_feature (163)..(442): Homolog of NCBI NO: 26449305 NR Description: hypothetical protein [Macaca fascicularis]
  misc_feature (153)..(248): Homolog of NCBI NO: 34878512 NR Description: similar to hypothetical protein FLJ23749 [Rattus
  misc_feature (255)..(442): Homolog of NCBI NO: 34878512 NR Description: similar to hypothetical protein FLJ23749 [Rattus
  misc_feature (176)..(442): Homolog of NCBI NO: 18676903 NR Description: unnamed protein product [Homo sapiens]
  misc_feature (163)..(442): Homolog of NCBI NO: 10439066 NR Description: unnamed protein product [Homo sapiens]
  misc_feature (166)..(441): Homolog of NCBI NO: 38348242 NR Description: FLJ45273 protein [Homo sapiens]
  misc_feature (153)..(442): Homolog of NCBI NO: 40217796 NR Description: hypothetical protein FLJ23749 [Homo sapiens]
  misc_feature (153)..(442): Homolog of NCBI NO: 38089190 NR Description: similar to hypothetical protein FLJ23749 [Mus
  misc_feature (2)..(458): Homolog of NCBI NO: 21554128 NR Description: unknown [Arabidopsis thaliana]
  misc_feature (2)..(458): Homolog of NCBI NO: 18394639 NR Description: expressed protein
MEEEMGMAPDMYREVFDLAQRGTRAFRDRLFDEAISCYTKAQNLRPDPIILGNRSLTFCRLSQLLRERSAADSEYQPLNGLDPTTHAELALKDAEKILSINSNSPRPYILKAYALFLMEHYHEARETLLAGLQVDPLSHVLQTCLNDLDRNTNIAAGARRARLARIDDFECTLCFKLLYEPVTTPCGHSFCRSCLHQSMDHGNKCPMCRTVLFIGPRTCPISVTLSNIIQRNFPEEYAERRSEHETMTYAGVDLMPLFVMDVVLPSQKMALNIFEPRYRLMVRRIMEGNHRMGMVAIDSATGTVADCGCEVEISECEPLPHGRFYLEVEGTRRFRIVRSWDQDGYRVAEVEWLKDIPLPEGSQGRRELMELANGASELARAYIRHARDTVRTARRTRHLDLEGMPGPQDPEKFSFWLANLISLRPSDRLDTLRLRDTRERISSSISLLRDSEQGCRVQ

SEQ ID NO: 19203 - DNA, 1942 bp, Zea mays subsp. mays
  misc_feature (1)..(1942): Ceres Seq. ID no. 12436371
  misc_feature: MA Experiment ID: 108515 Result: Up-regulated in Transcription
  misc_feature: MA Experiment 108515 PARAMETER Experiment Name: Zm_2mM_SA_P Parameter: Age (day) Value: 8
  misc_feature: MA Experiment 108515 PARAMETER Experiment Name: Zm_2mM_SA_P Parameter: Organism Value: Zea mays
  misc_feature: MA Experiment 108515 PARAMETER Experiment Name: Zm_2mM_SA_P Parameter: Plant Line Value: 35A19
  misc_feature: MA Experiment 108515 PARAMETER Experiment Name: Zm_2mM_SA_P Parameter: Timepoint (hr) Value: 12
  misc_feature: MA Experiment 108515 PARAMETER Experiment Name: Zm_2mM_SA_P Parameter: Tissue Value: Aerial
  misc_feature: MA Experiment 108515 PARAMETER Experiment Name: Zm_2mM_SA_P Parameter: Treatment Value: 2mM SA vs. No Treatment
  misc_feature: MA Experiment ID: 108527 Result: Up-regulated in Transcription
  misc_feature: MA Experiment 108527 PARAMETER Experiment Name: Zm_5mM_NO_P Parameter: Age (day) Value: 8
  misc_feature: MA Experiment 108527 PARAMETER Experiment Name: Zm_5mM_NO_P Parameter: Organism Value: Zea mays
  misc_feature: MA Experiment 108527 PARAMETER Experiment Name: Zm_5mM_NO_P Parameter: Plant Line Value: 35A19
  misc_feature: MA Experiment 108527 PARAMETER Experiment Name: Zm_5mM_NO_P Parameter: Timepoint (hr) Value: 6
  misc_feature: MA Experiment 108527 PARAMETER Experiment Name: Zm_5mM_NO_P Parameter: Tissue Value: Aerial
  misc_feature: MA Experiment 108527 PARAMETER Experiment Name: Zm_5mM_NO_P Parameter: Treatment Value: 5mM NO vs. No Treatment
  misc_feature: MA Experiment ID: 108528 Result: Down-regulated in Transcription
  misc_feature: MA Experiment 108528 PARAMETER Experiment Name: Zm_Imbibed_Seeds_P Parameter: Age (day) Value: 5 vs. 2
  misc_feature: MA Experiment 108528 PARAMETER Experiment Name: Zm_Imbibed_Seeds_P Parameter: Organism Value: Zea mays
  misc_feature: MA Experiment 108528 PARAMETER Experiment Name: Zm_Imbibed_Seeds_P Parameter: Plant Line Value: 35A19
  misc_feature: MA Experiment 108528 PARAMETER Experiment Name: Zm_Imbibed_Seeds_P Parameter: Tissue Value: Aerial vs. Embryo
  misc_feature: MA Experiment ID: 108530 Result: Down-regulated in Transcription
  misc_feature: MA Experiment 108530 PARAMETER Experiment Name: Zm_Imbibed_Seeds_P Parameter: Age (day) Value: 6 vs. 2
  misc_feature: MA Experiment 108530 PARAMETER Experiment Name: Zm_Imbibed_Seeds_P Parameter: Organism Value: Zea mays
  misc_feature: MA Experiment 108530 PARAMETER Experiment Name: Zm_Imbibed_Seeds_P Parameter: Plant Line Value: 35A19
  misc_feature: MA Experiment 108530 PARAMETER Experiment Name: Zm_Imbibed_Seeds_P Parameter: Tissue Value: Aerial vs. Embryo
  misc_feature: MA Experiment ID: 108536 Result: Down-regulated in Transcription
  misc_feature: MA Experiment 108536 PARAMETER Experiment Name: Zm_Meristem_P Parameter: Age (day) Value: 8
  misc_feature: MA Experiment 108536 PARAMETER Experiment Name: Zm_Meristem_P Parameter: Organism Value: Zea mays
  misc_feature: MA Experiment 108536 PARAMETER Experiment Name: Zm_Meristem_P Parameter: Plant Line Value: 35A19
  misc_feature: MA Experiment 108536 PARAMETER Experiment Name: Zm_Meristem_P Parameter: Tissue Value: Shoot Meristem vs. Above Shoot Meristem
  misc_feature: MA Experiment ID: 108542 Result: Up-regulated in Transcription
  misc_feature: MA Experiment 108542 PARAMETER Experiment Name: Zm_150mM_NaCl_P Parameter: Age (day) Value: 8
  misc_feature: MA Experiment 108542 PARAMETER Experiment Name: Zm_150mM_NaCl_P Parameter: Organism Value: Zea mays
  misc_feature: MA Experiment 108542 PARAMETER Experiment Name: Zm_150mM_NaCl_P Parameter: Plant Line Value: 35A19
  misc_feature: MA Experiment 108542 PARAMETER Experiment Name: Zm_150mM_NaCl_P Parameter: Timepoint (hr) Value: 6
  misc_feature: MA Experiment 108542 PARAMETER Experiment Name: Zm_150mM_NaCl_P Parameter: Tissue Value: Aerial
  misc_feature: MA Experiment 108542 PARAMETER Experiment Name: Zm_150mM_NaCl_P Parameter: Treatment Value: 150mM NaCl vs. No Treatment
  misc_feature: MA Experiment ID: 108543 Result: Up-regulated in Transcription
  misc_feature: MA Experiment ID: 108544 Result: Down-regulated in Transcription
  misc_feature: MA Experiment ID: 108545 Result: Down-regulated in Transcription
  misc_feature: MA Experiment 108545 PARAMETER Experiment Name: Zm_Imbibed_Seeds_P Parameter: Age (day) Value: 3 vs. 2
  misc_feature: MA Experiment 108545 PARAMETER Experiment Name: Zm_Imbibed_Seeds_P Parameter: Organism Value: Zea mays
  misc_feature: MA Experiment 108545 PARAMETER Experiment Name: Zm_Imbibed_Seeds_P Parameter: Plant Line Value: 35A19
  misc_feature: MA Experiment 108545 PARAMETER Experiment Name: Zm_Imbibed_Seeds_P Parameter: Tissue Value: Aerial vs. Embryo
  misc_feature: MA Experiment ID: 108547 Result: Down-regulated in Transcription
  misc_feature: MA Experiment 108547 PARAMETER Experiment Name: Zm_Imbibed_Seeds_P Parameter: Age (day) Value: 4 vs. 2
  misc_feature: MA Experiment 108547 PARAMETER Experiment Name: Zm_Imbibed_Seeds_P Parameter: Organism Value: Zea mays
  misc_feature: MA Experiment 108547 PARAMETER Experiment Name: Zm_Imbibed_Seeds_P Parameter: Plant Line Value: 35A19
  misc_feature: MA Experiment 108547 PARAMETER Experiment Name: Zm_Imbibed_Seeds_P Parameter: Tissue Value: Aerial vs. Embryo
  misc_feature: MA Experiment ID: 108559 Result: Up-regulated in Transcription
  misc_feature: MA Experiment 108559 PARAMETER Experiment Name: Zm_5mM_NO_P Parameter: Age (day) Value: 8
  misc_feature: MA Experiment 108559 PARAMETER Experiment Name: Zm_5mM_NO_P Parameter: Organism Value: Zea mays
  misc_feature: MA Experiment 108559 PARAMETER Experiment Name: Zm_5mM_NO_P Parameter: Plant Line Value: 35A19
  misc_feature: MA Experiment 108559 PARAMETER Experiment Name: Zm_5mM_NO_P Parameter: Timepoint (hr) Value: 12
  misc_feature: MA Experiment 108559 PARAMETER Experiment Name: Zm_5mM_NO_P Parameter: Tissue Value: Aerial
  misc_feature: MA Experiment 108559 PARAMETER Experiment Name: Zm_5mM_NO_P Parameter: Treatment Value: 5mM NO vs. No Treatment
  misc_feature: MA Experiment ID: 108597 Result: Down-regulated in Transcription
  misc_feature: MA Experiment 108597 PARAMETER Experiment Name: Zm_100uM_ABA_P Parameter: Age (day) Value: 9
  misc_feature: MA Experiment 108597 PARAMETER Experiment Name: Zm_100uM_ABA_P Parameter: Organism Value: Zea mays
  misc_feature: MA Experiment 108597 PARAMETER Experiment Name: Zm_100uM_ABA_P Parameter: Plant Line Value: 35A19
  misc_feature: MA Experiment 108597 PARAMETER Experiment Name: Zm_100uM_ABA_P Parameter: Timepoint (hr) Value: 24
  misc_feature: MA Experiment 108597 PARAMETER Experiment Name: Zm_100uM_ABA_P Parameter: Tissue Value: Aerial
  misc_feature: MA Experiment 108597 PARAMETER Experiment Name: Zm_100uM_ABA_P Parameter: Treatment Value: 100uM ABA vs. No Treatment
  misc_feature: MA Experiment ID: 20000477 Result: Up-regulated in Transcription
  misc_feature: MA Experiment 20000477 PARAMETER Experiment Name: Zm_5mM_SA_P Parameter: Age (day) Value: 10
  misc_feature: MA Experiment 20000477 PARAMETER Experiment Name: Zm_5mM_SA_P Parameter: Organism Value: Zea mays
  misc_feature: MA Experiment 20000477 PARAMETER Experiment Name: Zm_5mM_SA_P Parameter: Plant Line Value: 35A19
  misc_feature: MA Experiment 20000477 PARAMETER Experiment Name: Zm_5mM_SA_P Parameter: Timepoint (hr) Value: 48
  misc_feature: MA Experiment 20000477 PARAMETER Experiment Name: Zm_5mM_SA_P Parameter: Tissue Value: Aerial
  misc_feature: MA Experiment 20000477 PARAMETER Experiment Name: Zm_5mM_SA_P Parameter: Treatment Value: 5mM SA vs. No Treatment
  misc_feature: MA Experiment ID: 20000478 Result: Up-regulated in Transcription
  misc_feature: MA Experiment 20000478 PARAMETER Experiment Name: Zm_5mM_SA_P Parameter: Age (day) Value: 11
  misc_feature: MA Experiment 20000478 PARAMETER Experiment Name: Zm_5mM_SA_P Parameter: Organism Value: Zea mays
  misc_feature: MA Experiment 20000478 PARAMETER Experiment Name: Zm_5mM_SA_P Parameter: Plant Line Value: 35A19
  misc_feature: MA Experiment 20000478 PARAMETER Experiment Name: Zm_5mM_SA_P Parameter: Timepoint (hr) Value: 72
  misc_feature: MA Experiment 20000478 PARAMETER Experiment Name: Zm_5mM_SA_P Parameter: Tissue Value: Aerial
  misc_feature: MA Experiment 20000478 PARAMETER Experiment Name: Zm_5mM_SA_P Parameter: Treatment Value: 5mM SA vs. No Treatment
  misc_feature: MA Experiment ID: 20000479 Result: Up-regulated in Transcription
  misc_feature: MA Experiment 20000479 PARAMETER Experiment Name: Zm_Drought_P Parameter: Age (day) Value: 10
  misc_feature: MA Experiment 20000479 PARAMETER Experiment Name: Zm_Drought_P Parameter: Organism Value: Zea mays
  misc_feature: MA Experiment 20000479 PARAMETER Experiment Name: Zm_Drought_P Parameter: Plant Line Value: 35A19
  misc_feature: MA Experiment 20000479 PARAMETER Experiment Name: Zm_Drought_P Parameter: Timepoint (hr) Value: 48
  misc_feature: MA Experiment 20000479 PARAMETER Experiment Name: Zm_Drought_P Parameter: Tissue Value: Aerial
  misc_feature: MA Experiment 20000479 PARAMETER Experiment Name: Zm_Drought_P Parameter: Treatment Value: Drought vs. No Drought
  misc_feature: MA Experiment ID: 20000480 Result: Up-regulated in Transcription
  misc_feature: MA Experiment 20000480 PARAMETER Experiment Name: Zm_Drought_P Parameter: Age (day) Value: 11
  misc_feature: MA Experiment 20000480 PARAMETER Experiment Name: Zm_Drought_P Parameter: Organism Value: Zea mays
  misc_feature: MA Experiment 20000480 PARAMETER Experiment Name: Zm_Drought_P Parameter: Plant Line Value: 35A19
  misc_feature: MA Experiment 20000480 PARAMETER Experiment Name: Zm_Drought_P Parameter: Timepoint (hr) Value: 72
  misc_feature: MA Experiment 20000480 PARAMETER Experiment Name: Zm_Drought_P Parameter: Tissue Value: Aerial
  misc_feature: MA Experiment 20000480 PARAMETER Experiment Name: Zm_Drought_P Parameter: Treatment Value: Drought vs. No Drought
  misc_feature: MA Experiment ID: 20000626 Result: Up-regulated in Transcription
  misc_feature: MA Experiment 20000626 PARAMETER Experiment Name: Zm_Herbicide-Treatments_P Parameter: Timepoint (hr) Value: 12
  misc_feature: MA Experiment 20000626 PARAMETER Experiment Name: Zm_Herbicide-Treatments_P Parameter: Tissue Value: Aerial
  misc_feature: MA Experiment 20000626 PARAMETER Experiment Name: Zm_Herbicide-Treatments_P Parameter: Treatment Value: Roundup vs. No Treatment
  misc_feature: MA Experiment ID: 20000630 Result: Up-regulated in Transcription
  misc_feature: MA Experiment 20000630 PARAMETER Experiment Name: Zm_Herbicide-Treatments_P Parameter: Timepoint (hr) Value: 4
  misc_feature: MA Experiment 20000630 PARAMETER Experiment Name: Zm_Herbicide-Treatments_P Parameter: Tissue Value: Aerial
  misc_feature: MA Experiment 20000630 PARAMETER Experiment Name: Zm_Herbicide-Treatments_P Parameter: Treatment Value: Roundup vs. No Treatment
  misc_feature: MA Experiment ID: 20001610 Result: Up-regulated in Transcription
  misc_feature: MA Experiment 20001610 PARAMETER Experiment Name: Zm_50ppm_KNO3_L-to-H_P Parameter: Age (day) Value: 19
  misc_feature: MA Experiment 20001610 PARAMETER Experiment Name: Zm_50ppm_KNO3_L-to-H_P Parameter: Organism Value: Zea mays
  misc_feature: MA Experiment 20001610 PARAMETER Experiment Name: Zm_50ppm_KNO3_L-to-H_P Parameter: Plant Line Value: 35A19
  misc_feature: MA Experiment 20001610 PARAMETER Experiment Name: Zm_50ppm_KNO3_L-to-H_P Parameter: Timepoint (hr) Value: 2
  misc_feature: MA Experiment 20001610 PARAMETER Experiment Name: Zm_50ppm_KNO3_L-to-H_P Parameter: Tissue Value: Roots
  misc_feature: MA Experiment 20001610 PARAMETER Experiment Name: Zm_50ppm_KNO3_L-to-H_P Parameter: Treatment Value: 50ppm KNO3 vs. 50ppm KCl
gcacgagaccattacctagaacatcctaatcgaaaaagggcgctaatttcagccgtgttctcttctctctcgttcgagagatttatactacgtgtataaaaagcatcgtccaacagaggtacctttgctgcgcctctcgatctctagctatagcccgtagctagctagccctcccggcgaatcggccgatcagccggtcgggaacgatgaagaaagatgatgacctcgagtcggcgctgctggccgccaaagagccggcgccggcgcccgccaagggctacgcgtacgcgctcacctgcgcgctcctggcttccctcacctccatcatctacggctacaaccgcggggtgatgagcggggcgcagaagttcgtgcaggccgacctcggcgtcacggacgcgcagctggaggtgctcatcggcgccaccagcgtctactccctcgtcggctcgctggcggcgggctgggcgtgcgaccgcgcgggccggcgccgcaccatcgcgctgtcggcggccttgttcctcgccggctcagccgtcaccgccgccgccgacggctacgccgcgctcatggcgggccagttcgtcgccggcgtggcctgcggattcggcctcgtcgtcgctcccgtctacatcgcggagatctcgccggccaacgctcggggcttcctctcctccatccccgagatcgccggcaactcgggcatcctgctgagctacatcgccgacttcgcgctcgccggcctcccgacgccactcaactggcgcctgatgatcggcatcggcgccgtccctcctctattcctagcggccgcggccgcgcttgccatgccggagaccccgcgctggctcgtcctccacggccaccgcgacgaggcgcgccgcgtgctggcgcgcacggtgggggacgcggaccgccggctccaggagatcgtgacgtccgtgcaggaggccacgaagcaggcgggctccggcggcggcgacgcgccgtcgtcggcgagcgtgcggcgcgngatcctgctccggccgacgcccgccgtccgccgcgtgatgctggccatcctggggctgcaggtgttccagcaggcgtgcggcgtggcggccatggtgctgtacgccccgcgcgtgttcagccacgtcgggatcacctccgagcgcgacgtgctcggcgccaccgtcctcctcggcgccgccaagacggtggcgatcgtcgtccctctgttcctcgccgacagcctcggccgccggcccatgctgctcaccagcgcgggtggcatggccgcgtcgcttctggtcctcggcctgtccatacgcgcgacgtcggccgcgacgtgcgtcgccgccgccgtggcgttcatggcgaccttctcgctggggttcggacccgtgatctggatgtacgggtcggagatcctgccgctgcggctgcgcgcgcaggggactggcgtcgggacggcggtcaaccgggtgatgagcgccatcgtggggatgaccttcatcccgatgtacgaggcggtgggcatggccgggaccttctacatcttcgcggcgatgtccgcggcagcgtgggtgttcgtctacgcgtgcctgcctgagaccaaggggaggagcctcgaggagatggaggcactcttcgacgccggtgccggtgccgatgctgcaccgtcgccacgggcggcgttgtcgtgacgttccagacactgagtacacatgcatcatgtccacgcaaggaacaaacacgtgatgacatgaagttgtcaggtgtgcagtgtagcaaggttagacaggtgctagtgtatttgtaagcagccaagatgccgtcgacgaatagttttgtactcttgtcattttgaatgggttgattatatggtagctgtttctagcaacgcgtctcttaaatttcattctctaaagcaatatgtaccgttctttacatttacaat

SEQ ID NO: 19204 - protein, 493 aa, Zea mays subsp. mays
  peptide (1)..(493): Ceres Seq. ID no. 12436372
  misc_feature (31)..(476): Pfam Name: Sugar (and other) transporter Pfam Description: Sugar (and other) transporter
  misc_feature (3)..(476): Homolog of NCBI NO: 28316433 NR Description: sorbitol transporter [Prunus cerasus]
  misc_feature (19)..(489): Homolog of NCBI NO: 15230212 NR Description: sugar transport, putative; protein id:
  misc_feature (12)..(476): Homolog of NCBI NO: 30025133 NR Description: putative sorbitol transporter [Prunus cerasus]
  misc_feature (269)..(269): Xaa is any aa, unknown or other
MKKDDDLESALLAAKEPAPAPAKGYAYALTCALLASLTSIIYGYNRGVMSGAQKFVQADLGVTDAQLEVLIGATSVYSLVGSLAAGWACDRAGRRRTIALSAALFLAGSAVTAAADGYAALMAGQFVAGVACGFGLVVAPVYIAEISPANARGFLSSIPEIAGNSGILLSYIADFALAGLPTPLNWRLMIGIGAVPPLFLAAAAALAMPETPRWLVLHGHRDEARRVLARTVGDADRRLQEIVTSVQEATKQAGSGGGDAPSSASVRRXILLRPTPAVRRVMLAILGLQVFQQACGVAAMVLYAPRVFSHVGITSERDVLGATVLLGAAKTVAIVVPLFLADSLGRRPMLLTSAGGMAASLLVLGLSIRATSAATCVAAAVAFMATFSLGFGPVIWMYGSEILPLRLRAQGTGVGTAVNRVMSAIVGMTFIPMYEAVGMAGTFYIFAAMSAAAWVFVYACLPETKGRSLEEMEALFDAGAGADAAPSPRAALS

SEQ ID NO: 19205 - protein, 445 aa, Zea mays subsp. mays
  peptide (1)..(445): Ceres Seq. ID no. 12436373
  misc_feature (1)..(428): Pfam Name: Sugar (and other) transporter Pfam Description: Sugar (and other) transporter
  misc_feature (1)..(428): Homolog of NCBI NO: 28316433 NR Description: sorbitol transporter [Prunus cerasus]
  misc_feature (1)..(441): Homolog of NCBI NO: 15230212 NR Description: sugar transport, putative; protein id:
  misc_feature (1)..(428): Homolog of NCBI NO: 30025133 NR Description: putative sorbitol transporter [Prunus cerasus]
  misc_feature (221)..(221): Xaa is any aa, unknown or other
MSGAQKFVQADLGVTDAQLEVLIGATSVYSLVGSLAAGWACDRAGRRRTIALSAALFLAGSAVTAAADGYAALMAGQFVAGVACGFGLVVAPVYIAEISPANARGFLSSIPEIAGNSGILLSYIADFALAGLPTPLNWRLMIGIGAVPPLFLAAAAALAMPETPRWLVLHGHRDEARRVLARTVGDADRRLQEIVTSVQEATKQAGSGGGDAPSSASVRRXILLRPTPAVRRVMLAILGLQVFQQACGVAAMVLYAPRVFSHVGITSERDVLGATVLLGAAKTVAIVVPLFLADSLGRRPMLLTSAGGMAASLLVLGLSIRATSAATCVAAAVAFMATFSLGFGPVIWMYGSEILPLRLRAQGTGVGTAVNRVMSAIVGMTFIPMYEAVGMAGTFYIFAAMSAAAWVFVYACLPETKGRSLEEMEALFDAGAGADAAPSPRAALS

SEQ ID NO: 19206 - protein, 372 aa, Zea mays subsp. mays
  peptide (1)..(372): Ceres Seq. ID no. 12436374
  misc_feature (1)..(355): Pfam Name: Sugar (and other) transporter Pfam Description: Sugar (and other) transporter
  misc_feature (1)..(355): Homolog of NCBI NO: 28316433 NR Description: sorbitol transporter [Prunus cerasus]
  misc_feature (1)..(368): Homolog of NCBI NO: 15230212 NR Description: sugar transport, putative; protein id:
  misc_feature (1)..(355): Homolog of NCBI NO: 30025133 NR Description: putative sorbitol transporter [Prunus cerasus]
  misc_feature (148)..(148): Xaa is any aa, unknown or other
MAGQFVAGVACGFGLVVAPVYIAEISPANARGFLSSIPEIAGNSGILLSYIADFALAGLPTPLNWRLMIGIGAVPPLFLAAAAALAMPETPRWLVLHGHRDEARRVLARTVGDADRRLQEIVTSVQEATKQAGSGGGDAPSSASVRRXILLRPTPAVRRVMLAILGLQVFQQACGVAAMVLYAPRVFSHVGITSERDVLGATVLLGAAKTVAIVVPLFLADSLGRRPMLLTSAGGMAASLLVLGLSIRATSAATCVAAAVAFMATFSLGFGPVIWMYGSEILPLRLRAQGTGVGTAVNRVMSAIVGMTFIPMYEAVGMAGTFYIFAAMSAAAWVFVYACLPETKGRSLEEMEALFDAGAGADAAPSPRAALS

SEQ ID NO: 19207 - DNA, 2161 bp, Zea mays subsp. mays; identical to SEQ ID NO: 7401
  misc_feature (1)..(2161): Ceres Seq. ID no. 13494407
  misc_feature: MA Experiment ID: 108556 Result: Down-regulated in Transcription
  misc_feature: MA Experiment 108556 PARAMETER Experiment Name: Zm_Drought_P Parameter: Age (day) Value: 9
  misc_feature: MA Experiment 108556 PARAMETER Experiment Name: Zm_Drought_P Parameter: Organism Value: Zea mays
  misc_feature: MA Experiment 108556 PARAMETER Experiment Name: Zm_Drought_P Parameter: Plant Line Value: 35A19
  misc_feature: MA Experiment 108556 PARAMETER Experiment Name: Zm_Drought_P Parameter: Timepoint (hr) Value: 24
  misc_feature: MA Experiment 108556 PARAMETER Experiment Name: Zm_Drought_P Parameter: Tissue Value: Aerial
  misc_feature: MA Experiment 108556 PARAMETER Experiment Name: Zm_Drought_P Parameter: Treatment Value: Drought vs. No Drought
  misc_feature: MA Experiment ID: 20000477 Result: Down-regulated in Transcription
  misc_feature: MA Experiment 20000477 PARAMETER Experiment Name: Zm_5mM_SA_P Parameter: Age (day) Value: 10
  misc_feature: MA Experiment 20000477 PARAMETER Experiment Name: Zm_5mM_SA_P Parameter: Organism Value: Zea mays
  misc_feature: MA Experiment 20000477 PARAMETER Experiment Name: Zm_5mM_SA_P Parameter: Plant Line Value: 35A19
  misc_feature: MA Experiment 20000477 PARAMETER Experiment Name: Zm_5mM_SA_P Parameter: Timepoint (hr) Value: 48
  misc_feature: MA Experiment 20000477 PARAMETER Experiment Name: Zm_5mM_SA_P Parameter: Tissue Value: Aerial
  misc_feature: MA Experiment 20000477 PARAMETER Experiment Name: Zm_5mM_SA_P Parameter: Treatment Value: 5mM SA vs. No Treatment
  misc_feature: MA Experiment ID: 20000480 Result: Down-regulated in Transcription
  misc_feature: MA Experiment 20000480 PARAMETER Experiment Name: Zm_Drought_P Parameter: Age (day) Value: 11
  misc_feature: MA Experiment 20000480 PARAMETER Experiment Name: Zm_Drought_P Parameter: Organism Value: Zea mays
  misc_feature: MA Experiment 20000480 PARAMETER Experiment Name: Zm_Drought_P Parameter: Plant Line Value: 35A19
  misc_feature: MA Experiment 20000480 PARAMETER Experiment Name: Zm_Drought_P Parameter: Timepoint (hr) Value: 72
  misc_feature: MA Experiment 20000480 PARAMETER Experiment Name: Zm_Drought_P Parameter: Tissue Value: Aerial
  misc_feature: MA Experiment 20000480 PARAMETER Experiment Name: Zm_Drought_P Parameter: Treatment Value: Drought vs. No Drought

SEQ ID NO: 19208 - protein, 412 aa, Zea mays subsp. mays; identical to SEQ ID NO: 7402
  peptide (1)..(412): Ceres Seq. ID no. 13494408
  misc_feature (352)..(408): Pfam Name: Extensin-like region Pfam Description: Extensin-like region
  misc_feature (2)..(409): Homolog of NCBI NO: 34906174 NR Description: putative extensin-like protein [Oryza sativa
  misc_feature (35)..(409): Homolog of NCBI NO: 34912294 NR Description: putative extensin-like protein [Oryza sativa
  misc_feature (28)..(408): Homolog of NCBI NO: 15233976 NR Description: leucine-rich repeat extensin family [Arabidopsis
  misc_feature (383)..(411): Homolog of NCBI NO: 15233976 NR Description: leucine-rich repeat extensin family [Arabidopsis
  misc_feature (29)..(409): Homolog of NCBI NO: 15235668 NR Description: leucine-rich repeat extensin family [Arabidopsis
  misc_feature (28)..(409): Homolog of NCBI NO: 15230120 NR Description: leucine-rich repeat extensin family [Arabidopsis
  misc_feature (47)..(408): Homolog of NCBI NO: 15228861 NR Description: leucine-rich repeat extensin family [Arabidopsis
  misc_feature (35)..(412): Homolog of NCBI NO: 7484956 NR Description: extensin homolog F24O1.18 - Arabidopsis thaliana T3P18.1 [Arabidopsis thaliana]
  misc_feature (35)..(412): Homolog of NCBI NO: 15220780 NR Description: leucine-rich repeat extensin family [Arabidopsis
  misc_feature (35)..(408): Homolog of NCBI NO: 15221178 NR Description: leucine-rich repeat extensin family [Arabidopsis

SEQ ID NO: 19209 - protein, 411 aa, Zea mays subsp. mays; identical to SEQ ID NO: 7403
  peptide (1)..(411): Ceres Seq. ID no. 13494409
  misc_feature (351)..(407): Pfam Name: Extensin-like region Pfam Description: Extensin-like region
  misc_feature (1)..(408): Homolog of NCBI NO: 34906174 NR Description: putative extensin-like protein [Oryza sativa
  misc_feature (34)..(408): Homolog of NCBI NO: 34912294 NR Description: putative extensin-like protein [Oryza sativa
  misc_feature (27)..(407): Homolog of NCBI NO: 15233976 NR Description: leucine-rich repeat extensin family [Arabidopsis
  misc_feature (382)..(410): Homolog of NCBI NO: 15233976 NR Description: leucine-rich repeat extensin family [Arabidopsis
  misc_feature (28)..(408): Homolog of NCBI NO: 15235668 NR Description: leucine-rich repeat extensin family [Arabidopsis
  misc_feature (27)..(408): Homolog of NCBI NO: 15230120 NR Description: leucine-rich repeat extensin family [Arabidopsis
  misc_feature (46)..(407): Homolog of NCBI NO: 15228861 NR Description: leucine-rich repeat extensin family [Arabidopsis
  misc_feature (34)..(411): Homolog of NCBI NO: 7484956 NR Description: extensin homolog F24O1.18 - Arabidopsis thaliana T3P18.1 [Arabidopsis thaliana]
  misc_feature (34)..(411): Homolog of NCBI NO: 15220780 NR Description: leucine-rich repeat extensin family [Arabidopsis
  misc_feature (34)..(407): Homolog of NCBI NO: 15221178 NR Description: leucine-rich repeat extensin family [Arabidopsis

SEQ ID NO: 19210 - DNA, 2010 bp, Zea mays subsp. mays
  misc_feature (1)..(2010): Ceres Seq. ID no. 12362438
  misc_feature: MA Experiment ID: 108544 Result: Down-regulated in Transcription
  misc_feature: MA Experiment ID: 108559 Result: Down-regulated in Transcription
  misc_feature: MA Experiment 108559 PARAMETER Experiment Name: Zm_5mM_NO_P Parameter: Age (day) Value: 8
  misc_feature: MA Experiment 108559 PARAMETER Experiment Name: Zm_5mM_NO_P Parameter: Organism Value: Zea mays
  misc_feature: MA Experiment 108559 PARAMETER Experiment Name: Zm_5mM_NO_P Parameter: Plant Line Value: 35A19
  misc_feature: MA Experiment 108559 PARAMETER Experiment Name: Zm_5mM_NO_P Parameter: Timepoint (hr) Value: 12
  misc_feature: MA Experiment 108559 PARAMETER Experiment Name: Zm_5mM_NO_P Parameter: Tissue Value: Aerial
  misc_feature: MA Experiment 108559 PARAMETER Experiment Name: Zm_5mM_NO_P Parameter: Treatment Value: 5mM NO vs. No Treatment
  misc_feature: MA Experiment ID: 108597 Result: Down-regulated in Transcription
  misc_feature: MA Experiment 108597 PARAMETER Experiment Name: Zm_100uM_ABA_P Parameter: Age (day) Value: 9
  misc_feature: MA Experiment 108597 PARAMETER Experiment Name: Zm_100uM_ABA_P Parameter: Organism Value: Zea mays
  misc_feature: MA Experiment 108597 PARAMETER Experiment Name: Zm_100uM_ABA_P Parameter: Plant Line Value: 35A19
  misc_feature: MA Experiment 108597 PARAMETER Experiment Name: Zm_100uM_ABA_P Parameter: Timepoint (hr) Value: 24
  misc_feature: MA Experiment 108597 PARAMETER Experiment Name: Zm_100uM_ABA_P Parameter: Tissue Value: Aerial
  misc_feature: MA Experiment 108597 PARAMETER Experiment Name: Zm_100uM_ABA_P Parameter: Treatment Value: 100uM ABA vs. No Treatment
  misc_feature: MA Experiment ID: 108689 Result: Down-regulated in Transcription
  misc_feature: MA Experiment 108689 PARAMETER Experiment Name: Zm_Drought_Roots_P Parameter: Age (day) Value: 9
  misc_feature: MA Experiment 108689 PARAMETER Experiment Name: Zm_Drought_Roots_P Parameter: Organism Value: Zea mays
  misc_feature: MA Experiment 108689 PARAMETER Experiment Name: Zm_Drought_Roots_P Parameter: Plant Line Value: 35A19
  misc_feature: MA Experiment 108689 PARAMETER Experiment Name: Zm_Drought_Roots_P Parameter: Timepoint (hr) Value: 24
  misc_feature: MA Experiment 108689 PARAMETER Experiment Name: Zm_Drought_Roots_P Parameter: Tissue Value: Roots
  misc_feature: MA Experiment 108689 PARAMETER Experiment Name: Zm_Drought_Roots_P Parameter: Treatment Value: Drought vs. No Drought
  misc_feature: MA Experiment ID: 20000477 Result: Down-regulated in Transcription
  misc_feature: MA Experiment 20000477 PARAMETER Experiment Name: Zm_5mM_SA_P Parameter: Age (day) Value: 10
  misc_feature: MA Experiment 20000477 PARAMETER Experiment Name: Zm_5mM_SA_P Parameter: Organism Value: Zea mays
  misc_feature: MA Experiment 20000477 PARAMETER Experiment Name: Zm_5mM_SA_P Parameter: Plant Line Value: 35A19
  misc_feature: MA Experiment 20000477 PARAMETER Experiment Name: Zm_5mM_SA_P Parameter: Timepoint (hr) Value: 48
  misc_feature: MA Experiment 20000477 PARAMETER Experiment Name: Zm_5mM_SA_P Parameter: Tissue Value: Aerial
  misc_feature: MA Experiment 20000477 PARAMETER Experiment Name: Zm_5mM_SA_P Parameter: Treatment Value: 5mM SA vs. No Treatment
  misc_feature: MA Experiment ID: 20000478 Result: Down-regulated in Transcription
  misc_feature: MA Experiment 20000478 PARAMETER Experiment Name: Zm_5mM_SA_P Parameter: Age (day) Value: 11
  misc_feature: MA Experiment 20000478 PARAMETER Experiment Name: Zm_5mM_SA_P Parameter: Organism Value: Zea mays
  misc_feature: MA Experiment 20000478 PARAMETER Experiment Name: Zm_5mM_SA_P Parameter: Plant Line Value: 35A19
  misc_feature: MA Experiment 20000478 PARAMETER Experiment Name: Zm_5mM_SA_P Parameter: Timepoint (hr) Value: 72
  misc_feature: MA Experiment 20000478 PARAMETER Experiment Name: Zm_5mM_SA_P Parameter: Tissue Value: Aerial
  misc_feature: MA Experiment 20000478 PARAMETER Experiment Name: Zm_5mM_SA_P Parameter: Treatment Value: 5mM SA vs. No Treatment
  misc_feature: MA Experiment ID: 20000480 Result: Down-regulated in Transcription
  misc_feature: MA Experiment 20000480 PARAMETER Experiment Name: Zm_Drought_P Parameter: Age (day) Value: 11
  misc_feature: MA Experiment 20000480 PARAMETER Experiment Name: Zm_Drought_P Parameter: Organism Value: Zea mays
  misc_feature: MA Experiment 20000480 PARAMETER Experiment Name: Zm_Drought_P Parameter: Plant Line Value: 35A19
  misc_feature: MA Experiment 20000480 PARAMETER Experiment Name: Zm_Drought_P Parameter: Timepoint (hr) Value: 72
  misc_feature: MA Experiment 20000480 PARAMETER Experiment Name: Zm_Drought_P Parameter: Tissue Value: Aerial
  misc_feature: MA Experiment 20000480 PARAMETER Experiment Name: Zm_Drought_P Parameter: Treatment Value: Drought vs. No Drought
  misc_feature: MA Experiment ID: 20000492 Result: Down-regulated in Transcription
  misc_feature: MA Experiment 20000492 PARAMETER Experiment Name: Zm_Hybrid_Seed_Dev_P Parameter: DAP Value: 12
  misc_feature: MA Experiment 20000492 PARAMETER Experiment Name: Zm_Hybrid_Seed_Dev_P Parameter: Organism Value: Zea mays
  misc_feature: MA Experiment 20000492 PARAMETER Experiment Name: Zm_Hybrid_Seed_Dev_P Parameter: Plant Line Value: 35A19
  misc_feature: MA Experiment 20000492 PARAMETER Experiment Name: Zm_Hybrid_Seed_Dev_P Parameter: Tissue Value: Fert Kernel vs. Unfert Floret
  misc_feature: MA Experiment ID: 20000626 Result: Down-regulated in Transcription
  misc_feature: MA Experiment 20000626 PARAMETER Experiment Name: Zm_Herbicide-Treatments_P Parameter: Timepoint (hr) Value: 12
  misc_feature: MA Experiment 20000626 PARAMETER Experiment Name: Zm_Herbicide-Treatments_P Parameter: Tissue Value: Aerial
  misc_feature: MA Experiment 20000626 PARAMETER Experiment Name: Zm_Herbicide-Treatments_P Parameter: Treatment Value: Roundup vs. No Treatment
actcaccacccccggccgagcgaattgaagaagctccccctctgaactgaagcaatggcaggcggcaatgccggtggcgccgctcgagtcctgttctccatcctcggcctggcgctggcgctgccgctgctcgtggccggcgacgacccgtaccggttcttcacgtggacggtgacctacggcgacatctacccgctgggcgtcaagcagcaggggatcctgatcaacaaccagttcccggggccgcagatcgaggccgtcaccaacgacaacctcatcatcaacgtcttcaacaagctcaacgagccgttcctcctctcctggagcgggctccagcagcggcggaactcgttcgaggacggcgtggccgggacgacgtgcccgatcccgccgggctccaacttcacctacatcatgcaggccaaggaccagatcggcacctactactacttcccatcgctggccttccacaaggccgccggcgggttcggcggcatccgcgtgctcagccgcccgcagatccccgtcccgttcccgccgccggccgccgactacaccgtcctcatcggcgactggtacaaggccaaccacaccgacttgcggtacgtgctcgacagcggcgtggcgctcgggttccctgacgggctgctcatcaacggctggggcctgaatggctacaccttcaacgttcagcccggccggacgtaccggttccggatcaccaacgtggggctggccacgtccctcaacatccggttccaggggcacaccatgaagctggtggaggtggagggctcgcacaccatgcagaccacctactcgtccctggacgtgcacctgggccagtcctactccgtgctgctcaccgccgaccagccgggctacgactacgccgtcgtcgtctccacgcgcttcacgagccggatcatctccaccacggcggtcctgcgctacgccaactccgccggcagggcgccgggtcccctccccggtggccccaccatccagatcgactggtcgctcaaccaggcccgctcggtccggtggaacctgacggccagcgggccgcggcccaacccgcaggggtcgtaccactacggcctggtgccggtgacctggaccatccgcctggccaactcggcggcgaccatcggcgggaagcggcgctacgcggtgaacggcgcgtcgtacgtgggccccgacaccccgctcaaggtcgcagactactacaagatcggcggcgtcttctccgtgggcaccatcgccgacagcccccccgcctacggcggcgccgcctacctgcggacgtcggtcatgggcgccagctacagggactacgtcgaggtcgtgttcgagaacggcgaggacgaggtgcagtcgtggcacatcgacggatacgccttctgggtcgtcgggatggatggagggaaatggtcgtcggcaagcaggcagggctacaacctgagggacggcgtttcgcggtacactgttcaggtgtaccccagatcgtggacggcgatttacatgcccctggacaacgtgggcatgtggaacgtccggtcggagaactgggccaggcagtacctggggcagcagttctacctccgcgtctggacgccgtccacgtcgttgcgcgacgagtaccccatccccaagaacgcgctcctgtgcggccgggcggccggacgccggaccaggccgctgtgagagtgacactgccgccggatcattcacagcttttgtcatgagaggatgacacactattggtttggtctttggagaagagcaggaacatacacaagtttatataccctcaactgaagggaggttcagaggaacgaaagtgttgcttgccgattttttttcattttagtttttttttccctttaaagtttcatatttacgtctctgctgaactaaaaccgtgttggaatttctgggtcaacactataacttatactccctccgtcccaacatagtatttgttttagagtgttaacggattcatgc

SEQ ID NO: 19211 - protein, 550 aa, Zea mays subsp. mays
  peptide (1)..(550): Ceres Seq. ID no. 12362439
  misc_feature (16)..(547): Homolog of NCBI NO: 15219118 NR Description: pectinesterase (pectin methylesterase), putative
  misc_feature (30)..(534): Homolog of NCBI NO: 7432997 NR Description: pollen-specific protein homolog - tomato
  misc_feature (17)..(549): Homolog of NCBI NO: 15234688 NR Description: pectinesterase (pectin methylesterase), putative
  misc_feature (1)..(550): Homolog of NCBI NO: 18400509 NR Description: pectinesterase (pectin methylesterase), putative
  misc_feature (1)..(550): Homolog of NCBI NO: 25285550 NR Description: probable pectinesterase [imported] - Arabidopsis
  misc_feature (1)..(550): Homolog of NCBI NO: 16648889 NR Description: Unknown protein [Arabidopsis thaliana]
  misc_feature (6)..(550): Homolog of NCBI NO: 22531132 NR Description: pectinesterase, putative [Arabidopsis thaliana]
  misc_feature (6)..(550): Homolog of NCBI NO: 15222981 NR Description: pectinesterase (pectin methylesterase), putative
  misc_feature (14)..(550): Homolog of NCBI NO: 1255951 NR Description: PS60 [Nicotiana tabacum]
  misc_feature (6)..(550): Homolog of NCBI NO: 15982771 NR Description: At1g76160/T23E18_10 [Arabidopsis thaliana]
MAGGNAGGAARVLFSILGLALALPLLVAGDDPYRFFTWTVTYGDIYPLGVKQQGILINNQFPGPQIEAVTNDNLIINVFNKLNEPFLLSWSGLQQRRNSFEDGVAGTTCPIPPGSNFTYIMQAKDQIGTYYYFPSLAFHKAAGGFGGIRVLSRPQIPVPFPPPAADYTVLIGDWYKANHTDLRYVLDSGVALGFPDGLLINGWGLNGYTFNVQPGRTYRFRITNVGLATSLNIRFQGHTMKLVEVEGSHTMQTTYSSLDVHLGQSYSVLLTADQPGYDYAVVVSTRFTSRIISTTAVLRYANSAGRAPGPLPGGPTIQIDWSLNQARSVRWNLTASGPRPNPQGSYHYGLVPVTWTIRLANSAATIGGKRRYAVNGASYVGPDTPLKVADYYKIGGVFSVGTIADSPPAYGGAAYLRTSVMGASYRDYVEVVFENGEDEVQSWHIDGYAFWVVGMDGGKWSSASRQGYNLRDGVSRYTVQVYPRSWTAIYMPLDNVGMWNVRSENWARQYLGQQFYLRVWTPSTSLRDEYPIPKNALLCGRAAGRRTRPL

SEQ ID NO: 19212 - protein, 430 aa, Zea mays subsp. mays
  peptide (1)..(430): Ceres Seq. ID no. 12362440
  misc_feature (1)..(427): Homolog of NCBI NO: 15219118 NR Description: pectinesterase (pectin methylesterase), putative
  misc_feature (1)..(414): Homolog of NCBI NO: 7432997 NR Description: pollen-specific protein homolog - tomato
  misc_feature (1)..(429): Homolog of NCBI NO: 15234688 NR Description: pectinesterase (pectin methylesterase), putative
  misc_feature (1)..(430): Homolog of NCBI NO: 18400509 NR Description: pectinesterase (pectin methylesterase), putative
  misc_feature (1)..(430): Homolog of NCBI NO: 25285550 NR Description: probable pectinesterase [imported] - Arabidopsis
  misc_feature (1)..(430): Homolog of NCBI NO: 16648889 NR Description: Unknown protein [Arabidopsis thaliana]
  misc_feature (1)..(430): Homolog of NCBI NO: 22531132 NR Description: pectinesterase, putative [Arabidopsis thaliana]
  misc_feature (1)..(430): Homolog of NCBI NO: 15222981 NR Description: pectinesterase (pectin methylesterase), putative
  misc_feature (1)..(430): Homolog of NCBI NO: 1255951 NR Description: PS60 [Nicotiana tabacum]
  misc_feature (1)..(430): Homolog of NCBI NO: 15982771 NR Description: At1g76160/T23E18_10 [Arabidopsis thaliana]
MQAKDQIGTYYYFPSLAFHKAAGGFGGIRVLSRPQIPVPFPPPAADYTVLIGDWYKANHTDLRYVLDSGVALGFPDGLLINGWGLNGYTFNVQPGRTYRFRITNVGLATSLNIRFQGHTMKLVEVEGSHTMQTTYSSLDVHLGQSYSVLLTADQPGYDYAVVVSTRFTSRIISTTAVLRYANSAGRAPGPLPGGPTIQIDWSLNQARSVRWNLTASGPRPNPQGSYHYGLVPVTWTIRLANSAATIGGKRRYAVNGASYVGPDTPLKVADYYKIGGVFSVGTIADSPPAYGGAAYLRTSVMGASYRDYVEVVFENGEDEVQSWHIDGYAFWVVGMDGGKWSSASRQGYNLRDGVSRYTVQVYPRSWTAIYMPLDNVGMWNVRSENWARQYLGQQFYLRVWTPSTSLRDEYPIPKNALLCGRAAGRRTRPL

SEQ ID NO: 19213 - protein, 311 aa, Zea mays subsp. mays
  peptide (1)..(311): Ceres Seq. ID no. 12362441
  misc_feature (1)..(308): Homolog of NCBI NO: 15219118 NR Description: pectinesterase (pectin methylesterase), putative
  misc_feature (1)..(295): Homolog of NCBI NO: 7432997 NR Description: pollen-specific protein homolog - tomato
  misc_feature (1)..(310): Homolog of NCBI NO: 15234688 NR Description: pectinesterase (pectin methylesterase), putative
  misc_feature (1)..(311): Homolog of NCBI NO: 25285550 NR Description: probable pectinesterase [imported] - Arabidopsis
  misc_feature (1)..(311): Homolog of NCBI NO: 18400509 NR Description: pectinesterase (pectin methylesterase), putative
  misc_feature (1)..(311): Homolog of NCBI NO: 16648889 NR Description: Unknown protein [Arabidopsis thaliana]
  misc_feature (1)..(311): Homolog of NCBI NO: 22531132 NR Description: pectinesterase, putative [Arabidopsis thaliana]
  misc_feature (1)..(311): Homolog of NCBI NO: 15222981 NR Description: pectinesterase (pectin methylesterase), putative
  misc_feature (1)..(311): Homolog of NCBI NO: 1255951 NR Description: PS60 [Nicotiana tabacum]
  misc_feature (1)..(311): Homolog of NCBI NO: 15982771 NR Description: At1g76160/T23E18_10 [Arabidopsis thaliana]
MKLVEVEGSHTMQTTYSSLDVHLGQSYSVLLTADQPGYDYAVVVSTRFTSRIISTTAVLRYANSAGRAPGPLPGGPTIQIDWSLNQARSVRWNLTASGPRPNPQGSYHYGLVPVTWTIRLANSAATIGGKRRYAVNGASYVGPDTPLKVADYYKIGGVFSVGTIADSPPAYGGAAYLRTSVMGASYRDYVEVVFENGEDEVQSWHIDGYAFWVVGMDGGKWSSASRQGYNLRDGVSRYTVQVYPRSWTAIYMPLDNVGMWNVRSENWARQYLGQQFYLRVWTPSTSLRDEYPIPKNALLCGRAAGRRTRPL

SEQ ID NO: 19214 - DNA, 1184 bp, Zea mays subsp. mays
  misc_feature (1)..(1184): Ceres Seq. ID no. 12364672
  misc_feature: MA Experiment ID: 108528 Result: Down-regulated in Transcription
  misc_feature: MA Experiment 108528 PARAMETER Experiment Name: Zm_Imbibed_Seeds_P Parameter: Age (day) Value: 5 vs. 2
  misc_feature: MA Experiment 108528 PARAMETER Experiment Name: Zm_Imbibed_Seeds_P Parameter: Organism Value: Zea mays
  misc_feature: MA Experiment 108528 PARAMETER Experiment Name: Zm_Imbibed_Seeds_P Parameter: Plant Line Value: 35A19
  misc_feature: MA Experiment 108528 PARAMETER Experiment Name: Zm_Imbibed_Seeds_P Parameter: Tissue Value: Aerial vs. Embryo
  misc_feature: MA Experiment ID: 108529 Result: Up-regulated in Transcription
  misc_feature: MA Experiment 108529 PARAMETER Experiment Name: Zm_Imbibed_Seeds_P Parameter: Age (day) Value: 5 vs. 2
  misc_feature: MA Experiment 108529 PARAMETER Experiment Name: Zm_Imbibed_Seeds_P Parameter: Organism Value: Zea mays
  misc_feature: MA Experiment 108529 PARAMETER Experiment Name: Zm_Imbibed_Seeds_P Parameter: Plant Line Value: 35A19
  misc_feature: MA Experiment 108529 PARAMETER Experiment Name: Zm_Imbibed_Seeds_P Parameter: Tissue Value: Roots vs. Embryo
  misc_feature: MA Experiment ID: 108530 Result: Down-regulated in Transcription
  misc_feature: MA Experiment 108530 PARAMETER Experiment Name: Zm_Imbibed_Seeds_P Parameter: Age (day) Value: 6 vs. 2
  misc_feature: MA Experiment 108530 PARAMETER Experiment Name: Zm_Imbibed_Seeds_P Parameter: Organism Value: Zea mays
  misc_feature: MA Experiment 108530 PARAMETER Experiment Name: Zm_Imbibed_Seeds_P Parameter: Plant Line Value: 35A19
  misc_feature: MA Experiment 108530 PARAMETER Experiment Name: Zm_Imbibed_Seeds_P Parameter: Tissue Value: Aerial vs. Embryo
  misc_feature: MA Experiment ID: 108535 Result: Down-regulated in Transcription
  misc_feature: MA Experiment 108535 PARAMETER Experiment Name: Zm_Meristem_P Parameter: Age (day) Value: 8
  misc_feature: MA Experiment 108535 PARAMETER Experiment Name: Zm_Meristem_P Parameter: Organism Value: Zea mays
  misc_feature: MA Experiment 108535 PARAMETER Experiment Name: Zm_Meristem_P Parameter: Plant Line Value: 35A19
  misc_feature: MA Experiment 108535 PARAMETER Experiment Name: Zm_Meristem_P Parameter: Tissue Value: Root Meristem vs. Above Root Meristem
  misc_feature: MA Experiment ID: 108543 Result: Down-regulated in Transcription
  misc_feature: MA Experiment ID: 108544 Result: Up-regulated in Transcription
  misc_feature: MA Experiment ID: 108546 Result: Up-regulated in Transcription
  misc_feature: MA Experiment 108546 PARAMETER Experiment Name: Zm_Imbibed_Seeds_P Parameter: Age (day) Value: 3 vs. 2
  misc_feature: MA Experiment 108546 PARAMETER Experiment Name: Zm_Imbibed_Seeds_P Parameter: Organism Value: Zea mays
  misc_feature: MA Experiment 108546 PARAMETER Experiment Name: Zm_Imbibed_Seeds_P Parameter: Plant Line Value: 35A19
  misc_feature: MA Experiment 108546 PARAMETER Experiment Name: Zm_Imbibed_Seeds_P Parameter: Tissue Value: Roots vs. Embryo
  misc_feature: MA Experiment ID: 108689 Result: Down-regulated in Transcription
  misc_feature: MA Experiment 108689 PARAMETER Experiment Name: Zm_Drought_Roots_P Parameter: Age (day) Value: 9
  misc_feature: MA Experiment 108689 PARAMETER Experiment Name: Zm_Drought_Roots_P Parameter: Organism Value: Zea mays
  misc_feature: MA Experiment 108689 PARAMETER Experiment Name: Zm_Drought_Roots_P Parameter: Plant Line Value: 35A19
  misc_feature: MA Experiment 108689 PARAMETER Experiment Name: Zm_Drought_Roots_P Parameter: Timepoint (hr) Value: 24
  misc_feature: MA Experiment 108689 PARAMETER Experiment Name: Zm_Drought_Roots_P Parameter: Tissue Value: Roots
  misc_feature: MA Experiment 108689 PARAMETER Experiment Name: Zm_Drought_Roots_P Parameter: Treatment Value: Drought vs. No Drought
  misc_feature: MA Experiment ID: 20000477 Result: Up-regulated in Transcription
  misc_feature: MA Experiment 20000477 PARAMETER Experiment Name: Zm_5mM_SA_P Parameter: Age (day) Value: 10
  misc_feature: MA Experiment 20000477 PARAMETER Experiment Name: Zm_5mM_SA_P Parameter: Organism Value: Zea mays
  misc_feature: MA Experiment 20000477 PARAMETER Experiment Name: Zm_5mM_SA_P Parameter: Plant Line Value: 35A19
  misc_feature: MA Experiment 20000477 PARAMETER Experiment Name: Zm_5mM_SA_P Parameter: Timepoint (hr) Value: 48
  misc_feature: MA Experiment 20000477 PARAMETER Experiment Name: Zm_5mM_SA_P Parameter: Tissue Value: Aerial
  misc_feature: MA Experiment 20000477 PARAMETER Experiment Name: Zm_5mM_SA_P Parameter: Treatment Value: 5mM SA vs. No Treatment
  misc_feature: MA Experiment ID: 20000626 Result: Up-regulated in Transcription
  misc_feature: MA Experiment 20000626 PARAMETER Experiment Name: Zm_Herbicide-Treatments_P Parameter: Timepoint (hr) Value: 12
  misc_feature: MA Experiment 20000626 PARAMETER Experiment Name: Zm_Herbicide-Treatments_P Parameter: Tissue Value: Aerial
  misc_feature: MA Experiment 20000626 PARAMETER Experiment Name: Zm_Herbicide-Treatments_P Parameter: Treatment Value: Roundup vs. No Treatment
  misc_feature: MA Experiment ID: 20000630 Result: Up-regulated in Transcription
  misc_feature: MA Experiment 20000630 PARAMETER Experiment Name: Zm_Herbicide-Treatments_P Parameter: Timepoint (hr) Value: 4
  misc_feature: MA Experiment 20000630 PARAMETER Experiment Name: Zm_Herbicide-Treatments_P Parameter: Tissue Value: Aerial
  misc_feature: MA Experiment 20000630 PARAMETER Experiment Name: Zm_Herbicide-Treatments_P Parameter: Treatment Value: Roundup vs. No Treatment
gcacgagaccattacctagaacatcctaatcgaaaactccacctccaccaatccaaccaaccattggccattgcgtagaaaagattactttaagaatgggctgctccaagcgcattgcactggtacttgtcgcggctcttgtagcgctccacgtccatgtcccgatggccaccgcagccaactccaacctcttccgggactacatcggcgccatcttcaacggcgtcaagttcaccgacgtccccatcaacccgagggtccgcttcgactacatcctcgccttcgtgatcgactacaccaccgcgacggagccgcccaccccgaccaacggccagttcaacatcttctggcaggactcggtgctgacggcgtccgcggtggccgccatcaagcagagcaacccgaacgtgcgggtggccgtcagcatcggcggcgccaccgtgaacgaccgccctgtgttcttcaacatcacctccgtcgactcctgggtccagaacgccgtctcctccctgaccaccatcatccagaagtacaacctggacggcatcgacatcgactacgagcagttccaggccgacccggccaccttcgccgagtgcatcggccgcctggtcaccacgctcaagagcaacggggtgatcagcttcgcgtccatcgccccgttcgacaacgccgacgtgcagcgccattaccaggccctgtgggcgacctacggaagcgtcatagactacgtcaacttccagttctacgcctacggcgccagcacgaccgaggcgcagtacgtcgacttcttcaaccagcagcttgtcaactaccccggcggcaacatcctggccagcttcaccacggcgcccaccaccacgtcggtgcccatcaacacgtcgctcagcgcttgccagacattgcagtcgcagggcaagctctacgggatcttcatctgggcagcccgaccattccaggagccaaggcttcaagtacgacacacaagcacaagcactgctcgccaacgcccctgctggctactagtagatggctaccataccttcaatgcgtttaagttggatttggatttcattttcaggtgaacaaataatattattatgtatggaataaggctgtcattggaatataatacggggctatttctatattcctgtgttctctataaaaattaaacaattctt

SEQ ID NO: 19215 - protein, 329 aa, Zea mays subsp. mays
  peptide (1)..(329): Ceres Seq. ID no. 12364673
  misc_feature (49)..(284): Pfam Name: Glycosyl hydrolases family 18 Pfam Description: Glycosyl hydrolases family 18
  misc_feature (29)..(284): Homolog of NCBI NO: 37534362 NR Description: putative class III chitinase
  misc_feature (31)..(284): Homolog of NCBI NO: 7434970 NR Description: chitinase (EC 3.2.1.14) a - Gladiolus gandavensis
  misc_feature (32)..(284): Homolog of NCBI NO: 7434971 NR Description: chitinase (EC 3.2.1.14) 1 - cone shell (Conus
  misc_feature (23)..(284): Homolog of NCBI NO: 11262118 NR Description: chitinase (EC 3.2.1.14) 1 - cone shell (Conus
  misc_feature (32)..(284): Homolog of NCBI NO: 632149 NR Description: narbonin - Vicia pannonica
  misc_feature (29)..(284): Homolog of NCBI NO: 37534356 NR Description: putative class III chitinase
  misc_feature (49)..(238): Homolog of NCBI NO: 730692 NR Description: RuBisCO-associated protein
  misc_feature (32)..(284): Homolog of NCBI NO: 7434972 NR Description: chitinase (EC 3.2.1.14) 2 - cone shell (Conus
  misc_feature (29)..(284): Homolog of NCBI NO: 27462188 NR Description: chitinase [Oryza sativa]
  misc_feature (1)..(284): Homolog of NCBI NO: 37534348 NR Description: putative class III chitinase RCB4
MGCSKRIALVLVAALVALHVHVPMATAANSNLFRDYIGAIFNGVKFTDVPINPRVRFDYILAFVIDYTTATEPPTPTNGQFNIFWQDSVLTASAVAAIKQSNPNVRVAVSIGGATVNDRPVFFNITSVDSWVQNAVSSLTTIIQKYNLDGIDIDYEQFQADPATFAECIGRLVTTLKSNGVISFASIAPFDNADVQRHYQALWATYGSVIDYVNFQFYAYGASTTEAQYVDFFNQQLVNYPGGNILASFTTAPTTTSVPINTSLSACQTLQSQGKLYGIFIWAARPFQEPRLQVRHTSTSTARQRPCWLLVDGYHTFNAFKLDLDFIFR

SEQ ID NO: 19216 - protein, 306 aa, Zea mays subsp. mays
  peptide (1)..(306): Ceres Seq. ID no. 12364674
  misc_feature (26)..(261): Pfam Name: Glycosyl hydrolases family 18 Pfam Description: Glycosyl hydrolases family 18
  misc_feature (26)..(215): Homolog of NCBI NO: 730692 NR Description: RuBisCO-associated protein
  misc_feature (9)..(261): Homolog of NCBI NO: 632149 NR Description: narbonin - Vicia pannonica
  misc_feature (6)..(261): Homolog of NCBI NO: 37534356 NR Description: putative class III chitinase
  misc_feature (6)..(261): Homolog of NCBI NO: 37534362 NR Description: putative class III chitinase
  misc_feature (8)..(261): Homolog of NCBI NO: 7434970 NR Description: chitinase (EC 3.2.1.14) a - Gladiolus gandavensis
  misc_feature (9)..(261): Homolog of NCBI NO: 7434971 NR Description: chitinase (EC 3.2.1.14) 1 - cone shell (Conus
  misc_feature (1)..(261): Homolog of NCBI NO: 11262118 NR Description: chitinase (EC 3.2.1.14) 1 - cone shell (Conus
  misc_feature (9)..(261): Homolog of NCBI NO: 7434972 NR Description: chitinase (EC 3.2.1.14) 2 - cone shell (Conus
  misc_feature (6)..(261): Homolog of NCBI NO: 27462188 NR Description: chitinase [Oryza sativa]
  misc_feature (1)..(261): Homolog of NCBI NO: 37534348 NR Description: putative class III chitinase RCB4
MATAANSNLFRDYIGAIFNGVKFTDVPINPRVRFDYILAFVIDYTTATEPPTPTNGQFNIFWQDSVLTASAVAAIKQSNPNVRVAVSIGGATVNDRPVFFNITSVDSWVQNAVSSLTTIIQKYNLDGIDIDYEQFQADPATFAECIGRLVTTLKSNGVISFASIAPFDNADVQRHYQALWATYGSVIDYVNFQFYAYGASTTEAQYVDFFNQQLVNYPGGNILASFTTAPTTTSVPINTSLSACQTLQSQGKLYGIFIWAARPFQEPRLQVRHTSTSTARQRPCWLLVDGYHTFNAFKLDLDFIFR

SEQ ID NO: 19217 - DNA, 2116 bp, Zea mays subsp. mays; identical to SEQ ID NO: 18260
  misc_feature (1)..(2116): Ceres Seq. ID no. 13566658
  misc_feature: MA Experiment ID: 108504 Result: Down-regulated in Transcription
  misc_feature: MA Experiment 108504 PARAMETER Experiment Name: Zm_Drought_P Parameter: Age (day) Value: 8
  misc_feature: MA Experiment 108504 PARAMETER Experiment Name: Zm_Drought_P Parameter: Organism Value: Zea mays
  misc_feature: MA Experiment 108504 PARAMETER Experiment Name: Zm_Drought_P Parameter: Plant Line Value: 35A19
  misc_feature: MA Experiment 108504 PARAMETER Experiment Name: Zm_Drought_P Parameter: Timepoint (hr) Value: 12
  misc_feature: MA Experiment 108504 PARAMETER Experiment Name: Zm_Drought_P Parameter: Tissue Value: Aerial
  misc_feature: MA Experiment 108504 PARAMETER Experiment Name: Zm_Drought_P Parameter: Treatment Value: Drought vs. No Drought
  misc_feature: MA Experiment ID: 108535 Result: Up-regulated in Transcription
  misc_feature: MA Experiment 108535 PARAMETER Experiment Name: Zm_Meristem_P Parameter: Age (day) Value: 8
  misc_feature: MA Experiment 108535 PARAMETER Experiment Name: Zm_Meristem_P Parameter: Organism Value: Zea mays
  misc_feature: MA Experiment 108535 PARAMETER Experiment Name: Zm_Meristem_P Parameter: Plant Line Value: 35A19
  misc_feature: MA Experiment 108535 PARAMETER Experiment Name: Zm_Meristem_P Parameter: Tissue Value: Root Meristem vs. Above Root Meristem
  misc_feature: MA Experiment ID: 108543 Result: Down-regulated in Transcription
  misc_feature: MA Experiment ID: 108556 Result: Down-regulated in Transcription
  misc_feature: MA Experiment 108556 PARAMETER Experiment Name: Zm_Drought_P Parameter: Age (day) Value: 9
  misc_feature: MA Experiment 108556 PARAMETER Experiment Name: Zm_Drought_P Parameter: Organism Value: Zea mays
  misc_feature: MA Experiment 108556 PARAMETER Experiment Name: Zm_Drought_P Parameter: Plant Line Value: 35A19
  misc_feature: MA Experiment 108556 PARAMETER Experiment Name: Zm_Drought_P Parameter: Timepoint (hr) Value: 24
  misc_feature: MA Experiment 108556 PARAMETER Experiment Name: Zm_Drought_P Parameter: Tissue Value: Aerial
  misc_feature: MA Experiment 108556 PARAMETER Experiment Name: Zm_Drought_P Parameter: Treatment Value: Drought vs. No Drought
  misc_feature: MA Experiment ID: 108597 Result: Down-regulated in Transcription
  misc_feature: MA Experiment 108597 PARAMETER Experiment Name: Zm_100uM_ABA_P Parameter: Age (day) Value: 9
  misc_feature: MA Experiment 108597 PARAMETER Experiment Name: Zm_100uM_ABA_P Parameter: Organism Value: Zea mays
  misc_feature: MA Experiment 108597 PARAMETER Experiment Name: Zm_100uM_ABA_P Parameter: Plant Line Value: 35A19
  misc_feature: MA Experiment 108597 PARAMETER Experiment Name: Zm_100uM_ABA_P Parameter: Timepoint (hr) Value: 24
  misc_feature: MA Experiment 108597 PARAMETER Experiment Name: Zm_100uM_ABA_P Parameter: Tissue Value: Aerial
  misc_feature: MA Experiment 108597 PARAMETER Experiment Name: Zm_100uM_ABA_P Parameter: Treatment Value: 100uM ABA vs. No Treatment
  misc_feature: MA Experiment ID: 108689 Result: Down-regulated in Transcription
  misc_feature: MA Experiment 108689 PARAMETER Experiment Name: Zm_Drought_Roots_P Parameter: Age (day) Value: 9
  misc_feature: MA Experiment 108689 PARAMETER Experiment Name: Zm_Drought_Roots_P Parameter: Organism Value: Zea mays
  misc_feature: MA Experiment 108689 PARAMETER Experiment Name: Zm_Drought_Roots_P Parameter: Plant Line Value: 35A19
  misc_feature: MA Experiment 108689 PARAMETER Experiment Name: Zm_Drought_Roots_P Parameter: Timepoint (hr) Value: 24
  misc_feature: MA Experiment 108689 PARAMETER Experiment Name: Zm_Drought_Roots_P Parameter: Tissue Value: Roots
  misc_feature: MA Experiment 108689 PARAMETER Experiment Name: Zm_Drought_Roots_P Parameter: Treatment Value: Drought vs. No Drought
  misc_feature: MA Experiment ID: 20000477 Result: Down-regulated in Transcription
  misc_feature: MA Experiment 20000477 PARAMETER Experiment Name: Zm_5mM_SA_P Parameter: Age (day) Value: 10
  misc_feature: MA Experiment 20000477 PARAMETER Experiment Name: Zm_5mM_SA_P Parameter: Organism Value: Zea mays
  misc_feature: MA Experiment 20000477 PARAMETER Experiment Name: Zm_5mM_SA_P Parameter: Plant Line Value: 35A19
  misc_feature: MA Experiment 20000477 PARAMETER Experiment Name: Zm_5mM_SA_P Parameter: Timepoint (hr) Value: 48
  misc_feature: MA Experiment 20000477 PARAMETER Experiment Name: Zm_5mM_SA_P Parameter: Tissue Value: Aerial
  misc_feature: MA Experiment 20000477 PARAMETER Experiment Name: Zm_5mM_SA_P Parameter: Treatment Value: 5mM SA vs. No Treatment
  misc_feature: MA Experiment ID: 20000478 Result: Down-regulated in Transcription
  misc_feature: MA Experiment 20000478 PARAMETER Experiment Name: Zm_5mM_SA_P Parameter: Age (day) Value: 11
  misc_feature: MA Experiment 20000478 PARAMETER Experiment Name: Zm_5mM_SA_P Parameter: Organism Value: Zea mays
  misc_feature: MA Experiment 20000478 PARAMETER Experiment Name: Zm_5mM_SA_P Parameter: Plant Line Value: 35A19
  misc_feature: MA Experiment 20000478 PARAMETER Experiment Name: Zm_5mM_SA_P Parameter: Timepoint (hr) Value: 72
  misc_feature: MA Experiment 20000478 PARAMETER Experiment Name: Zm_5mM_SA_P Parameter: Tissue Value: Aerial
  misc_feature: MA Experiment 20000478 PARAMETER Experiment Name: Zm_5mM_SA_P Parameter: Treatment Value: 5mM SA vs. No Treatment
  misc_feature: MA Experiment ID: 20000479 Result: Down-regulated in Transcription
  misc_feature: MA Experiment 20000479 PARAMETER Experiment Name: Zm_Drought_P Parameter: Age (day) Value: 10
  misc_feature: MA Experiment 20000479 PARAMETER Experiment Name: Zm_Drought_P Parameter: Organism Value: Zea mays
  misc_feature: MA Experiment 20000479 PARAMETER Experiment Name: Zm_Drought_P Parameter: Plant Line Value: 35A19
  misc_feature: MA Experiment 20000479 PARAMETER Experiment Name: Zm_Drought_P Parameter: Timepoint (hr) Value: 48
  misc_feature: MA Experiment 20000479 PARAMETER Experiment Name: Zm_Drought_P Parameter: Tissue Value: Aerial
  misc_feature: MA Experiment 20000479 PARAMETER Experiment Name: Zm_Drought_P Parameter: Treatment Value: Drought vs. No Drought
  misc_feature: MA Experiment ID: 20000480 Result: Down-regulated in Transcription
  misc_feature: MA Experiment 20000480 PARAMETER Experiment Name: Zm_Drought_P Parameter: Age (day) Value: 11
  misc_feature: MA Experiment 20000480 PARAMETER Experiment Name: Zm_Drought_P Parameter: Organism Value: Zea mays
  misc_feature: MA Experiment 20000480 PARAMETER Experiment Name: Zm_Drought_P Parameter: Plant Line Value: 35A19
  misc_feature: MA Experiment 20000480 PARAMETER Experiment Name: Zm_Drought_P Parameter: Timepoint (hr) Value: 72
  misc_feature: MA Experiment 20000480 PARAMETER Experiment Name: Zm_Drought_P Parameter: Tissue Value: Aerial
  misc_feature: MA Experiment 20000480 PARAMETER Experiment Name: Zm_Drought_P Parameter: Treatment Value: Drought vs. No Drought
  misc_feature: MA Experiment ID: 20000492 Result: Up-regulated in Transcription
  misc_feature: MA Experiment 20000492 PARAMETER Experiment Name: Zm_Hybrid_Seed_Dev_P Parameter: DAP Value: 12
  misc_feature: MA Experiment 20000492 PARAMETER Experiment Name: Zm_Hybrid_Seed_Dev_P Parameter: Organism Value: Zea mays
  misc_feature: MA Experiment 20000492 PARAMETER Experiment Name: Zm_Hybrid_Seed_Dev_P Parameter: Plant Line Value: 35A19
  misc_feature: MA Experiment 20000492 PARAMETER Experiment Name: Zm_Hybrid_Seed_Dev_P Parameter: Tissue Value: Fert Kernel vs. Unfert Floret
  misc_feature: MA Experiment ID: 20000533 Result: Down-regulated in Transcription
  misc_feature: MA Experiment 20000533 PARAMETER Experiment Name: Zm_0.001percent_MeJA_P Parameter: Age (day) Value: 11
  misc_feature: MA Experiment 20000533 PARAMETER Experiment Name: Zm_0.001percent_MeJA_P Parameter: Organism Value: Zea mays
  misc_feature: MA Experiment 20000533 PARAMETER Experiment Name: Zm_0.001percent_MeJA_P Parameter: Plant Line Value: 35A19
  misc_feature: MA Experiment 20000533 PARAMETER Experiment Name: Zm_0.001percent_MeJA_P Parameter: Timepoint (hr) Value: 72
  misc_feature: MA Experiment 20000533 PARAMETER Experiment Name: Zm_0.001percent_MeJA_P Parameter: Tissue Value: Aerial
  misc_feature: MA Experiment 20000533 PARAMETER Experiment Name: Zm_0.001percent_MeJA_P Parameter: Treatment Value: 0.001percent MeJA vs. No Treatment
  misc_feature: MA Experiment ID: 20000535 Result: Up-regulated in Transcription
  misc_feature: MA Experiment 20000535 PARAMETER Experiment Name: Zm_Hybrid_Seed_Dev_P Parameter: DAP Value: 30 vs. 12
  misc_feature: MA Experiment 20000535 PARAMETER Experiment Name: Zm_Hybrid_Seed_Dev_P Parameter: Organism Value: Zea mays
  misc_feature: MA Experiment 20000535 PARAMETER Experiment Name: Zm_Hybrid_Seed_Dev_P Parameter: Plant Line Value: 35A19
  misc_feature: MA Experiment 20000535 PARAMETER Experiment Name: Zm_Hybrid_Seed_Dev_P Parameter: Tissue Value: Embryo vs. Unfert Floret

SEQ ID NO: 19218 - protein, 592 aa, Zea mays subsp. mays; identical to SEQ ID NO: 18261
  peptide (1)..(592): Ceres Seq. ID no. 13566659
  misc_feature (21)..(592): Homolog of NCBI NO: 15234551 NR Description: pectinesterase (pectin methylesterase) family
  misc_feature (7)..(589): Homolog of NCBI NO: 27817921 NR Description: putative pectinesterase [Oryza sativa (japonica
  misc_feature (7)..(588): Homolog of NCBI NO: 34897712 NR Description: ESTs AU082304(C61278),C93463(C50982) correspond a region of the predicted gene.~Similar to Arabidopsis thaliana chromosome 4, BAC clone F24A6, Pollen-specific protein precursor
  misc_feature (490)..(557): Homolog of NCBI NO: 34893990 NR Description: putative pollen-specific protein homolog
  misc_feature (8)..(490): Homolog of NCBI NO: 34893990 NR Description: putative pollen-specific protein homolog
  misc_feature (13)..(557): Homolog of NCBI NO: 7433000 NR Description: pollen-specific protein homolog F24A6.80 -
  misc_feature (5)..(588): Homolog of NCBI NO: 15242108 NR Description: pectinesterase (pectin methylesterase) family
  misc_feature (13)..(589): Homolog of NCBI NO: 22328918 NR Description: pectinesterase (pectin methylesterase) family
  misc_feature (326)..(590): Homolog of NCBI NO: 37535902 NR Description: putative ascorbate oxidase
  misc_feature (1)..(341): Homolog of NCBI NO: 37535902 NR Description: putative ascorbate oxidase
  misc_feature (490)..(557): Homolog of NCBI NO: 34893990 NR Description: putative pollen-specific protein homolog
  misc_feature (8)..(490): Homolog of NCBI NO: 34893990 NR Description: putative pollen-specific protein homolog
  misc_feature (13)..(557): Homolog of NCBI NO: 7433000 NR Description: pollen-specific protein homolog F24A6.80 -
  misc_feature (5)..(588): Homolog of NCBI NO: 15242108 NR Description: pectinesterase (pectin methylesterase) family
  misc_feature (13)..(589): Homolog of NCBI NO: 22328918 NR Description: pectinesterase (pectin methylesterase) family
  misc_feature (326)..(590): Homolog of NCBI NO: 37535902 NR Description: putative ascorbate oxidase
  misc_feature (1)..(341): Homolog of NCBI NO: 37535902 NR Description: putative ascorbate oxidase
  misc_feature (21)..(592): Homolog of NCBI NO: 15234551 NR Description: pectinesterase (pectin methylesterase) family
  misc_feature (7)..(589): Homolog of NCBI NO: 27817921 NR Description: putative pectinesterase [Oryza sativa (japonica
  misc_feature (7)..(588): Homolog of NCBI NO: 34897712 NR Description: ESTs AU082304(C61278),C93463(C50982) correspond a region of the predicted gene.~Similar to Arabidopsis thaliana chromosome 4, BAC clone F24A6, Pollen-specific protein precursor
  misc_feature (490)..(557): Homolog of NCBI NO: 34893990 NR Description: putative pollen-specific protein homolog
  misc_feature (8)..(490): Homolog of NCBI NO: 34893990 NR Description: putative pollen-specific protein homolog
  misc_feature (13)..(557): Homolog of NCBI NO: 7433000 NR Description: pollen-specific protein homolog F24A6.80 -
  misc_feature (5)..(588): Homolog of NCBI NO: 15242108 NR Description: pectinesterase (pectin methylesterase) family
  misc_feature (13)..(589): Homolog of NCBI NO: 22328918 NR Description: pectinesterase (pectin methylesterase) family
  misc_feature (326)..(590): Homolog of NCBI NO: 37535902 NR Description: putative ascorbate oxidase
  misc_feature (1)..(341): Homolog of NCBI NO: 37535902 NR Description: putative ascorbate oxidase
  misc_feature (21)..(592): Homolog of NCBI NO: 15234551 NR Description: pectinesterase (pectin methylesterase) family
  misc_feature (7)..(589): Homolog of NCBI NO: 27817921 NR Description: putative pectinesterase [Oryza sativa (japonica
  misc_feature (7)..(588): Homolog of NCBI NO: 34897712 NR Description: ESTs AU082304(C61278),C93463(C50982) correspond a region of the predicted gene.~Similar to Arabidopsis thaliana chromosome 4, BAC clone F24A6, Pollen-specific protein precursor
  misc_feature (489)..(489): Xaa is any aa, unknown or other

SEQ ID NO: 19219 - protein, 535 aa, Zea mays subsp. mays; identical to SEQ ID NO: 18262
  peptide (1)..(535): Ceres Seq. ID no. 13566660
  misc_feature (433)..(500): Homolog of NCBI NO: 34893990 NR Description: putative pollen-specific protein homolog
  misc_feature (1)..(433): Homolog of NCBI NO: 34893990 NR Description: putative pollen-specific protein homolog
  misc_feature (1)..(500): Homolog of NCBI NO: 7433000 NR Description: pollen-specific protein homolog F24A6.80 -
  misc_feature (1)..(531): Homolog of NCBI NO: 15242108 NR Description: pectinesterase (pectin methylesterase) family
  misc_feature (1)..(532): Homolog of NCBI NO: 22328918 NR Description: pectinesterase (pectin methylesterase) family
  misc_feature (269)..(533): Homolog of NCBI NO: 37535902 NR Description: putative ascorbate oxidase
  misc_feature (1)..(284): Homolog of NCBI NO: 37535902 NR Description: putative ascorbate oxidase
  misc_feature (1)..(535): Homolog of NCBI NO: 15234551 NR Description: pectinesterase (pectin methylesterase) family
  misc_feature (1)..(532): Homolog of NCBI NO: 27817921 NR Description: putative pectinesterase [Oryza sativa (japonica
  misc_feature (1)..(531): Homolog of NCBI NO: 34897712 NR Description: ESTs AU082304(C61278),C93463(C50982) correspond a region of the predicted gene.~Similar to Arabidopsis thaliana chromosome 4, BAC clone F24A6, Pollen-specific protein precursor
  misc_feature (433)..(500): Homolog of NCBI NO: 34893990 NR Description: putative pollen-specific protein homolog
  misc_feature (1)..(433): Homolog of NCBI NO: 34893990 NR Description: putative pollen-specific protein homolog
  misc_feature (1)..(500): Homolog of NCBI NO: 7433000 NR Description: pollen-specific protein homolog F24A6.80 -
  misc_feature (1)..(531): Homolog of NCBI NO: 15242108 NR Description: pectinesterase (pectin methylesterase) family
  misc_feature (1)..(532): Homolog of NCBI NO: 22328918 NR Description: pectinesterase (pectin methylesterase) family
  misc_feature (269)..(533): Homolog of NCBI NO: 37535902 NR Description: putative ascorbate oxidase
  misc_feature (1)..(284): Homolog of NCBI NO: 37535902 NR Description: putative ascorbate oxidase
  misc_feature (1)..(535): Homolog of NCBI NO: 15234551 NR Description: pectinesterase (pectin methylesterase) family
  misc_feature (1)..(532): Homolog of NCBI NO: 27817921 NR Description: putative pectinesterase [Oryza sativa (japonica
  misc_feature (1)..(531): Homolog of NCBI NO: 34897712 NR Description: ESTs AU082304(C61278),C93463(C50982) correspond a region of the predicted gene.~Similar to Arabidopsis thaliana chromosome 4, BAC clone F24A6, Pollen-specific protein precursor
  misc_feature (1)..(531): Homolog of NCBI NO: 34897712 NR Description: ESTs AU082304(C61278),C93463(C50982) correspond a region of the predicted gene.~Similar to Arabidopsis thaliana chromosome 4, BAC clone F24A6, Pollen-specific protein precursor
  misc_feature (433)..(500): Homolog of NCBI NO: 34893990 NR Description: putative pollen-specific protein homolog
  misc_feature (1)..(433): Homolog of NCBI NO: 34893990 NR Description: putative pollen-specific protein homolog
  misc_feature (1)..(500): Homolog of NCBI NO: 7433000 NR Description: pollen-specific protein homolog F24A6.80 -
  misc_feature (1)..(531): Homolog of NCBI NO: 15242108 NR Description: pectinesterase (pectin methylesterase) family
  misc_feature (1)..(532): Homolog of NCBI NO: 22328918 NR Description: pectinesterase (pectin methylesterase) family
  misc_feature (269)..(533): Homolog of NCBI NO: 37535902 NR Description: putative ascorbate oxidase
  misc_feature (1)..(284): Homolog of NCBI NO: 37535902 NR Description: putative ascorbate oxidase
  misc_feature (1)..(535): Homolog of NCBI NO: 15234551 NR Description: pectinesterase (pectin methylesterase) family
  misc_feature (1)..(532): Homolog of NCBI NO: 27817921 NR Description: putative pectinesterase [Oryza sativa (japonica
  misc_feature (432)..(432): Xaa is any aa, unknown or other

SEQ ID NO: 19220 - protein, 463 aa, Zea mays subsp. mays; identical to SEQ ID NO: 18263
  peptide (1)..(463): Ceres Seq. ID no. 13566661
  misc_feature (361)..(428): Homolog of NCBI NO: 34893990 NR Description: putative pollen-specific protein homolog
  misc_feature (1)..(361): Homolog of NCBI NO: 34893990 NR Description: putative pollen-specific protein homolog
  misc_feature (1)..(428): Homolog of NCBI NO: 7433000 NR Description: pollen-specific protein homolog F24A6.80 -
  misc_feature (1)..(459): Homolog of NCBI NO: 15242108 NR Description: pectinesterase (pectin methylesterase) family
  misc_feature (1)..(460): Homolog of NCBI NO: 22328918 NR Description: pectinesterase (pectin methylesterase) family
  misc_feature (197)..(461): Homolog of NCBI NO: 37535902 NR Description: putative ascorbate oxidase
  misc_feature (1)..(212): Homolog of NCBI NO: 37535902 NR Description: putative ascorbate oxidase
  misc_feature (1)..(463): Homolog of NCBI NO: 15234551 NR Description: pectinesterase (pectin methylesterase) family
  misc_feature (1)..(460): Homolog of NCBI NO: 27817921 NR Description: putative pectinesterase [Oryza sativa (japonica
  misc_feature (1)..(459): Homolog of NCBI NO: 34897712 NR Description: ESTs AU082304(C61278),C93463(C50982) correspond a region of the predicted gene.~Similar to Arabidopsis thaliana chromosome 4, BAC clone F24A6, Pollen-specific protein precursor
  misc_feature (361)..(428): Homolog of NCBI NO: 34893990 NR Description: putative pollen-specific protein homolog
  misc_feature (1)..(361): Homolog of NCBI NO: 34893990 NR Description: putative pollen-specific protein homolog
  misc_feature (1)..(428): Homolog of NCBI NO: 7433000 NR Description: pollen-specific protein homolog F24A6.80 -
  misc_feature (1)..(459): Homolog of NCBI NO: 15242108 NR Description: pectinesterase (pectin methylesterase) family
  misc_feature (1)..(460): Homolog of NCBI NO: 22328918 NR Description: pectinesterase (pectin methylesterase) family
  misc_feature (197)..(461): Homolog of NCBI NO: 37535902 NR Description: putative ascorbate oxidase
  misc_feature (1)..(212): Homolog of NCBI NO: 37535902 NR Description: putative ascorbate oxidase
  misc_feature (1)..(463): Homolog of NCBI NO: 15234551 NR Description: pectinesterase (pectin methylesterase) family
  misc_feature (1)..(460): Homolog of NCBI NO: 27817921 NR Description: putative pectinesterase [Oryza sativa (japonica
  misc_feature (1)..(459): Homolog of NCBI NO: 34897712 NR Description: ESTs AU082304(C61278),C93463(C50982) correspond a region of the predicted gene.~Similar to Arabidopsis thaliana chromosome 4, BAC clone F24A6, Pollen-specific protein precursor
  misc_feature (361)..(428): Homolog of NCBI NO: 34893990 NR Description: putative pollen-specific protein homolog
  misc_feature (1)..(361): Homolog of NCBI NO: 34893990 NR Description: putative pollen-specific protein homolog
  misc_feature (1)..(428): Homolog of NCBI NO: 7433000 NR Description: pollen-specific protein homolog F24A6.80 -
  misc_feature (1)..(459): Homolog of NCBI NO: 15242108 NR Description: pectinesterase (pectin methylesterase) family
  misc_feature (1)..(460): Homolog of NCBI NO: 22328918 NR Description: pectinesterase (pectin methylesterase) family
  misc_feature (197)..(461): Homolog of NCBI NO: 37535902 NR Description: putative ascorbate oxidase
  misc_feature (1)..(212): Homolog of NCBI NO: 37535902 NR Description: putative ascorbate oxidase
  misc_feature (1)..(463): Homolog of NCBI NO: 15234551 NR Description: pectinesterase (pectin methylesterase) family
  misc_feature (1)..(460): Homolog of NCBI NO: 27817921 NR Description: putative pectinesterase [Oryza sativa (japonica
  misc_feature (1)..(459): Homolog of NCBI NO: 34897712 NR Description: ESTs AU082304(C61278),C93463(C50982) correspond a region of the predicted gene.~Similar to Arabidopsis thaliana chromosome 4, BAC clone F24A6, Pollen-specific protein precursor
  misc_feature (360)..(360): Xaa is any aa, unknown or other

SEQ ID NO: 19221 - DNA, 2003 bp, Zea mays subsp. mays
  misc_feature (1)..(2003): Ceres Seq. ID no. 12387993
  misc_feature: MA Experiment ID: 108529 Result: Up-regulated in Transcription
  misc_feature: MA Experiment 108529 PARAMETER Experiment Name: Zm_Imbibed_Seeds_P Parameter: Age (day) Value: 5 vs. 2
  misc_feature: MA Experiment 108529 PARAMETER Experiment Name: Zm_Imbibed_Seeds_P Parameter: Organism Value: Zea mays
  misc_feature: MA Experiment 108529 PARAMETER Experiment Name: Zm_Imbibed_Seeds_P Parameter: Plant Line Value: 35A19
  misc_feature: MA Experiment 108529 PARAMETER Experiment Name: Zm_Imbibed_Seeds_P Parameter: Tissue Value: Roots vs. Embryo
  misc_feature: MA Experiment ID: 108689 Result: Down-regulated in Transcription
  misc_feature: MA Experiment 108689 PARAMETER Experiment Name: Zm_Drought_Roots_P Parameter: Age (day) Value: 9
  misc_feature: MA Experiment 108689 PARAMETER Experiment Name: Zm_Drought_Roots_P Parameter: Organism Value: Zea mays
  misc_feature: MA Experiment 108689 PARAMETER Experiment Name: Zm_Drought_Roots_P Parameter: Plant Line Value: 35A19
  misc_feature: MA Experiment 108689 PARAMETER Experiment Name: Zm_Drought_Roots_P Parameter: Timepoint (hr) Value: 24
  misc_feature: MA Experiment 108689 PARAMETER Experiment Name: Zm_Drought_Roots_P Parameter: Tissue Value: Roots
  misc_feature: MA Experiment 108689 PARAMETER Experiment Name: Zm_Drought_Roots_P Parameter: Treatment Value: Drought vs. No Drought
gcaccgagaccattacctagaacatcctaatcgaaaaatccgacccagtatccccgacaaagtcaatgcgatgcgtctcctccttgctctatcgactatcgtagccgattccccgttgcaagtaactaaaactaagtctcaagtctgcagagtaaccggagtagcatagcactagcaagcaatggccgctctcacttccgctctcctcttcgccgccctcctcgtggccgcccagtacgtgctccgcttgctccactccttcctgtgggtcccgttccgcctggaacgccgcttccggcggcagggaatccggtggccaccacgaagcctggtctccggtaacgcagccgactaccgcgacctgctagccgccgccaggtccgcgcccctctcctccttccgccacaacggcgtcgtcgcccgcgccacgccgcagtacgcggtctggctggcgcggtacggccggccgttcgtgtactggttcgggccccggccgcggctggtgatctccgacacggagctcgtgaaggccgtgatgaccgactccacggggggctttgataaggcggcctcgggcggcaacaacccgctcgccaggcagctcatcggcgaggggctcgtcgggctctccggggagacgtgggcgcgccaccgccgcgtgatttcgccggcgtttaacatggagagggtgaaggcttggataccagaaatagcagctgcggcatcacctgttctggataagtgggaggccgaaggtgggagccgcactgagtttgagatcgatgtccataaagcattccacactttgagtgcggatgtcatttcctgtgtggcatttggaagcaggctacgaggaggggaaacgaattttccaattgcaggaggaacagatgcaacttgctcttcttgcaatgaggactgtttatattcctggcttcaggtttgtaccaacaaagaagaaccgaaaaaggcagaggttaaaccaggaaatccaatgctccctgcgcaaattgatcgaaatcaatggaacaaaatgtgaggactcaaaaaatttgctggggttaatgctatcagccagcaaagctgggagtgaatacaaaatgggaatcgaagagataatccatgagtgcaagacgttttactttgctgggaaggaaacaacagcgaacctgttgacatgggcaacacttcttcttgcgttgcatcaagagtggcaggtcaaggcccgtgatgaggttcttaaagtgtgcggaaagcatgagcaccctaatgcagaaaacctgagcgatctcaagattgtaactatggtgttaaaagaaaccctcaggctgtatcctccagctacatttatcaatcggactgccactagggatatcaagctgggtaaactagacatcccggctggcacacggctggacttccctatcattcacatccatcgtgaccatgaagtctggggcatggatgcagaggagtttaatccatcaaggtttgcagatggcagcagctatcacctaggtgcttacttcccctttgggatcggccctacaatctgcgttggccagaatcttgcaatggtcgaggccaaggtggcgcttgcaatgacccttcagcggtttgcgttcaccgtttcggcgtcttatgctcatgcaccgatgctggtgttcaccctccagcctcagttcggtgctcaagttcttgtccggaagatatgagccttctatgtgacaaccaataaggtcataaaatttctatatctttttgagtagtctgaaggatccatgaggcctctcctttttttcttcttctttcgaacacaggactctacttttttttgttcaatcctgttcatgaaagacttgtatataagatttgttctctacaggaatctgataaaggcttcaaacacttgagctaaaatggcatgtgttgtacaaaaaccatctagaacctgcatgaatataccgatttggaactgcaagcctcaccgcttgggtttgttg

SEQ ID NO: 19222 - protein, 299 aa, Zea mays subsp. mays
  peptide (1)..(299): Ceres Seq. ID no. 12387994
  misc_feature (10)..(299): Homolog of NCBI NO: 21842133 NR Description: cytochrome P450 monooxygenase CYP72A16 [Zea mays
  misc_feature (10)..(299): Homolog of NCBI NO: 13661770 NR Description: putative cytochrome P450 [Lolium rigidum]
  misc_feature (10)..(299): Homolog of NCBI NO: 13661766 NR Description: putative cytochrome P450 [Lolium rigidum]
  misc_feature (10)..(299): Homolog of NCBI NO: 13661768 NR Description: putative cytochrome P450 [Lolium rigidum]
  misc_feature (10)..(299): Homolog of NCBI NO: 13661772 NR Description: putative cytochrome P450 [Lolium rigidum]
  misc_feature (10)..(299): Homolog of NCBI NO: 13661774 NR Description: putative cytochrome P450 [Lolium rigidum]
  misc_feature (10)..(299): Homolog of NCBI NO: 21805645 NR Description: cytochrome P450 monooxygenase CYP72A5 [Zea mays
  misc_feature (12)..(297): Homolog of NCBI NO: 34896248 NR Description: OSJNBb0008D07.14 [Oryza sativa (japonica
  misc_feature (10)..(299): Homolog of NCBI NO: 15225777 NR Description: cytochrome P450, putative; protein id:
  misc_feature (13)..(299): Homolog of NCBI NO: 15222125 NR Description: cytochrome P450, putative; protein id:
MSFPVWHLEAGYEEGKRIFQLQEEQMQLALLAMRTVYIPGFRFVPTKKNRKRQRLNQEIQCSLRKLIEINGTKCEDSKNLLGLMLSASKAGSEYKMGIEEIIHECKTFYFAGKETTANLLTWATLLLALHQEWQVKARDEVLKVCGKHEHPNAENLSDLKIVTMVLKETLRLYPPATFINRTATRDIKLGKLDIPAGTRLDFPIIHIHRDHEVWGMDAEEFNPSRFADGSSYHLGAYFPFGIGPTICVGQNLAMVEAKVALAMTLQRFAFTVSASYAHAPMLVFTLQPQFGAQVLVRKI

SEQ ID NO: 19223 - protein, 285 aa, Zea mays subsp. mays
  peptide (1)..(285): Ceres Seq. ID no. 12387995
  misc_feature (4)..(234): Homolog of NCBI NO: 13661766 NR Description: putative cytochrome P450 [Lolium rigidum]
  misc_feature (3)..(234): Homolog of NCBI NO: 13661770 NR Description: putative cytochrome P450 [Lolium rigidum]
  misc_feature (3)..(234): Homolog of NCBI NO: 13661768 NR Description: putative cytochrome P450 [Lolium rigidum]
  misc_feature (8)..(234): Homolog of NCBI NO: 13661772 NR Description: putative cytochrome P450 [Lolium rigidum]
  misc_feature (8)..(234): Homolog of NCBI NO: 13661774 NR Description: putative cytochrome P450 [Lolium rigidum]
  misc_feature (3)..(234): Homolog of NCBI NO: 21805645 NR Description: cytochrome P450 monooxygenase CYP72A5 [Zea mays
  misc_feature (11)..(96): Homolog of NCBI NO: 34896248 NR Description: OSJNBb0008D07.14 [Oryza sativa (japonica
  misc_feature (90)..(232): Homolog of NCBI NO: 34896248 NR Description: OSJNBb0008D07.14 [Oryza sativa (japonica
  misc_feature (29)..(241): Homolog of NCBI NO: 15225777 NR Description: cytochrome P450, putative; protein id:
  misc_feature (7)..(232): Homolog of NCBI NO: 15222125 NR Description: cytochrome P450, putative; protein id:
MAALTSALLFAALLVAAQYVLRLLHSFLWVPFRLERRFRRQGIRWPPRSLVSGNAADYRDLLAAARSAPLSSFRHNGVVARATPQYAVWLARYGRPFVYWFGPRPRLVISDTELVKAVMTDSTGGFDKAASGGNNPLARQLIGEGLVGLSGETWARHRRVISPAFNMERVKAWIPEIAAAASPVLDKWEAEGGSRTEFEIDVHKAFHTLSADVISCVAFGSRLRGGETNFPIAGGTDATCSSCNEDCLYSWLQVCTNKEEPKKAEVKPGNPMLPAQIDRNQWNKM

SEQ ID NO: 19224 - protein, 274 aa, Zea mays subsp. mays
  peptide (1)..(274): Ceres Seq. ID no. 12387996
  misc_feature (1)..(274): Homolog of NCBI NO: 21842133 NR Description: cytochrome P450 monooxygenase CYP72A16 [Zea mays
  misc_feature (1)..(274): Homolog of NCBI NO: 13661770 NR Description: putative cytochrome P450 [Lolium rigidum]
  misc_feature (1)..(274): Homolog of NCBI NO: 13661766 NR Description: putative cytochrome P450 [Lolium rigidum]
  misc_feature (1)..(274): Homolog of NCBI NO: 13661768 NR Description: putative cytochrome P450 [Lolium rigidum]
  misc_feature (1)..(274): Homolog of NCBI NO: 13661772 NR Description: putative cytochrome P450 [Lolium rigidum]
  misc_feature (1)..(274): Homolog of NCBI NO: 13661774 NR Description: putative cytochrome P450 [Lolium rigidum]
  misc_feature (1)..(274): Homolog of NCBI NO: 21805645 NR Description: cytochrome P450 monooxygenase CYP72A5 [Zea mays
  misc_feature (1)..(272): Homolog of NCBI NO: 34896248 NR Description: OSJNBb0008D07.14 [Oryza sativa (japonica
  misc_feature (1)..(274): Homolog of NCBI NO: 15225777 NR Description: cytochrome P450, putative; protein id:
  misc_feature (1)..(274): Homolog of NCBI NO: 15222125 NR Description: cytochrome P450, putative; protein id:
MQLALLAMRTVYIPGFRFVPTKKNRKRQRLNQEIQCSLRKLIEINGTKCEDSKNLLGLMLSASKAGSEYKMGIEEIIHECKTFYFAGKETTANLLTWATLLLALHQEWQVKARDEVLKVCGKHEHPNAENLSDLKIVTMVLKETLRLYPPATFINRTATRDIKLGKLDIPAGTRLDFPIIHIHRDHEVWGMDAEEFNPSRFADGSSYHLGAYFPFGIGPTICVGQNLAMVEAKVALAMTLQRFAFTVSASYAHAPMLVFTLQPQFGAQVLVRKI

SEQ ID NO: 19225 - DNA, 1911 bp, Zea mays subsp. mays
  misc_feature (1)..(1911): Ceres Seq. ID no. 12375693
  misc_feature: MA Experiment ID: 108522 Result: Down-regulated in Transcription
  misc_feature: MA Experiment 108522 PARAMETER Experiment Name: Zm_42deg_Heat_P Parameter: Age (day) Value: 8
  misc_feature: MA Experiment 108522 PARAMETER Experiment Name: Zm_42deg_Heat_P Parameter: Organism Value: Zea mays
  misc_feature: MA Experiment 108522 PARAMETER Experiment Name: Zm_42deg_Heat_P Parameter: Plant Line Value: 35A19
  misc_feature: MA Experiment 108522 PARAMETER Experiment Name: Zm_42deg_Heat_P Parameter: Temperature (deg C) Value: 42 vs. 22
  misc_feature: MA Experiment 108522 PARAMETER Experiment Name: Zm_42deg_Heat_P Parameter: Timepoint (hr) Value: 1
  misc_feature: MA Experiment 108522 PARAMETER Experiment Name: Zm_42deg_Heat_P Parameter: Tissue Value: Aerial
  misc_feature: MA Experiment ID: 108523 Result: Down-regulated in Transcription
  misc_feature: MA Experiment 108523 PARAMETER Experiment Name: Zm_42deg_Heat_P Parameter: Age (day) Value: 8
  misc_feature: MA Experiment 108523 PARAMETER Experiment Name: Zm_42deg_Heat_P Parameter: Organism Value: Zea mays
  misc_feature: MA Experiment 108523 PARAMETER Experiment Name: Zm_42deg_Heat_P Parameter: Plant Line Value: 35A19
  misc_feature: MA Experiment 108523 PARAMETER Experiment Name: Zm_42deg_Heat_P Parameter: Temperature (deg C) Value: 42 vs. 22
  misc_feature: MA Experiment 108523 PARAMETER Experiment Name: Zm_42deg_Heat_P Parameter: Timepoint (hr) Value: 6
  misc_feature: MA Experiment 108523 PARAMETER Experiment Name: Zm_42deg_Heat_P Parameter: Tissue Value: Aerial
  misc_feature: MA Experiment ID: 108527 Result: Down-regulated in Transcription
  misc_feature: MA Experiment 108527 PARAMETER Experiment Name: Zm_5mM_NO_P Parameter: Age (day) Value: 8
  misc_feature: MA Experiment 108527 PARAMETER Experiment Name: Zm_5mM_NO_P Parameter: Organism Value: Zea mays
  misc_feature: MA Experiment 108527 PARAMETER Experiment Name: Zm_5mM_NO_P Parameter: Plant Line Value: 35A19
  misc_feature: MA Experiment 108527 PARAMETER Experiment Name: Zm_5mM_NO_P Parameter: Timepoint (hr) Value: 6
  misc_feature: MA Experiment 108527 PARAMETER Experiment Name: Zm_5mM_NO_P Parameter: Tissue Value: Aerial
  misc_feature: MA Experiment 108527 PARAMETER Experiment Name: Zm_5mM_NO_P Parameter: Treatment Value: 5mM NO vs. No Treatment
  misc_feature: MA Experiment ID: 108528 Result: Up-regulated in Transcription
  misc_feature: MA Experiment 108528 PARAMETER Experiment Name: Zm_Imbibed_Seeds_P Parameter: Age (day) Value: 5 vs. 2
  misc_feature: MA Experiment 108528 PARAMETER Experiment Name: Zm_Imbibed_Seeds_P Parameter: Organism Value: Zea mays
  misc_feature: MA Experiment 108528 PARAMETER Experiment Name: Zm_Imbibed_Seeds_P Parameter: Plant Line Value: 35A19
  misc_feature: MA Experiment 108528 PARAMETER Experiment Name: Zm_Imbibed_Seeds_P Parameter: Tissue Value: Aerial vs. Embryo
  misc_feature: MA Experiment ID: 108530 Result: Up-regulated in Transcription
  misc_feature: MA Experiment 108530 PARAMETER Experiment Name: Zm_Imbibed_Seeds_P Parameter: Age (day) Value: 6 vs. 2
  misc_feature: MA Experiment 108530 PARAMETER Experiment Name: Zm_Imbibed_Seeds_P Parameter: Organism Value: Zea mays
  misc_feature: MA Experiment 108530 PARAMETER Experiment Name: Zm_Imbibed_Seeds_P Parameter: Plant Line Value: 35A19
  misc_feature: MA Experiment 108530 PARAMETER Experiment Name: Zm_Imbibed_Seeds_P Parameter: Tissue Value: Aerial vs. Embryo
  misc_feature: MA Experiment ID: 108534 Result: Down-regulated in Transcription
  misc_feature: MA Experiment 108534 PARAMETER Experiment Name: Zm_4deg_Cold_P Parameter: Age (hr) Value: 8
  misc_feature: MA Experiment 108534 PARAMETER Experiment Name: Zm_4deg_Cold_P Parameter: Organism Value: Zea mays
  misc_feature: MA Experiment 108534 PARAMETER Experiment Name: Zm_4deg_Cold_P Parameter: Plant Line Value: 35A19
  misc_feature: MA Experiment 108534 PARAMETER Experiment Name: Zm_4deg_Cold_P Parameter: Temperature (deg C) Value: 4 vs. 22
  misc_feature: MA Experiment 108534 PARAMETER Experiment Name: Zm_4deg_Cold_P Parameter: Timepoint (hr) Value: 6
  misc_feature: MA Experiment 108534 PARAMETER Experiment Name: Zm_4deg_Cold_P Parameter: Tissue Value: Aerial
  misc_feature: MA Experiment ID: 108535 Result: Down-regulated in Transcription
  misc_feature: MA Experiment 108535 PARAMETER Experiment Name: Zm_Meristem_P Parameter: Age (day) Value: 8
  misc_feature: MA Experiment 108535 PARAMETER Experiment Name: Zm_Meristem_P Parameter: Organism Value: Zea mays
  misc_feature: MA Experiment 108535 PARAMETER Experiment Name: Zm_Meristem_P Parameter: Plant Line Value: 35A19
  misc_feature: MA Experiment 108535 PARAMETER Experiment Name: Zm_Meristem_P Parameter: Tissue Value: Root Meristem vs. Above Root Meristem
  misc_feature: MA Experiment ID: 108543 Result: Up-regulated in Transcription
  misc_feature: MA Experiment ID: 108544 Result: Up-regulated in Transcription
  misc_feature: MA Experiment ID: 108547 Result: Up-regulated in Transcription
  misc_feature: MA Experiment 108547 PARAMETER Experiment Name: Zm_Imbibed_Seeds_P Parameter: Age (day) Value: 4 vs. 2
  misc_feature: MA Experiment 108547 PARAMETER Experiment Name: Zm_Imbibed_Seeds_P Parameter: Organism Value: Zea mays
  misc_feature: MA Experiment 108547 PARAMETER Experiment Name: Zm_Imbibed_Seeds_P Parameter: Plant Line Value: 35A19
  misc_feature: MA Experiment 108547 PARAMETER Experiment Name: Zm_Imbibed_Seeds_P Parameter: Tissue Value: Aerial vs. Embryo
  misc_feature: MA Experiment ID: 108688 Result: Down-regulated in Transcription
  misc_feature: MA Experiment 108688 PARAMETER Experiment Name: Zm_Embryos-Flowers__P Parameter: Tissue Value: Immature Flowers vs. Aerial+
  misc_feature: MA Experiment ID: 20000477 Result: Up-regulated in Transcription
  misc_feature: MA Experiment 20000477 PARAMETER Experiment Name: Zm_5mM_SA_P Parameter: Age (day) Value: 10
  misc_feature: MA Experiment 20000477 PARAMETER Experiment Name: Zm_5mM_SA_P Parameter: Organism Value: Zea mays
  misc_feature: MA Experiment 20000477 PARAMETER Experiment Name: Zm_5mM_SA_P Parameter: Plant Line Value: 35A19
  misc_feature: MA Experiment 20000477 PARAMETER Experiment Name: Zm_5mM_SA_P Parameter: Timepoint (hr) Value: 48
  misc_feature: MA Experiment 20000477 PARAMETER Experiment Name: Zm_5mM_SA_P Parameter: Tissue Value: Aerial
  misc_feature: MA Experiment 20000477 PARAMETER Experiment Name: Zm_5mM_SA_P Parameter: Treatment Value: 5mM SA vs. No Treatment
  misc_feature: MA Experiment ID: 20000488 Result: Down-regulated in Transcription
  misc_feature: MA Experiment 20000488 PARAMETER Experiment Name: Zm_50mM_NH4NO3_L_to_H_P Parameter: Organism Value: Zea mays
  misc_feature: MA Experiment 20000488 PARAMETER Experiment Name: Zm_50mM_NH4NO3_L_to_H_P Parameter: Timepoint (hr) Value: 8
  misc_feature: MA Experiment 20000488 PARAMETER Experiment Name: Zm_50mM_NH4NO3_L_to_H_P Parameter: Tissue Value: Leaves
  misc_feature: MA Experiment 20000488 PARAMETER Experiment Name: Zm_50mM_NH4NO3_L_to_H_P Parameter: Treatment Value: 50mM NH4NO3 vs. 100mM Mannitol
  misc_feature: MA Experiment ID: 20000492 Result: Down-regulated in Transcription
  misc_feature: MA Experiment 20000492 PARAMETER Experiment Name: Zm_Hybrid_Seed_Dev_P Parameter: DAP Value: 12
  misc_feature: MA Experiment 20000492 PARAMETER Experiment Name: Zm_Hybrid_Seed_Dev_P Parameter: Organism Value: Zea mays
  misc_feature: MA Experiment 20000492 PARAMETER Experiment Name: Zm_Hybrid_Seed_Dev_P Parameter: Plant Line Value: 35A19
  misc_feature: MA Experiment 20000492 PARAMETER Experiment Name: Zm_Hybrid_Seed_Dev_P Parameter: Tissue Value: Fert Kernel vs. Unfert Floret
gcacgagaccattacctagaacatcctaatcaaaaaacggggccgccggccggactcttctgacttggcaaccgccgcgcagcgcgacgagcgccacctgcttgctgccgcgtgcctgcgtgcgtgtgcgtccaccactgaccccgcgcccgcccgccgcccctgcccctccactccacttgctcactcgtcggctcgtcgcggcccgcttcccccccggccaagggatggacgcgcttcgcctacggccgtccctcctccccgtgcggcccggcgcggcccgcccgcgagatcattttctaccaccatgttgttccatacaacgaaatggtgaaggacgaatttgcttttctagccaaaggacccaaggtcctaccttgcatcaccatcagaaattcttcgaatggaaatcctcctattgtaggatatcacatcggtcattaaatacttctgttaatgcttcggggcaacagctgcagtctgaacctgaaacacatgattctacaaccatctggagggcaatatcatcttctctagatgcattttacagattttcccggccacatactgtcataggaacagcattaagcatagtctcagtttcccttctagctgtccagagcttgtctgatatatcacctttgttcctcactggtttgctggaggcagtggtagctgcccttttcatgaatatctatattgttggactgaaccagttattcgacattgagatagacaaggttaacaagccaactcttccattggcatctggggaatacacccttgcaactggggttgcaatagtttcggtctttgccgctatgagctttggccttggatgggctgttggatcacaacctctgttttgggctcttttcataagctttgttcttgggactgcatattcaatcaatctgccgtaccttcgatggaagagatttgctgttgttgcagcactgtgcatattagcagttcgtgcagtgattgttcagctggccttttttctccacattcagacttttgttttcaggagaccggcagtgttttctaggccattattatttgcaactggatttatgacgttcttctctgttgtaatagcactattcaaggatatacctgacatcgaaggggaccgcatattcggggatccgatccttcagcgtccggttagggcaaaagaaggtcttttggatctgcgttggcttgcttgagatggcctacagcgttgcgatactgatgggagctacctcttcctgtttgtggagcaaaacagcaaccatcgctggccattccatacttgccgcgatcctatggagctgcgcgcgatcggtggacttgacgagcaaagccgccaataacgtccttctacatgttcatctggaagctgttctacgcggagtacctgctcatccctctggtgcggtgagcgcgaggcgaggtggtggcagacggatcggcgtcggcggggcggcaaacaactccacgggagaacttgagtgccggaagtaaactcccgtttgaaagttgaagcgtgcaccaccggcaccgggcagagagagacacggtggctggatggatacggatggcccccccaataaattcccccgtgcatggtaccccacgctgcttgatgatatcccatgtgtccgggtgaccggacctgatcgtctctagagagattggttgcataacgtccaacatagcccgtaggtattgctaccactgctagtatgatactccttcctagtccttgccagcaccagtgacccaaacttggtcggctgagctcagcgctcagcagctttacgtgcatctgcgccttgacttgtgcagtgggcgtcgctagcatgaatgatgtatggtgcgtcacggcctgacggttcgtcagtctgggccgtgttttgtgtc

SEQ ID NO: 19226 - protein, 328 aa, Zea mays subsp. mays
  peptide (1)..(328): Ceres Seq. ID no. 12375694
  misc_feature (112)..(307): Pfam Name: UbiA prenyltransferase family Pfam Description: UbiA prenyltransferase family
  misc_feature (103)..(306): Homolog of NCBI NO: 23125851 NR Description: hypothetical protein [Nostoc punctiforme]
  misc_feature (121)..(229): Homolog of NCBI NO: 7485781 NR Description: hypothetical protein F19F24.15 - Arabidopsis
  misc_feature (84)..(307): Homolog of NCBI NO: 33391144 NR Description: homogentisic acid geranylgeranyl transferase
  misc_feature (93)..(260): Homolog of NCBI NO: 23039416 NR Description: hypothetical protein [Trichodesmium erythraeum
  misc_feature (102)..(327): Homolog of NCBI NO: 37519852 NR Description: unknown protein [Gloeobacter violaceus]
  misc_feature (101)..(306): Homolog of NCBI NO: 16330366 NR Description: unknown protein [Synechocystis sp. PCC 6803]
  misc_feature (76)..(306): Homolog of NCBI NO: 17230940 NR Description: hypothetical protein [Nostoc sp. PCC 7120]
  misc_feature (99)..(307): Homolog of NCBI NO: 33391138 NR Description: homogentisic acid geranylgeranyl transferase
  misc_feature (95)..(307): Homolog of NCBI NO: 33391142 NR Description: homogentisic acid geranylgeranyl transferase
  misc_feature (69)..(307): Homolog of NCBI NO: 30680535 NR Description: tocopherol polyprenyltransferase (homogentisate
MDALRLRPSLLPVRPGAARPRDHFLPPCCSIQRNGEGRICFSSQRTQGPTLHHHQKFFEWKSSYCRISHRSLNTSVNASGQQLQSEPETHDSTTIWRAISSSLDAFYRFSRPHTVIGTALSIVSVSLLAVQSLSDISPLFLTGLLEAVVAALFMNIYIVGLNQLFDIEIDKVNKPTLPLASGEYTLATGVAIVSVFAAMSFGLGWAVGSQPLFWALFISFVLGTAYSINLPYLRWKRFAVVAALCILAVRAVIVQLAFFLHIQTFVFRRPAVFSRPLLFATGFMTFFSVVIALFKDIPDIEGDRIFGDPILQRPVRAKEGLLDLRWLA

SEQ ID NO: 19227 - protein, 175 aa, Zea mays subsp. mays
  peptide (1)..(175): Ceres Seq. ID no. 12375695
  misc_feature (1)..(154): Pfam Name: UbiA prenyltransferase family Pfam Description: UbiA prenyltransferase family
  misc_feature (1)..(107): Homolog of NCBI NO: 23039416 NR Description: hypothetical protein [Trichodesmium erythraeum
  misc_feature (1)..(153): Homolog of NCBI NO: 17230940 NR Description: hypothetical protein [Nostoc sp. PCC 7120]
  misc_feature (1)..(174): Homolog of NCBI NO: 37519852 NR Description: unknown protein [Gloeobacter violaceus]
  misc_feature (1)..(153): Homolog of NCBI NO: 16330366 NR Description: unknown protein [Synechocystis sp. PCC 6803]
  misc_feature (1)..(153): Homolog of NCBI NO: 23125851 NR Description: hypothetical protein [Nostoc punctiforme]
  misc_feature (1)..(76): Homolog of NCBI NO: 7485781 NR Description: hypothetical protein F19F24.15 - Arabidopsis
  misc_feature (1)..(154): Homolog of NCBI NO: 33391144 NR Description: homogentisic acid geranylgeranyl transferase
  misc_feature (1)..(154): Homolog of NCBI NO: 33391138 NR Description: homogentisic acid geranylgeranyl transferase
  misc_feature (1)..(154): Homolog of NCBI NO: 33391142 NR Description: homogentisic acid geranylgeranyl transferase
  misc_feature (1)..(154): Homolog of NCBI NO: 30680535 NR Description: tocopherol polyprenyltransferase (homogentisate
MNIYIVGLNQLFDIEIDKVNKPTLPLASGEYTLATGVAIVSVFAAMSFGLGWAVGSQPLFWALFISFVLGTAYSINLPYLRWKRFAVVAALCILAVRAVIVQLAFFLHIQTFVFRRPAVFSRPLLFATGFMTFFSVVIALFKDIPDIEGDRIFGDPILQRPVRAKEGLLDLRWLA

SEQ ID NO: 19228 - DNA, 961 bp, Zea mays subsp. mays
  misc_feature (1)..(961): Ceres Seq. ID no. 12420159
  misc_feature: MA Experiment ID: 108503 Result: Up-regulated in Transcription
  misc_feature: MA Experiment 108503 PARAMETER Experiment Name: Zm_Drought_P Parameter: Age (day) Value: 8
  misc_feature: MA Experiment 108503 PARAMETER Experiment Name: Zm_Drought_P Parameter: Organism Value: Zea mays
  misc_feature: MA Experiment 108503 PARAMETER Experiment Name: Zm_Drought_P Parameter: Plant Line Value: 35A19
  misc_feature: MA Experiment 108503 PARAMETER Experiment Name: Zm_Drought_P Parameter: Timepoint (hr) Value: 6
  misc_feature: MA Experiment 108503 PARAMETER Experiment Name: Zm_Drought_P Parameter: Tissue Value: Aerial
  misc_feature: MA Experiment 108503 PARAMETER Experiment Name: Zm_Drought_P Parameter: Treatment Value: Drought vs. No Drought
  misc_feature: MA Experiment ID: 108504 Result: Up-regulated in Transcription
  misc_feature: MA Experiment 108504 PARAMETER Experiment Name: Zm_Drought_P Parameter: Age (day) Value: 8
  misc_feature: MA Experiment 108504 PARAMETER Experiment Name: Zm_Drought_P Parameter: Organism Value: Zea mays
  misc_feature: MA Experiment 108504 PARAMETER Experiment Name: Zm_Drought_P Parameter: Plant Line Value: 35A19
  misc_feature: MA Experiment 108504 PARAMETER Experiment Name: Zm_Drought_P Parameter: Timepoint (hr) Value: 12
  misc_feature: MA Experiment 108504 PARAMETER Experiment Name: Zm_Drought_P Parameter: Tissue Value: Aerial
  misc_feature: MA Experiment 108504 PARAMETER Experiment Name: Zm_Drought_P Parameter: Treatment Value: Drought vs. No Drought
  misc_feature: MA Experiment ID: 108527 Result: Up-regulated in Transcription
  misc_feature: MA Experiment 108527 PARAMETER Experiment Name: Zm_5mM_NO_P Parameter: Age (day) Value: 8
  misc_feature: MA Experiment 108527 PARAMETER Experiment Name: Zm_5mM_NO_P Parameter: Organism Value: Zea mays
  misc_feature: MA Experiment 108527 PARAMETER Experiment Name: Zm_5mM_NO_P Parameter: Plant Line Value: 35A19
  misc_feature: MA Experiment 108527 PARAMETER Experiment Name: Zm_5mM_NO_P Parameter: Timepoint (hr) Value: 6
  misc_feature: MA Experiment 108527 PARAMETER Experiment Name: Zm_5mM_NO_P Parameter: Tissue Value: Aerial
  misc_feature: MA Experiment 108527 PARAMETER Experiment Name: Zm_5mM_NO_P Parameter: Treatment Value: 5mM NO vs. No Treatment
  misc_feature: MA Experiment ID: 108528 Result: Down-regulated in Transcription
  misc_feature: MA Experiment 108528 PARAMETER Experiment Name: Zm_Imbibed_Seeds_P Parameter: Age (day) Value: 5 vs. 2
  misc_feature: MA Experiment 108528 PARAMETER Experiment Name: Zm_Imbibed_Seeds_P Parameter: Organism Value: Zea mays
  misc_feature: MA Experiment 108528 PARAMETER Experiment Name: Zm_Imbibed_Seeds_P Parameter: Plant Line Value: 35A19
  misc_feature: MA Experiment 108528 PARAMETER Experiment Name: Zm_Imbibed_Seeds_P Parameter: Tissue Value: Aerial vs. Embryo
  misc_feature: MA Experiment ID: 108533 Result: Up-regulated in Transcription
  misc_feature: MA Experiment 108533 PARAMETER Experiment Name: Zm_4deg_Cold_P Parameter: Age (hr) Value: 8
  misc_feature: MA Experiment 108533 PARAMETER Experiment Name: Zm_4deg_Cold_P Parameter: Organism Value: Zea mays
  misc_feature: MA Experiment 108533 PARAMETER Experiment Name: Zm_4deg_Cold_P Parameter: Plant Line Value: 35A19
  misc_feature: MA Experiment 108533 PARAMETER Experiment Name: Zm_4deg_Cold_P Parameter: Temperature (deg C) Value: 4 vs. 22
  misc_feature: MA Experiment 108533 PARAMETER Experiment Name: Zm_4deg_Cold_P Parameter: Timepoint (hr) Value: 1
  misc_feature: MA Experiment 108533 PARAMETER Experiment Name: Zm_4deg_Cold_P Parameter: Tissue Value: Aerial
  misc_feature: MA Experiment ID: 108534 Result: Up-regulated in Transcription
  misc_feature: MA Experiment 108534 PARAMETER Experiment Name: Zm_4deg_Cold_P Parameter: Age (hr) Value: 8
  misc_feature: MA Experiment 108534 PARAMETER Experiment Name: Zm_4deg_Cold_P Parameter: Organism Value: Zea mays
  misc_feature: MA Experiment 108534 PARAMETER Experiment Name: Zm_4deg_Cold_P Parameter: Plant Line Value: 35A19
  misc_feature: MA Experiment 108534 PARAMETER Experiment Name: Zm_4deg_Cold_P Parameter: Temperature (deg C) Value: 4 vs. 22
  misc_feature: MA Experiment 108534 PARAMETER Experiment Name: Zm_4deg_Cold_P Parameter: Timepoint (hr) Value: 6
  misc_feature: MA Experiment 108534 PARAMETER Experiment Name: Zm_4deg_Cold_P Parameter: Tissue Value: Aerial
  misc_feature: MA Experiment ID: 108535 Result: Down-regulated in Transcription
  misc_feature: MA Experiment 108535 PARAMETER Experiment Name: Zm_Meristem_P Parameter: Age (day) Value: 8
  misc_feature: MA Experiment 108535 PARAMETER Experiment Name: Zm_Meristem_P Parameter: Organism Value: Zea mays
  misc_feature: MA Experiment 108535 PARAMETER Experiment Name: Zm_Meristem_P Parameter: Plant Line Value: 35A19
  misc_feature: MA Experiment 108535 PARAMETER Experiment Name: Zm_Meristem_P Parameter: Tissue Value: Root Meristem vs. Above Root Meristem
  misc_feature: MA Experiment ID: 108539 Result: Up-regulated in Transcription
  misc_feature: MA Experiment 108539 PARAMETER Experiment Name: Zm_20percent_PEG_P Parameter: Age (day) Value: 8
  misc_feature: MA Experiment 108539 PARAMETER Experiment Name: Zm_20percent_PEG_P Parameter: Organism Value: Zea mays
  misc_feature: MA Experiment 108539 PARAMETER Experiment Name: Zm_20percent_PEG_P Parameter: Plant Line Value: 35A19
  misc_feature: MA Experiment 108539 PARAMETER Experiment Name: Zm_20percent_PEG_P Parameter: Timepoint (hr) Value: 1
  misc_feature: MA Experiment 108539 PARAMETER Experiment Name: Zm_20percent_PEG_P Parameter: Tissue Value: Aerial
  misc_feature: MA Experiment 108539 PARAMETER Experiment Name: Zm_20percent_PEG_P Parameter: Treatment Value: 20percent PEG vs. No Treatment
  misc_feature: MA Experiment ID: 108544 Result: Up-regulated in Transcription
  misc_feature: MA Experiment ID: 108545 Result: Down-regulated in Transcription
  misc_feature: MA Experiment 108545 PARAMETER Experiment Name: Zm_Imbibed_Seeds_P Parameter: Age (day) Value: 3 vs. 2
  misc_feature: MA Experiment 108545 PARAMETER Experiment Name: Zm_Imbibed_Seeds_P Parameter: Organism Value: Zea mays
  misc_feature: MA Experiment 108545 PARAMETER Experiment Name: Zm_Imbibed_Seeds_P Parameter: Plant Line Value: 35A19
  misc_feature: MA Experiment 108545 PARAMETER Experiment Name: Zm_Imbibed_Seeds_P Parameter: Tissue Value: Aerial vs. Embryo
  misc_feature: MA Experiment ID: 108556 Result: Up-regulated in Transcription
  misc_feature: MA Experiment 108556 PARAMETER Experiment Name: Zm_Drought_P Parameter: Age (day) Value: 9
  misc_feature: MA Experiment 108556 PARAMETER Experiment Name: Zm_Drought_P Parameter: Organism Value: Zea mays
  misc_feature: MA Experiment 108556 PARAMETER Experiment Name: Zm_Drought_P Parameter: Plant Line Value: 35A19
  misc_feature: MA Experiment 108556 PARAMETER Experiment Name: Zm_Drought_P Parameter: Timepoint (hr) Value: 24
  misc_feature: MA Experiment 108556 PARAMETER Experiment Name: Zm_Drought_P Parameter: Tissue Value: Aerial
  misc_feature: MA Experiment 108556 PARAMETER Experiment Name: Zm_Drought_P Parameter: Treatment Value: Drought vs. No Drought
  misc_feature: MA Experiment ID: 108688 Result: Down-regulated in Transcription
  misc_feature: MA Experiment 108688 PARAMETER Experiment Name: Zm_Embryos-Flowers__P Parameter: Tissue Value: Immature Flowers vs. Aerial+
  misc_feature: MA Experiment ID: 20000108 Result: Down-regulated in Transcription
  misc_feature: MA Experiment 20000108 PARAMETER Experiment Name: Zm_Root-Tips_P Parameter: Age (day) Value: 12
  misc_feature: MA Experiment 20000108 PARAMETER Experiment Name: Zm_Root-Tips_P Parameter: Organism Value: Zea mays
  misc_feature: MA Experiment 20000108 PARAMETER Experiment Name: Zm_Root-Tips_P Parameter: Tissue Value: Root tips vs. Root mid region    35
  misc_feature: MA Experiment 20000108 PARAMETER Experiment Name: Zm_Root-Tips_P Parameter: Tissue Value: Root tips vs. Root mid region   Sequence Listing-Misc Features (4)
  misc_feature: MA Experiment ID: 20000479 Result: Up-regulated in Transcription
  misc_feature: MA Experiment 20000479 PARAMETER Experiment Name: Zm_Drought_P Parameter: Age (day) Value: 10
  misc_feature: MA Experiment 20000479 PARAMETER Experiment Name: Zm_Drought_P Parameter: Organism Value: Zea mays
  misc_feature: MA Experiment 20000479 PARAMETER Experiment Name: Zm_Drought_P Parameter: Plant Line Value: 35A19
  misc_feature: MA Experiment 20000479 PARAMETER Experiment Name: Zm_Drought_P Parameter: Timepoint (hr) Value: 48
  misc_feature: MA Experiment 20000479 PARAMETER Experiment Name: Zm_Drought_P Parameter: Tissue Value: Aerial
  misc_feature: MA Experiment 20000479 PARAMETER Experiment Name: Zm_Drought_P Parameter: Treatment Value: Drought vs. No Drought
  misc_feature: MA Experiment ID: 20000532 Result: Up-regulated in Transcription
  misc_feature: MA Experiment 20000532 PARAMETER Experiment Name: Zm_0.001percent_MeJA_P Parameter: Age (day) Value: 10
  misc_feature: MA Experiment 20000532 PARAMETER Experiment Name: Zm_0.001percent_MeJA_P Parameter: Organism Value: Zea mays
  misc_feature: MA Experiment 20000532 PARAMETER Experiment Name: Zm_0.001percent_MeJA_P Parameter: Plant Line Value: 35A19
  misc_feature: MA Experiment 20000532 PARAMETER Experiment Name: Zm_0.001percent_MeJA_P Parameter: Timepoint (hr) Value: 48
  misc_feature: MA Experiment 20000532 PARAMETER Experiment Name: Zm_0.001percent_MeJA_P Parameter: Tissue Value: Aerial
  misc_feature: MA Experiment 20000532 PARAMETER Experiment Name: Zm_0.001percent_MeJA_P Parameter: Treatment Value: 0.001percent MeJA vs. No Treatment
  misc_feature: MA Experiment ID: 20000626 Result: Down-regulated in Transcription
  misc_feature: MA Experiment 20000626 PARAMETER Experiment Name: Zm_Herbicide-Treatments_P Parameter: Timepoint (hr) Value: 12
  misc_feature: MA Experiment 20000626 PARAMETER Experiment Name: Zm_Herbicide-Treatments_P Parameter: Tissue Value: Aerial
  misc_feature: MA Experiment 20000626 PARAMETER Experiment Name: Zm_Herbicide-Treatments_P Parameter: Treatment Value: Roundup vs. No Treatment
  misc_feature: MA Experiment ID: 20000629 Result: Down-regulated in Transcription
  misc_feature: MA Experiment 20000629 PARAMETER Experiment Name: Zm_Herbicide-Treatments_P Parameter: Timepoint (hr) Value: 12
  misc_feature: MA Experiment 20000629 PARAMETER Experiment Name: Zm_Herbicide-Treatments_P Parameter: Tissue Value: Aerial
  misc_feature: MA Experiment 20000629 PARAMETER Experiment Name: Zm_Herbicide-Treatments_P Parameter: Treatment Value: Trimec vs. No Treatment
  misc_feature: MA Experiment ID: 20000630 Result: Up-regulated in Transcription
  misc_feature: MA Experiment 20000630 PARAMETER Experiment Name: Zm_Herbicide-Treatments_P Parameter: Timepoint (hr) Value: 4
  misc_feature: MA Experiment 20000630 PARAMETER Experiment Name: Zm_Herbicide-Treatments_P Parameter: Tissue Value: Aerial
  misc_feature: MA Experiment 20000630 PARAMETER Experiment Name: Zm_Herbicide-Treatments_P Parameter: Treatment Value: Roundup vs. No Treatment
attctcgtaagctgaccgtccgtccctgcaatgcaccaggcggaggcggaggcggaggcggtgctctgccagccggcgagcgagttcctgccggtgatgcaggaggtgtacgcggcgctggtggccaaggtggagcgcgccatcccgggcgccaaggtggaggacaacaagttctgcctgtcggtccacttccgttgcgtggaggaggcgtgctgggccgcgctcttcgagcaggtccgcgccgtgctgagggaccacccgggcctgcgcctcaccccagggccgcaaggtgctggaggtccgccccatgatccgctgggacaagggcaaggcgctggagttcctgctccacgccctcggcttcgccgccgacgccgaccgcgacgacgtcttccccatctacgtcggcgacgaccgcaccgacgaggacgccttcagggtgctgcgcgcgcgcgggcacggcgccgggatcctcgtgtccaggttccccaaggacaccagcgcgtccttcacgctacgcgaccccgccgaggtcaaggagttcctgcgcaagctcgtcggcgccaacgacgacagctgatgatccggcccgcgattcgtttccctttcccgccgtgaccagctccgatccgcctgtgtcaagccgctaactcaacctcggctacctacctgctgcaccggcagagggcttccttgttgttgcaactgcatctccatcgagcagcttgctttgggacaagaacagacctagctagtagtacagtagagcccttttgtatcttcgttttttttttggtttccatctctcttgttcatcatgcatgcctgctgttgtttaccatttgcctcggctgaaaaggcttgtattttcggcgcccttcccgcgaggcactgtaactagttgctttgtctgctgtacgtacgcgtaccatgttgaaataatatgtcatgttgaggagcc

SEQ ID NO: 19229 - protein, 195 aa, Zea mays subsp. mays
  peptide (1)..(195): Ceres Seq. ID no. 12420160
  misc_feature (7)..(84): Pfam Name: Trehalose-phosphatase Pfam Description: Trehalose-phosphatase
  misc_feature (9)..(84): Homolog of NCBI NO: 18399940 NR Description: trehalose-phosphatase, putative
  misc_feature (9)..(84): Homolog of NCBI NO: 25354595 NR Description: trehalose-phosphatase (EC 3.1.3.12) B
  misc_feature (9)..(84): Homolog of NCBI NO: 15218205 NR Description: trehalose-6-phosphate phosphatase (AtTPPB)
  misc_feature (9)..(84): Homolog of NCBI NO: 11282598 NR Description: trehalose-6-phosphate phosphatase-like protein -
  misc_feature (5)..(84): Homolog of NCBI NO: 15219843 NR Description: trehalose-6-phosphate phosphatase, putative
  misc_feature (10)..(84): Homolog of NCBI NO: 15238360 NR Description: trehalose-6-phosphate phosphatase; protein id:
  misc_feature (2)..(84): Homolog of NCBI NO: 33146623 NR Description: putative trehalose-6-phosphate phosphatase
  misc_feature (7)..(84): Homolog of NCBI NO: 15227161 NR Description: putative trehalose-6-phosphate phosphatase
  misc_feature (9)..(84): Homolog of NCBI NO: 30683008 NR Description: trehalose-6-phosphate phosphatase, putative
  misc_feature (7)..(84): Homolog of NCBI NO: 30692524 NR Description: trehalose-6-phosphate phosphatase, putative
MHQAEAEAEAVLCQPASEFLPVMQEVYAALVAKVERAIPGAKVEDNKFCLSVHFRCVEEACWAALFEQVRAVLRDHPGLRLTPGPQGAGGPPHDPLGQGQGAGVPAPRPRLRRRRRPRRRLPHLRRRRPHRRGRLQGAARARARRRDPRVQVPQGHQRVLHATRPRRGQGVPAQARRRQRRQLMIRPAIRFPFPP

SEQ ID NO: 19230 - protein, 173 aa, Zea mays subsp. mays
  peptide (1)..(173): Ceres Seq. ID no. 12420161
  misc_feature (1)..(62): Pfam Name: Trehalose-phosphatase Pfam Description: Trehalose-phosphatase
  misc_feature (1)..(62): Homolog of NCBI NO: 18399940 NR Description: trehalose-phosphatase, putative
  misc_feature (1)..(62): Homolog of NCBI NO: 25354595 NR Description: trehalose-phosphatase (EC 3.1.3.12) B
  misc_feature (1)..(62): Homolog of NCBI NO: 15218205 NR Description: trehalose-6-phosphate phosphatase (AtTPPB)
  misc_feature (1)..(62): Homolog of NCBI NO: 11282598 NR Description: trehalose-6-phosphate phosphatase-like protein -
  misc_feature (1)..(62): Homolog of NCBI NO: 15219843 NR Description: trehalose-6-phosphate phosphatase, putative
  misc_feature (1)..(62): Homolog of NCBI NO: 15238360 NR Description: trehalose-6-phosphate phosphatase; protein id:
  misc_feature (1)..(62): Homolog of NCBI NO: 33146623 NR Description: putative trehalose-6-phosphate phosphatase
  misc_feature (1)..(62): Homolog of NCBI NO: 15227161 NR Description: putative trehalose-6-phosphate phosphatase
  misc_feature (1)..(62): Homolog of NCBI NO: 30683008 NR Description: trehalose-6-phosphate phosphatase, putative
  misc_feature (1)..(62): Homolog of NCBI NO: 30692524 NR Description: trehalose-6-phosphate phosphatase, putative
MQEVYAALVAKVERAIPGAKVEDNKFCLSVHFRCVEEACWAALFEQVRAVLRDHPGLRLTPGPQGAGGPPHDPLGQGQGAGVPAPRPRLRRRRRPRRRLPHLRRRRPHRRGRLQGAARARARRRDPRVQVPQGHQRVLHATRPRRGQGVPAQARRRQRRQLMIRPAIRFPFPP

SEQ ID NO: 19231 - protein, 102 aa, Zea mays subsp. mays
  peptide (1)..(102): Ceres Seq. ID no. 12420162
  misc_feature (35)..(88): Pfam Name: Collagen triple helix repeat (20 copies) Pfam Description: Collagen triple helix repeat (20 copies)
  misc_feature (78)..(102): Homolog of NCBI NO: 23017082 NR Description: hypothetical protein [Thermobifida fusca]
  misc_feature (82)..(102): Homolog of NCBI NO: 13592175 NR Description: ppg3 [Leishmania major]
  misc_feature (82)..(102): Homolog of NCBI NO: 13592175 NR Description: ppg3 [Leishmania major]
  misc_feature (82)..(102): Homolog of NCBI NO: 13592175 NR Description: ppg3 [Leishmania major]
  misc_feature (86)..(102): Homolog of NCBI NO: 17384258 NR Description: mucin 5 [Homo sapiens]
  misc_feature (77)..(102): Homolog of NCBI NO: 27375632 NR Description: blr0521 [Bradyrhizobium japonicum]
  misc_feature (77)..(102): Homolog of NCBI NO: 11359723 NR Description: proteophosphoglycan, membrane-associated
  misc_feature (77)..(102): Homolog of NCBI NO: 5420387 NR Description: proteophosphoglycan [Leishmania major]
  misc_feature (82)..(102): Homolog of NCBI NO: 11359723 NR Description: proteophosphoglycan, membrane-associated
  misc_feature (77)..(102): Homolog of NCBI NO: 1082604 NR Description: mucin 5AC (clone JER58) - human (fragment)
SRKLTVRPCNAPGGGGGGGGALPAGERVPAGDAGGVRGAGGQGGARHPGRQGGGQQVLPVGPLPLRGGGVLGRALRAGPRRAEGPPGPAPHPRAARCWRSAP

SEQ ID NO: 19232 - DNA, 1375 bp, Zea mays subsp. mays
  misc_feature (1)..(1375): Ceres Seq. ID no. 12419315
  misc_feature: MA Experiment ID: 108528 Result: Up-regulated in Transcription
  misc_feature: MA Experiment 108528 PARAMETER Experiment Name: Zm_Imbibed_Seeds_P Parameter: Age (day) Value: 5 vs. 2
  misc_feature: MA Experiment 108528 PARAMETER Experiment Name: Zm_Imbibed_Seeds_P Parameter: Organism Value: Zea mays
  misc_feature: MA Experiment 108528 PARAMETER Experiment Name: Zm_Imbibed_Seeds_P Parameter: Plant Line Value: 35A19
  misc_feature: MA Experiment 108528 PARAMETER Experiment Name: Zm_Imbibed_Seeds_P Parameter: Tissue Value: Aerial vs. Embryo
  misc_feature: MA Experiment ID: 108547 Result: Up-regulated in Transcription
  misc_feature: MA Experiment 108547 PARAMETER Experiment Name: Zm_Imbibed_Seeds_P Parameter: Age (day) Value: 4 vs. 2
  misc_feature: MA Experiment 108547 PARAMETER Experiment Name: Zm_Imbibed_Seeds_P Parameter: Organism Value: Zea mays
  misc_feature: MA Experiment 108547 PARAMETER Experiment Name: Zm_Imbibed_Seeds_P Parameter: Plant Line Value: 35A19
  misc_feature: MA Experiment 108547 PARAMETER Experiment Name: Zm_Imbibed_Seeds_P Parameter: Tissue Value: Aerial vs. Embryo
  misc_feature: MA Experiment ID: 20000108 Result: Down-regulated in Transcription
  misc_feature: MA Experiment 20000108 PARAMETER Experiment Name: Zm_Root-Tips_P Parameter: Age (day) Value: 12
  misc_feature: MA Experiment 20000108 PARAMETER Experiment Name: Zm_Root-Tips_P Parameter: Organism Value: Zea mays
  misc_feature: MA Experiment 20000108 PARAMETER Experiment Name: Zm_Root-Tips_P Parameter: Tissue Value: Root tips vs. Root mid region    35
  misc_feature: MA Experiment 20000108 PARAMETER Experiment Name: Zm_Root-Tips_P Parameter: Tissue Value: Root tips vs. Root mid region   Sequence Listing-Misc Features (4)
  misc_feature: MA Experiment ID: 20000477 Result: Down-regulated in Transcription
  misc_feature: MA Experiment 20000477 PARAMETER Experiment Name: Zm_5mM_SA_P Parameter: Age (day) Value: 10
  misc_feature: MA Experiment 20000477 PARAMETER Experiment Name: Zm_5mM_SA_P Parameter: Organism Value: Zea mays
  misc_feature: MA Experiment 20000477 PARAMETER Experiment Name: Zm_5mM_SA_P Parameter: Plant Line Value: 35A19
  misc_feature: MA Experiment 20000477 PARAMETER Experiment Name: Zm_5mM_SA_P Parameter: Timepoint (hr) Value: 48
  misc_feature: MA Experiment 20000477 PARAMETER Experiment Name: Zm_5mM_SA_P Parameter: Tissue Value: Aerial
  misc_feature: MA Experiment 20000477 PARAMETER Experiment Name: Zm_5mM_SA_P Parameter: Treatment Value: 5mM SA vs. No Treatment
  misc_feature: MA Experiment ID: 20000480 Result: Down-regulated in Transcription
  misc_feature: MA Experiment 20000480 PARAMETER Experiment Name: Zm_Drought_P Parameter: Age (day) Value: 11
  misc_feature: MA Experiment 20000480 PARAMETER Experiment Name: Zm_Drought_P Parameter: Organism Value: Zea mays
  misc_feature: MA Experiment 20000480 PARAMETER Experiment Name: Zm_Drought_P Parameter: Plant Line Value: 35A19
  misc_feature: MA Experiment 20000480 PARAMETER Experiment Name: Zm_Drought_P Parameter: Timepoint (hr) Value: 72
  misc_feature: MA Experiment 20000480 PARAMETER Experiment Name: Zm_Drought_P Parameter: Tissue Value: Aerial
  misc_feature: MA Experiment 20000480 PARAMETER Experiment Name: Zm_Drought_P Parameter: Treatment Value: Drought vs. No Drought
aacagcgagctgcagccacgcgcgccggcgaccaaacaaagccagctaggcaccggcaagggagcggacggagcaagcgcgcggccgatcgatcgagcttcagcttgagctccagcaagatggtgaacttcatcgaggcgcagaagccgctgctgtcacggttgatgaagatggccgggctccgccccattgagatggagctggagccgggcacgaccatgcacgtgtgggcgcccaagcaccacgtgggcaagaagggcaccaccatcagcccgctcgagcctaccgccgccaagaagaagaagaagaataggaagagccccgagtcgaggcccaacgtggtgctcatccacggcttcgccgccgagggcaacgtgacgtggcagttcaacttcggcgtgctggtgtcgcgctacaacctgtacatcccggaccttatgttcttcggcaagtcgtcgacgtcgagcgcggaccggtccccggacttccaggccgagtgcgtggcgggggcgctggcgcggctgggcgtggcgcggtgcgacgtggtcgggttcagctacgggggcatggtggcgttcaagctggccgaggcgcggccggggctggtgcggtcgctgtgcgtgtccgggtccgtggtggccatgacggacgcggtgaacagggagaccatggagcggctgggggccgggtcgtccgccgagctgctcatgcccgacacgctcaaggggctcaaggcgctcctctccgtctccatgtacaggaagatgtggttccccgacaggttctacaaggactacctcaaggtgatgttcaccaacaggaaggagaggatggagctgttgcaggggctgataaccagcaacacggacgccaagatccctacattccaacagaaaataatgctgctgtggggcgaggaggacaagatcttcgacatcgagctcgccaggaagatgaaagagcagctgggcgacaactgcttcctgtacggcatccgcaaggccggccacctgctccacgtcgagcggccgtgcgcctacaaccgccagctccagaggtggttcgcctacgtcaactccacagaagaccacgtccaggccagatgatcgacacgccccgccccgctcctgctgccgctgctgctgctgctacatggagatcatgcatgcatatatacacgtcccgtctcagttgatattacctttgcattgttgttgttcgttattgatgttgttattagctgttgctcccaagaaagaagacgctggcagggcagccaacacactgtatgtatgtagtgtgttgcgctggccatggtttcagtacgtgtactctcgatcaagtgtagaccgacctcggtcgtacgtgtcgcctc

SEQ ID NO: 19233 - protein, 367 aa, Zea mays subsp. mays
  peptide (1)..(367): Ceres Seq. ID no. 12419316
  misc_feature (138)..(352): Pfam Name: alpha/beta hydrolase fold Pfam Description: alpha/beta hydrolase fold
  misc_feature (109)..(347): Homolog of NCBI NO: 21592821 NR Description: unknown [Arabidopsis thaliana]
  misc_feature (52)..(355): Homolog of NCBI NO: 37533664 NR Description: putative hydrolase [Oryza sativa (japonica
  misc_feature (265)..(348): Homolog of NCBI NO: 27436747 NR Description: Hypothetical protein [Oryza sativa (japonica
  misc_feature (106)..(267): Homolog of NCBI NO: 27436747 NR Description: Hypothetical protein [Oryza sativa (japonica
  misc_feature (109)..(347): Homolog of NCBI NO: 18394481 NR Description: expressed protein
  misc_feature (40)..(359): Homolog of NCBI NO: 25411863 NR Description: hypothetical protein At2g18360 [imported] -
  misc_feature (40)..(359): Homolog of NCBI NO: 18398716 NR Description: expressed protein
  misc_feature (40)..(365): Homolog of NCBI NO: 21593332 NR Description: putative hydrolase [Arabidopsis thaliana]
  misc_feature (40)..(365): Homolog of NCBI NO: 15234460 NR Description: putative protein
  misc_feature (40)..(361): Homolog of NCBI NO: 19387256 NR Description: putative hydrolase [Oryza sativa (japonica
QRAAATRAGDQTKPARHRQGSGRSKRAADRSSFSLSSSKMVNFIEAQKPLLSRLMKMAGLRPIEMELEPGTTMHVWAPKHHVGKKGTTISPLEPTAAKKKKKNRKSPESRPNVVLIHGFAAEGNVTWQFNFGVLVSRYNLYIPDLMFFGKSSTSSADRSPDFQAECVAGALARLGVARCDVVGFSYGGMVAFKLAEARPGLVRSLCVSGSVVAMTDAVNRETMERLGAGSSAELLMPDTLKGLKALLSVSMYRKMWFPDRFYKDYLKVMFTNRKERMELLQGLITSNTDAKIPTFQQKIMLLWGEEDKIFDIELARKMKEQLGDNCFLYGIRKAGHLLHVERPCAYNRQLQRWFAYVNSTEDHVQAR

SEQ ID NO: 19234 - protein, 328 aa, Zea mays subsp. mays
  peptide (1)..(328): Ceres Seq. ID no. 12419317
  misc_feature (99)..(313): Pfam Name: alpha/beta hydrolase fold Pfam Description: alpha/beta hydrolase fold
  misc_feature (70)..(308): Homolog of NCBI NO: 21592821 NR Description: unknown [Arabidopsis thaliana]
  misc_feature (13)..(316): Homolog of NCBI NO: 37533664 NR Description: putative hydrolase [Oryza sativa (japonica
  misc_feature (226)..(309): Homolog of NCBI NO: 27436747 NR Description: Hypothetical protein [Oryza sativa (japonica
  misc_feature (67)..(228): Homolog of NCBI NO: 27436747 NR Description: Hypothetical protein [Oryza sativa (japonica
  misc_feature (70)..(308): Homolog of NCBI NO: 18394481 NR Description: expressed protein
  misc_feature (1)..(320): Homolog of NCBI NO: 25411863 NR Description: hypothetical protein At2g18360 [imported] -
  misc_feature (1)..(320): Homolog of NCBI NO: 18398716 NR Description: expressed protein
  misc_feature (1)..(326): Homolog of NCBI NO: 21593332 NR Description: putative hydrolase [Arabidopsis thaliana]
  misc_feature (1)..(326): Homolog of NCBI NO: 15234460 NR Description: putative protein
  misc_feature (1)..(322): Homolog of NCBI NO: 19387256 NR Description: putative hydrolase [Oryza sativa (japonica
MVNFIEAQKPLLSRLMKMAGLRPIEMELEPGTTMHVWAPKHHVGKKGTTISPLEPTAAKKKKKNRKSPESRPNVVLIHGFAAEGNVTWQFNFGVLVSRYNLYIPDLMFFGKSSTSSADRSPDFQAECVAGALARLGVARCDVVGFSYGGMVAFKLAEARPGLVRSLCVSGSVVAMTDAVNRETMERLGAGSSAELLMPDTLKGLKALLSVSMYRKMWFPDRFYKDYLKVMFTNRKERMELLQGLITSNTDAKIPTFQQKIMLLWGEEDKIFDIELARKMKEQLGDNCFLYGIRKAGHLLHVERPCAYNRQLQRWFAYVNSTEDHVQAR

SEQ ID NO: 19235 - protein, 313 aa, Zea mays subsp. mays
  peptide (1)..(313): Ceres Seq. ID no. 12419318
  misc_feature (84)..(298): Pfam Name: alpha/beta hydrolase fold Pfam Description: alpha/beta hydrolase fold
  misc_feature (55)..(293): Homolog of NCBI NO: 21592821 NR Description: unknown [Arabidopsis thaliana]
  misc_feature (1)..(301): Homolog of NCBI NO: 37533664 NR Description: putative hydrolase [Oryza sativa (japonica
  misc_feature (211)..(294): Homolog of NCBI NO: 27436747 NR Description: Hypothetical protein [Oryza sativa (japonica
  misc_feature (52)..(213): Homolog of NCBI NO: 27436747 NR Description: Hypothetical protein [Oryza sativa (japonica
  misc_feature (55)..(293): Homolog of NCBI NO: 18394481 NR Description: expressed protein
  misc_feature (1)..(305): Homolog of NCBI NO: 25411863 NR Description: hypothetical protein At2g18360 [imported] -
  misc_feature (1)..(305): Homolog of NCBI NO: 18398716 NR Description: expressed protein
  misc_feature (1)..(311): Homolog of NCBI NO: 21593332 NR Description: putative hydrolase [Arabidopsis thaliana]
  misc_feature (1)..(311): Homolog of NCBI NO: 15234460 NR Description: putative protein
  misc_feature (1)..(307): Homolog of NCBI NO: 19387256 NR Description: putative hydrolase [Oryza sativa (japonica
MKMAGLRPIEMELEPGTTMHVWAPKHHVGKKGTTISPLEPTAAKKKKKNRKSPESRPNVVLIHGFAAEGNVTWQFNFGVLVSRYNLYIPDLMFFGKSSTSSADRSPDFQAECVAGALARLGVARCDVVGFSYGGMVAFKLAEARPGLVRSLCVSGSVVAMTDAVNRETMERLGAGSSAELLMPDTLKGLKALLSVSMYRKMWFPDRFYKDYLKVMFTNRKERMELLQGLITSNTDAKIPTFQQKIMLLWGEEDKIFDIELARKMKEQLGDNCFLYGIRKAGHLLHVERPCAYNRQLQRWFAYVNSTEDHVQAR

SEQ ID NO: 19236 - DNA, 1201 bp, Zea mays subsp. mays
  misc_feature (1)..(1201): Ceres Seq. ID no. 12419311
  misc_feature: MA Experiment ID: 108535 Result: Down-regulated in Transcription
  misc_feature: MA Experiment 108535 PARAMETER Experiment Name: Zm_Meristem_P Parameter: Age (day) Value: 8
  misc_feature: MA Experiment 108535 PARAMETER Experiment Name: Zm_Meristem_P Parameter: Organism Value: Zea mays
  misc_feature: MA Experiment 108535 PARAMETER Experiment Name: Zm_Meristem_P Parameter: Plant Line Value: 35A19
  misc_feature: MA Experiment 108535 PARAMETER Experiment Name: Zm_Meristem_P Parameter: Tissue Value: Root Meristem vs. Above Root Meristem
  misc_feature: MA Experiment ID: 108543 Result: Up-regulated in Transcription
  misc_feature: MA Experiment ID: 20000478 Result: Down-regulated in Transcription
  misc_feature: MA Experiment 20000478 PARAMETER Experiment Name: Zm_5mM_SA_P Parameter: Age (day) Value: 11
  misc_feature: MA Experiment 20000478 PARAMETER Experiment Name: Zm_5mM_SA_P Parameter: Organism Value: Zea mays
  misc_feature: MA Experiment 20000478 PARAMETER Experiment Name: Zm_5mM_SA_P Parameter: Plant Line Value: 35A19
  misc_feature: MA Experiment 20000478 PARAMETER Experiment Name: Zm_5mM_SA_P Parameter: Timepoint (hr) Value: 72
  misc_feature: MA Experiment 20000478 PARAMETER Experiment Name: Zm_5mM_SA_P Parameter: Tissue Value: Aerial
  misc_feature: MA Experiment 20000478 PARAMETER Experiment Name: Zm_5mM_SA_P Parameter: Treatment Value: 5mM SA vs. No Treatment
  misc_feature: MA Experiment ID: 20000626 Result: Down-regulated in Transcription
  misc_feature: MA Experiment 20000626 PARAMETER Experiment Name: Zm_Herbicide-Treatments_P Parameter: Timepoint (hr) Value: 12
  misc_feature: MA Experiment 20000626 PARAMETER Experiment Name: Zm_Herbicide-Treatments_P Parameter: Tissue Value: Aerial
  misc_feature: MA Experiment 20000626 PARAMETER Experiment Name: Zm_Herbicide-Treatments_P Parameter: Treatment Value: Roundup vs. No Treatment
gcacgagaccattacctagaacatcctaatctaaaaacaggatctcccactcgtctcgaagacggccgcaccgcagacgccgcgggaatttaacgagagagactggcgccgcgcctcgcggagaccgcagcctggagccagcccgtgacgctgacgcggcgggccacgggcggggcgatgccaggagccatggagccggcagaggcggacgcggcggcagccgctgttgcgggaaggcggccgacggcgtccgagcgccggcgcatgtaccgcgacctggcgctgtcgctgcggtgcggactccgcgacgcggcccgcggggttctcgttcctgcgcctgcgcggcctccgcgcgctcctccgcgcccctccgctccacctccgacgccgacgccgacgcccgacgcgggcctcttccgcgactcccagtccatccgagatctccaagtgatcccggtgctgttcgagcacagcctgcgcaaggcgaccggggacgcggtgctgacggtggcgcaggtgctgggcatggagcccgccgccgccaggctcaggaaccccgccacggactccgaggtcgtgcttgcgctcagggtgctcgaaggttgctgcctcctctgcccggcctgcgcagccgcggcgcaccgctacaatgccgtcaaggtggttttgaatatactgatgacacgtggtatcctcgagcaaagagcatgtctcgacactctcttagcgttgctggtgaattgttcaggaaacctgacggatttcaaagaacaagatggactaaataaaattgctgtcattgtaaaagatgcaaatagggatgaccatgtaaggttaaaatgttccgagtttctgcttctttactctggaaacgcaaaagaaaaatgtggcgcagattccgagtctaatatgcgagaagatttggcaaaggttttcggagaaaaatgtgcatcatttatctcctcaatgaacctattcagctcaactctagagtcacaaatgaggcaatctgagctaagctttcttgcagagcatgtgttggattacatgtagagccatactaaagataaccataatcgtgccattttctccacacacaacagagttcagtgctccaaaatgtatgtttcctattaacttgggtaattattgacgatgctactgtatatgaactcaactacgagaatgttactgttcacct

SEQ ID NO: 19237 - protein, 291 aa, Zea mays subsp. mays
  peptide (1)..(291): Ceres Seq. ID no. 12419312
  misc_feature (2)..(45): Homolog of NCBI NO: 7452470 NR Description: hypothetical protein T29A15.240 - Arabidopsis
  misc_feature (79)..(220): Homolog of NCBI NO: 7452470 NR Description: hypothetical protein T29A15.240 - Arabidopsis
  misc_feature (1)..(219): Homolog of NCBI NO: 34898066 NR Description: ESTs AU030224(E50782),AU077702(E50782) correspond a region of the predicted gene.~Similar to Arabidopsis thaliana
  misc_feature (2)..(45): Homolog of NCBI NO: 30687718 NR Description: expressed protein [Arabidopsis thaliana]
  misc_feature (79)..(289): Homolog of NCBI NO: 30687718 NR Description: expressed protein [Arabidopsis thaliana]
  misc_feature (195)..(223): Homolog of NCBI NO: 37536150 NR Description: hypothetical protein [Oryza sativa (japonica
  misc_feature (1)..(161): Homolog of NCBI NO: 37536150 NR Description: hypothetical protein [Oryza sativa (japonica
MPGAMEPAEADAAAAAVAGRRPTASERRRMYRDLALSLRCGLRDAARGVLVPAPARPPRAPPRPSAPPPTPTPTPDAGLFRDSQSIRDLQVIPVLFEHSLRKATGDAVLTVAQVLGMEPAAARLRNPATDSEVVLALRVLEGCCLLCPACAAAAHRYNAVKVVLNILMTRGILEQRACLDTLLALLVNCSGNLTDFKEQDGLNKIAVIVKDANRDDHVRLKCSEFLLLYSGNAKEKCGADSESNMREDLAKVFGEKCASFISSMNLFSSTLESQMRQSELSFLAEHVLDYM

SEQ ID NO: 19238 - protein, 287 aa, Zea mays subsp. mays
  peptide (1)..(287): Ceres Seq. ID no. 12419313
  misc_feature (1)..(157): Homolog of NCBI NO: 37536150 NR Description: hypothetical protein [Oryza sativa (japonica
  misc_feature (1)..(41): Homolog of NCBI NO: 7452470 NR Description: hypothetical protein T29A15.240 - Arabidopsis
  misc_feature (75)..(216): Homolog of NCBI NO: 7452470 NR Description: hypothetical protein T29A15.240 - Arabidopsis
  misc_feature (1)..(215): Homolog of NCBI NO: 34898066 NR Description: ESTs AU030224(E50782),AU077702(E50782) correspond a region of the predicted gene.~Similar to Arabidopsis thaliana
  misc_feature (1)..(41): Homolog of NCBI NO: 30687718 NR Description: expressed protein [Arabidopsis thaliana]
  misc_feature (75)..(285): Homolog of NCBI NO: 30687718 NR Description: expressed protein [Arabidopsis thaliana]
  misc_feature (191)..(219): Homolog of NCBI NO: 37536150 NR Description: hypothetical protein [Oryza sativa (japonica
MEPAEADAAAAAVAGRRPTASERRRMYRDLALSLRCGLRDAARGVLVPAPARPPRAPPRPSAPPPTPTPTPDAGLFRDSQSIRDLQVIPVLFEHSLRKATGDAVLTVAQVLGMEPAAARLRNPATDSEVVLALRVLEGCCLLCPACAAAAHRYNAVKVVLNILMTRGILEQRACLDTLLALLVNCSGNLTDFKEQDGLNKIAVIVKDANRDDHVRLKCSEFLLLYSGNAKEKCGADSESNMREDLAKVFGEKCASFISSMNLFSSTLESQMRQSELSFLAEHVLDYM

SEQ ID NO: 19239 - protein, 262 aa, Zea mays subsp. mays
  peptide (1)..(262): Ceres Seq. ID no. 12419314
  misc_feature (1)..(16): Homolog of NCBI NO: 7452470 NR Description: hypothetical protein T29A15.240 - Arabidopsis
  misc_feature (50)..(191): Homolog of NCBI NO: 7452470 NR Description: hypothetical protein T29A15.240 - Arabidopsis
  misc_feature (1)..(190): Homolog of NCBI NO: 34898066 NR Description: ESTs AU030224(E50782),AU077702(E50782) correspond a region of the predicted gene.~Similar to Arabidopsis thaliana
  misc_feature (1)..(16): Homolog of NCBI NO: 30687718 NR Description: expressed protein [Arabidopsis thaliana]
  misc_feature (50)..(260): Homolog of NCBI NO: 30687718 NR Description: expressed protein [Arabidopsis thaliana]
  misc_feature (166)..(194): Homolog of NCBI NO: 37536150 NR Description: hypothetical protein [Oryza sativa (japonica
  misc_feature (1)..(132): Homolog of NCBI NO: 37536150 NR Description: hypothetical protein [Oryza sativa (japonica
MYRDLALSLRCGLRDAARGVLVPAPARPPRAPPRPSAPPPTPTPTPDAGLFRDSQSIRDLQVIPVLFEHSLRKATGDAVLTVAQVLGMEPAAARLRNPATDSEVVLALRVLEGCCLLCPACAAAAHRYNAVKVVLNILMTRGILEQRACLDTLLALLVNCSGNLTDFKEQDGLNKIAVIVKDANRDDHVRLKCSEFLLLYSGNAKEKCGADSESNMREDLAKVFGEKCASFISSMNLFSSTLESQMRQSELSFLAEHVLDYM

SEQ ID NO: 19240 - DNA, 1859 bp, Zea mays subsp. mays
  misc_feature (1)..(1859): Ceres Seq. ID no. 12362446
  misc_feature: MA Experiment ID: 108529 Result: Up-regulated in Transcription
  misc_feature: MA Experiment 108529 PARAMETER Experiment Name: Zm_Imbibed_Seeds_P Parameter: Age (day) Value: 5 vs. 2
  misc_feature: MA Experiment 108529 PARAMETER Experiment Name: Zm_Imbibed_Seeds_P Parameter: Organism Value: Zea mays
  misc_feature: MA Experiment 108529 PARAMETER Experiment Name: Zm_Imbibed_Seeds_P Parameter: Plant Line Value: 35A19
  misc_feature: MA Experiment 108529 PARAMETER Experiment Name: Zm_Imbibed_Seeds_P Parameter: Tissue Value: Roots vs. Embryo
  misc_feature: MA Experiment ID: 108556 Result: Up-regulated in Transcription
  misc_feature: MA Experiment 108556 PARAMETER Experiment Name: Zm_Drought_P Parameter: Age (day) Value: 9
  misc_feature: MA Experiment 108556 PARAMETER Experiment Name: Zm_Drought_P Parameter: Organism Value: Zea mays
  misc_feature: MA Experiment 108556 PARAMETER Experiment Name: Zm_Drought_P Parameter: Plant Line Value: 35A19
  misc_feature: MA Experiment 108556 PARAMETER Experiment Name: Zm_Drought_P Parameter: Timepoint (hr) Value: 24
  misc_feature: MA Experiment 108556 PARAMETER Experiment Name: Zm_Drought_P Parameter: Tissue Value: Aerial
  misc_feature: MA Experiment 108556 PARAMETER Experiment Name: Zm_Drought_P Parameter: Treatment Value: Drought vs. No Drought
  misc_feature: MA Experiment ID: 108559 Result: Up-regulated in Transcription
  misc_feature: MA Experiment 108559 PARAMETER Experiment Name: Zm_5mM_NO_P Parameter: Age (day) Value: 8
  misc_feature: MA Experiment 108559 PARAMETER Experiment Name: Zm_5mM_NO_P Parameter: Organism Value: Zea mays
  misc_feature: MA Experiment 108559 PARAMETER Experiment Name: Zm_5mM_NO_P Parameter: Plant Line Value: 35A19
  misc_feature: MA Experiment 108559 PARAMETER Experiment Name: Zm_5mM_NO_P Parameter: Timepoint (hr) Value: 12
  misc_feature: MA Experiment 108559 PARAMETER Experiment Name: Zm_5mM_NO_P Parameter: Tissue Value: Aerial
  misc_feature: MA Experiment 108559 PARAMETER Experiment Name: Zm_5mM_NO_P Parameter: Treatment Value: 5mM NO vs. No Treatment
  misc_feature: MA Experiment ID: 108687 Result: Up-regulated in Transcription
  misc_feature: MA Experiment 108687 PARAMETER Experiment Name: Zm_Embryos-Flowers__P Parameter: Tissue Value: Embryo vs. Aerial+
  misc_feature: MA Experiment ID: 20000477 Result: Up-regulated in Transcription
  misc_feature: MA Experiment 20000477 PARAMETER Experiment Name: Zm_5mM_SA_P Parameter: Age (day) Value: 10
  misc_feature: MA Experiment 20000477 PARAMETER Experiment Name: Zm_5mM_SA_P Parameter: Organism Value: Zea mays
  misc_feature: MA Experiment 20000477 PARAMETER Experiment Name: Zm_5mM_SA_P Parameter: Plant Line Value: 35A19
  misc_feature: MA Experiment 20000477 PARAMETER Experiment Name: Zm_5mM_SA_P Parameter: Timepoint (hr) Value: 48
  misc_feature: MA Experiment 20000477 PARAMETER Experiment Name: Zm_5mM_SA_P Parameter: Tissue Value: Aerial
  misc_feature: MA Experiment 20000477 PARAMETER Experiment Name: Zm_5mM_SA_P Parameter: Treatment Value: 5mM SA vs. No Treatment
gtaaaggaaggcgaggcaatacacccaccgagagagaagaactaagctttggacacggaagatcgcaagagcctcaaccacactattcaggtggcctaggactctacgagggacgttcgtcgtgcctcggatgagatgggcggcggaggaggaggaggaggcgggaagtccgagaaggcgcggcgttcgtcggcgcgggtgaggctgtgggtcgcgcgcgccagcaccgtgctgctctggacgtgcctcgtccagctcgcggcctaccgggagctctgggcgcccagcgtgctctccaggtggcctggctgcctcaaccagccgcacgtcgcgcggaggccatcggagcgtgtggcggacgccggccagacgcaggcagcgcgcgcgttggtggtgctcccacccaaaagaatctacaggaacaacggctatctaatggtctcctgcaacggcgggcttaaccagatgcgagcagcaatttgtgatatggtaaccatcgcaaggtatcttaacgttactctcatagtaccagagttggataaggcttcattttgggctgatcccagcgatttccaagacatatttgacgtggactacttcatagcgtcgctgagagacgaggtccggatcctgaggcagctgccgccgaggctcaagagaagagtggagatgggatccctccggtccctgccaccagtcagctggtccgacatcggctactaccgccgtcagattctgcctctggtaaagaagtacaaggtcgttcacctgaacaggacggatgcccggctcgcgaacaacggcctacccgtggagatgcagagactgcggtgtccgtcaactacaatgccctgaggtttacccctgaaatcgaggatctgggcagacgcctggttcgagctcttcgccggaacgggccctttgtggtccttcacttgcggtatgagatggacatgcttgccttctccggatgcacgcacggttgcagcagcatggaggctcaagagctcacgaagatgagatatgcctacccatggtggaaggagaaagtgatcgactcggacgccaagaggaaagacgggctgtgtccgttaacgccggaggagaccgcgctggtgctgcaggcgctcggcattgaccgcggctaccagatctacattgccgcaggcgaaatttacggtgggcagagaagaatggctgcgctcacctcggcttatcccaacgtggttagaaaggagacgctgttgccttgggaagtcggcctcttccagaaccactcctcccagatggctgcgctggactacatggtgtccctggagagcgatgtcttcatacccacctacgacggcaacatggccaaggtcgtagaaggccatcgcaggtacctggggtttaggaagacggtgctgctggaccggaggcgtatcgtcgagctcgtcgacgagtacaggaacgggacgttgagctggaccgacttctcgtctgccgtcatggcgtcgcacaccagccgcatgggcgaaccgtccaggaggcagacggttcctgacagacccaaggaagaggactacttctacgcgaacccgcacgagtgcctgcaccagccggaagatgtctcggccttgtgatactgatacagtggatgatgcgcgggctttcggaatccagaaccacatgtatatgttaatagcgcattcgacaccgttgcgttggcagaggattaaacgtaaacggacgaggagggcctcgtttggtccggccggttgaacgggcatgtgagttaggtttcggtacagattcatggaacggtggttcgccgattcttttttctgttcagaagaataagcagaccctttcgttgc

SEQ ID NO: 19241 - protein, 239 aa, Zea mays subsp. mays
  peptide (1)..(239): Ceres Seq. ID no. 12362447
  misc_feature (101)..(233): Pfam Name: Plant protein family Pfam Description: Plant protein family
  misc_feature (95)..(233): Homolog of NCBI NO: 15224418 NR Description: similar to axi 1 protein from Nicotiana tabacum
  misc_feature (88)..(233): Homolog of NCBI NO: 15227586 NR Description: similar to axi 1 protein from Nicotiana tabacum
  misc_feature (16)..(233): Homolog of NCBI NO: 34902158 NR Description: Putative growth regulator protein
  misc_feature (21)..(233): Homolog of NCBI NO: 15223028 NR Description: putative growth regulator protein; protein id:
  misc_feature (88)..(233): Homolog of NCBI NO: 27754419 NR Description: putative axi 1 protein [Arabidopsis thaliana]
  misc_feature (76)..(233): Homolog of NCBI NO: 19071634 NR Description: putative auxin independent growth-related protein
  misc_feature (21)..(233): Homolog of NCBI NO: 8778398 NR Description: F16A14.24 [Arabidopsis thaliana]
  misc_feature (101)..(233): Homolog of NCBI NO: 6041793 NR Description: putative auxin-independent growth promoter
  misc_feature (8)..(233): Homolog of NCBI NO: 30678517 NR Description: auxin-independent growth promoter -related
  misc_feature (8)..(233): Homolog of NCBI NO: 15242375 NR Description: putative protein; protein id: At5g15740.1
MGGGGGGGGGKSEKARRSSARVRLWVARASTVLLWTCLVQLAAYRELWAPSVLSRWPGCLNQPHVARRPSERVADAGQTQAARALVVLPPKRIYRNNGYLMVSCNGGLNQMRAAICDMVTIARYLNVTLIVPELDKASFWADPSDFQDIFDVDYFIASLRDEVRILRQLPPRLKRRVEMGSLRSLPPVSWSDIGYYRRQILPLVKKYKVVHLNRTDARLANNGLPVEMQRLRCPSTTMP

SEQ ID NO: 19242 - protein, 225 aa, Zea mays subsp. mays
  peptide (1)..(225): Ceres Seq. ID no. 12362448
  misc_feature (1)..(177): Pfam Name: Plant protein family Pfam Description: Plant protein family
  misc_feature (1)..(222): Homolog of NCBI NO: 15224418 NR Description: similar to axi 1 protein from Nicotiana tabacum
  misc_feature (1)..(216): Homolog of NCBI NO: 15227586 NR Description: similar to axi 1 protein from Nicotiana tabacum
  misc_feature (1)..(216): Homolog of NCBI NO: 34902158 NR Description: Putative growth regulator protein
  misc_feature (1)..(216): Homolog of NCBI NO: 15223028 NR Description: putative growth regulator protein; protein id:
  misc_feature (1)..(216): Homolog of NCBI NO: 27754419 NR Description: putative axi 1 protein [Arabidopsis thaliana]
  misc_feature (1)..(216): Homolog of NCBI NO: 19071634 NR Description: putative auxin independent growth-related protein
  misc_feature (1)..(216): Homolog of NCBI NO: 8778398 NR Description: F16A14.24 [Arabidopsis thaliana]
  misc_feature (1)..(216): Homolog of NCBI NO: 6041793 NR Description: putative auxin-independent growth promoter
  misc_feature (1)..(216): Homolog of NCBI NO: 30678517 NR Description: auxin-independent growth promoter -related
  misc_feature (1)..(216): Homolog of NCBI NO: 15242375 NR Description: putative protein; protein id: At5g15740.1
MDMLAFSGCTHGCSSMEAQELTKMRYAYPWWKEKVIDSDAKRKDGLCPLTPEETALVLQALGIDRGYQIYIAAGEIYGGQRRMAALTSAYPNVVRKETLLPWEVGLFQNHSSQMAALDYMVSLESDVFIPTYDGNMAKVVEGHRRYLGFRKTVLLDRRRIVELVDEYRNGTLSWTDFSSAVMASHTSRMGEPSRRQTVPDRPKEEDYFYANPHECLHQPEDVSAL

SEQ ID NO: 19243 - protein, 223 aa, Zea mays subsp. mays
  peptide (1)..(223): Ceres Seq. ID no. 12362449
  misc_feature (1)..(175): Pfam Name: Plant protein family Pfam Description: Plant protein family
  misc_feature (1)..(220): Homolog of NCBI NO: 15224418 NR Description: similar to axi 1 protein from Nicotiana tabacum
  misc_feature (1)..(214): Homolog of NCBI NO: 15227586 NR Description: similar to axi 1 protein from Nicotiana tabacum
  misc_feature (1)..(214): Homolog of NCBI NO: 34902158 NR Description: Putative growth regulator protein
  misc_feature (1)..(214): Homolog of NCBI NO: 15223028 NR Description: putative growth regulator protein; protein id:
  misc_feature (1)..(214): Homolog of NCBI NO: 27754419 NR Description: putative axi 1 protein [Arabidopsis thaliana]
  misc_feature (1)..(214): Homolog of NCBI NO: 19071634 NR Description: putative auxin independent growth-related protein
  misc_feature (1)..(214): Homolog of NCBI NO: 8778398 NR Description: F16A14.24 [Arabidopsis thaliana]
  misc_feature (1)..(214): Homolog of NCBI NO: 6041793 NR Description: putative auxin-independent growth promoter
  misc_feature (1)..(214): Homolog of NCBI NO: 30678517 NR Description: auxin-independent growth promoter -related
  misc_feature (1)..(214): Homolog of NCBI NO: 15242375 NR Description: putative protein; protein id: At5g15740.1
MLAFSGCTHGCSSMEAQELTKMRYAYPWWKEKVIDSDAKRKDGLCPLTPEETALVLQALGIDRGYQIYIAAGEIYGGQRRMAALTSAYPNVVRKETLLPWEVGLFQNHSSQMAALDYMVSLESDVFIPTYDGNMAKVVEGHRRYLGFRKTVLLDRRRIVELVDEYRNGTLSWTDFSSAVMASHTSRMGEPSRRQTVPDRPKEEDYFYANPHECLHQPEDVSAL

SEQ ID NO: 19244 - DNA, 990 bp, Zea mays subsp. mays
  misc_feature (1)..(990): Ceres Seq. ID no. 12419778
  misc_feature: MA Experiment ID: 108504 Result: Up-regulated in Transcription
  misc_feature: MA Experiment 108504 PARAMETER Experiment Name: Zm_Drought_P Parameter: Age (day) Value: 8
  misc_feature: MA Experiment 108504 PARAMETER Experiment Name: Zm_Drought_P Parameter: Organism Value: Zea mays
  misc_feature: MA Experiment 108504 PARAMETER Experiment Name: Zm_Drought_P Parameter: Plant Line Value: 35A19
  misc_feature: MA Experiment 108504 PARAMETER Experiment Name: Zm_Drought_P Parameter: Timepoint (hr) Value: 12
  misc_feature: MA Experiment 108504 PARAMETER Experiment Name: Zm_Drought_P Parameter: Tissue Value: Aerial
  misc_feature: MA Experiment 108504 PARAMETER Experiment Name: Zm_Drought_P Parameter: Treatment Value: Drought vs. No Drought
  misc_feature: MA Experiment ID: 108515 Result: Up-regulated in Transcription
  misc_feature: MA Experiment 108515 PARAMETER Experiment Name: Zm_2mM_SA_P Parameter: Age (day) Value: 8
  misc_feature: MA Experiment 108515 PARAMETER Experiment Name: Zm_2mM_SA_P Parameter: Organism Value: Zea mays
  misc_feature: MA Experiment 108515 PARAMETER Experiment Name: Zm_2mM_SA_P Parameter: Plant Line Value: 35A19
  misc_feature: MA Experiment 108515 PARAMETER Experiment Name: Zm_2mM_SA_P Parameter: Timepoint (hr) Value: 12
  misc_feature: MA Experiment 108515 PARAMETER Experiment Name: Zm_2mM_SA_P Parameter: Tissue Value: Aerial
  misc_feature: MA Experiment 108515 PARAMETER Experiment Name: Zm_2mM_SA_P Parameter: Treatment Value: 2mM SA vs. No Treatment
  misc_feature: MA Experiment ID: 108527 Result: Up-regulated in Transcription
  misc_feature: MA Experiment 108527 PARAMETER Experiment Name: Zm_5mM_NO_P Parameter: Age (day) Value: 8
  misc_feature: MA Experiment 108527 PARAMETER Experiment Name: Zm_5mM_NO_P Parameter: Organism Value: Zea mays
  misc_feature: MA Experiment 108527 PARAMETER Experiment Name: Zm_5mM_NO_P Parameter: Plant Line Value: 35A19
  misc_feature: MA Experiment 108527 PARAMETER Experiment Name: Zm_5mM_NO_P Parameter: Timepoint (hr) Value: 6
  misc_feature: MA Experiment 108527 PARAMETER Experiment Name: Zm_5mM_NO_P Parameter: Tissue Value: Aerial
  misc_feature: MA Experiment 108527 PARAMETER Experiment Name: Zm_5mM_NO_P Parameter: Treatment Value: 5mM NO vs. No Treatment
  misc_feature: MA Experiment ID: 108529 Result: Up-regulated in Transcription
  misc_feature: MA Experiment 108529 PARAMETER Experiment Name: Zm_Imbibed_Seeds_P Parameter: Age (day) Value: 5 vs. 2
  misc_feature: MA Experiment 108529 PARAMETER Experiment Name: Zm_Imbibed_Seeds_P Parameter: Organism Value: Zea mays
  misc_feature: MA Experiment 108529 PARAMETER Experiment Name: Zm_Imbibed_Seeds_P Parameter: Plant Line Value: 35A19
  misc_feature: MA Experiment 108529 PARAMETER Experiment Name: Zm_Imbibed_Seeds_P Parameter: Tissue Value: Roots vs. Embryo
  misc_feature: MA Experiment ID: 108530 Result: Up-regulated in Transcription
  misc_feature: MA Experiment 108530 PARAMETER Experiment Name: Zm_Imbibed_Seeds_P Parameter: Age (day) Value: 6 vs. 2
  misc_feature: MA Experiment 108530 PARAMETER Experiment Name: Zm_Imbibed_Seeds_P Parameter: Organism Value: Zea mays
  misc_feature: MA Experiment 108530 PARAMETER Experiment Name: Zm_Imbibed_Seeds_P Parameter: Plant Line Value: 35A19
  misc_feature: MA Experiment 108530 PARAMETER Experiment Name: Zm_Imbibed_Seeds_P Parameter: Tissue Value: Aerial vs. Embryo
  misc_feature: MA Experiment ID: 108534 Result: Up-regulated in Transcription
  misc_feature: MA Experiment 108534 PARAMETER Experiment Name: Zm_4deg_Cold_P Parameter: Age (hr) Value: 8
  misc_feature: MA Experiment 108534 PARAMETER Experiment Name: Zm_4deg_Cold_P Parameter: Organism Value: Zea mays
  misc_feature: MA Experiment 108534 PARAMETER Experiment Name: Zm_4deg_Cold_P Parameter: Plant Line Value: 35A19
  misc_feature: MA Experiment 108534 PARAMETER Experiment Name: Zm_4deg_Cold_P Parameter: Temperature (deg C) Value: 4 vs. 22
  misc_feature: MA Experiment 108534 PARAMETER Experiment Name: Zm_4deg_Cold_P Parameter: Timepoint (hr) Value: 6
  misc_feature: MA Experiment 108534 PARAMETER Experiment Name: Zm_4deg_Cold_P Parameter: Tissue Value: Aerial
  misc_feature: MA Experiment ID: 108535 Result: Down-regulated in Transcription
  misc_feature: MA Experiment 108535 PARAMETER Experiment Name: Zm_Meristem_P Parameter: Age (day) Value: 8
  misc_feature: MA Experiment 108535 PARAMETER Experiment Name: Zm_Meristem_P Parameter: Organism Value: Zea mays
  misc_feature: MA Experiment 108535 PARAMETER Experiment Name: Zm_Meristem_P Parameter: Plant Line Value: 35A19
  misc_feature: MA Experiment 108535 PARAMETER Experiment Name: Zm_Meristem_P Parameter: Tissue Value: Root Meristem vs. Above Root Meristem
  misc_feature: MA Experiment ID: 108543 Result: Down-regulated in Transcription
  misc_feature: MA Experiment ID: 108559 Result: Up-regulated in Transcription
  misc_feature: MA Experiment 108559 PARAMETER Experiment Name: Zm_5mM_NO_P Parameter: Age (day) Value: 8
  misc_feature: MA Experiment 108559 PARAMETER Experiment Name: Zm_5mM_NO_P Parameter: Organism Value: Zea mays
  misc_feature: MA Experiment 108559 PARAMETER Experiment Name: Zm_5mM_NO_P Parameter: Plant Line Value: 35A19
  misc_feature: MA Experiment 108559 PARAMETER Experiment Name: Zm_5mM_NO_P Parameter: Timepoint (hr) Value: 12
  misc_feature: MA Experiment 108559 PARAMETER Experiment Name: Zm_5mM_NO_P Parameter: Tissue Value: Aerial
  misc_feature: MA Experiment 108559 PARAMETER Experiment Name: Zm_5mM_NO_P Parameter: Treatment Value: 5mM NO vs. No Treatment
  misc_feature: MA Experiment ID: 20000477 Result: Up-regulated in Transcription
  misc_feature: MA Experiment 20000477 PARAMETER Experiment Name: Zm_5mM_SA_P Parameter: Age (day) Value: 10
  misc_feature: MA Experiment 20000477 PARAMETER Experiment Name: Zm_5mM_SA_P Parameter: Organism Value: Zea mays
  misc_feature: MA Experiment 20000477 PARAMETER Experiment Name: Zm_5mM_SA_P Parameter: Plant Line Value: 35A19
  misc_feature: MA Experiment 20000477 PARAMETER Experiment Name: Zm_5mM_SA_P Parameter: Timepoint (hr) Value: 48
  misc_feature: MA Experiment 20000477 PARAMETER Experiment Name: Zm_5mM_SA_P Parameter: Tissue Value: Aerial
  misc_feature: MA Experiment 20000477 PARAMETER Experiment Name: Zm_5mM_SA_P Parameter: Treatment Value: 5mM SA vs. No Treatment
  misc_feature: MA Experiment ID: 20000478 Result: Up-regulated in Transcription
  misc_feature: MA Experiment 20000478 PARAMETER Experiment Name: Zm_5mM_SA_P Parameter: Age (day) Value: 11
  misc_feature: MA Experiment 20000478 PARAMETER Experiment Name: Zm_5mM_SA_P Parameter: Organism Value: Zea mays
  misc_feature: MA Experiment 20000478 PARAMETER Experiment Name: Zm_5mM_SA_P Parameter: Plant Line Value: 35A19
  misc_feature: MA Experiment 20000478 PARAMETER Experiment Name: Zm_5mM_SA_P Parameter: Timepoint (hr) Value: 72
  misc_feature: MA Experiment 20000478 PARAMETER Experiment Name: Zm_5mM_SA_P Parameter: Tissue Value: Aerial
  misc_feature: MA Experiment 20000478 PARAMETER Experiment Name: Zm_5mM_SA_P Parameter: Treatment Value: 5mM SA vs. No Treatment
  misc_feature: MA Experiment ID: 20000479 Result: Up-regulated in Transcription
  misc_feature: MA Experiment 20000479 PARAMETER Experiment Name: Zm_Drought_P Parameter: Age (day) Value: 10
  misc_feature: MA Experiment 20000479 PARAMETER Experiment Name: Zm_Drought_P Parameter: Organism Value: Zea mays
  misc_feature: MA Experiment 20000479 PARAMETER Experiment Name: Zm_Drought_P Parameter: Plant Line Value: 35A19
  misc_feature: MA Experiment 20000479 PARAMETER Experiment Name: Zm_Drought_P Parameter: Timepoint (hr) Value: 48
  misc_feature: MA Experiment 20000479 PARAMETER Experiment Name: Zm_Drought_P Parameter: Tissue Value: Aerial
  misc_feature: MA Experiment 20000479 PARAMETER Experiment Name: Zm_Drought_P Parameter: Treatment Value: Drought vs. No Drought
  misc_feature: MA Experiment ID: 20000480 Result: Up-regulated in Transcription
  misc_feature: MA Experiment 20000480 PARAMETER Experiment Name: Zm_Drought_P Parameter: Age (day) Value: 11
  misc_feature: MA Experiment 20000480 PARAMETER Experiment Name: Zm_Drought_P Parameter: Organism Value: Zea mays
  misc_feature: MA Experiment 20000480 PARAMETER Experiment Name: Zm_Drought_P Parameter: Plant Line Value: 35A19
  misc_feature: MA Experiment 20000480 PARAMETER Experiment Name: Zm_Drought_P Parameter: Timepoint (hr) Value: 72
  misc_feature: MA Experiment 20000480 PARAMETER Experiment Name: Zm_Drought_P Parameter: Tissue Value: Aerial
  misc_feature: MA Experiment 20000480 PARAMETER Experiment Name: Zm_Drought_P Parameter: Treatment Value: Drought vs. No Drought
  misc_feature: MA Experiment ID: 20000535 Result: Down-regulated in Transcription
  misc_feature: MA Experiment 20000535 PARAMETER Experiment Name: Zm_Hybrid_Seed_Dev_P Parameter: DAP Value: 30 vs. 12
  misc_feature: MA Experiment 20000535 PARAMETER Experiment Name: Zm_Hybrid_Seed_Dev_P Parameter: Organism Value: Zea mays
  misc_feature: MA Experiment 20000535 PARAMETER Experiment Name: Zm_Hybrid_Seed_Dev_P Parameter: Plant Line Value: 35A19
  misc_feature: MA Experiment 20000535 PARAMETER Experiment Name: Zm_Hybrid_Seed_Dev_P Parameter: Tissue Value: Embryo vs. Unfert Floret
  misc_feature: MA Experiment ID: 20001610 Result: Down-regulated in Transcription
  misc_feature: MA Experiment 20001610 PARAMETER Experiment Name: Zm_50ppm_KNO3_L-to-H_P Parameter: Age (day) Value: 19
  misc_feature: MA Experiment 20001610 PARAMETER Experiment Name: Zm_50ppm_KNO3_L-to-H_P Parameter: Organism Value: Zea mays
  misc_feature: MA Experiment 20001610 PARAMETER Experiment Name: Zm_50ppm_KNO3_L-to-H_P Parameter: Plant Line Value: 35A19
  misc_feature: MA Experiment 20001610 PARAMETER Experiment Name: Zm_50ppm_KNO3_L-to-H_P Parameter: Timepoint (hr) Value: 2
  misc_feature: MA Experiment 20001610 PARAMETER Experiment Name: Zm_50ppm_KNO3_L-to-H_P Parameter: Tissue Value: Roots
  misc_feature: MA Experiment 20001610 PARAMETER Experiment Name: Zm_50ppm_KNO3_L-to-H_P Parameter: Treatment Value: 50ppm KNO3 vs. 50ppm KCl
gcacgagaccattacctagaacatcctaatcgaaaaaaaccatcacaagctctagttttccagctctgcagcacacaagctagttaagctcctgcaacctccaagaaactaggcaatcgtttcctcctctgcttcagtatctccccttccagcagtagctaagctgccatatggcgacaagcaggcttgcgctcgtgtccgtgtttgccgcagccgtcctgctgggcatggcgtcggcggcgacctacaacgtcggcgagccgggcgggtcctgggacctgcgtaccaactacggcacctgggtctcctccaagaggttccacccgggtgaccagatcgtgttcaagtactcgccccaggcgcacgacgtggtggaggtgaacaaggcggactacgactcctgctcaatcgccagccccgtcgccacccacaactccggcaacgacgccatcgccctggcctcccccggcacccgctacttcatctgcggcttccctggccactgcgacgcgggcatgaagatccagatcaacgtcgtgcccagcgccaactccctcggccccgccagcgctcccgccgccaactctcccgtctctcccccgcccatgtccgcgccctcttccgccgctaccaaggccaccggtttcggcgcccttgccgccgtcatgatcgccgcaggcctcatggcttactagatactctgtcgcttgctgcgtacatttagttttccttagatattatatatacgttgtattgtattcttttgagagatcagagttcagacgaatgacatggcatacatgtatctacgtaaagacagatgactagtttatacattattcatattgtatatcattcaggtttcgctcttcggtgtatgtatcgatattcattcagatagatagagatagagatgactagtaatttcctggtgtagttttctctttgttgttccgattatagatatgaatgtaatgaatgattagtatt

SEQ ID NO: 19245 - protein, 174 aa, Zea mays subsp. mays
  peptide (1)..(174): Ceres Seq. ID no. 12419779
  misc_feature (35)..(112): Pfam Name: Plastocyanin-like domain Pfam Description: Plastocyanin-like domain
  misc_feature (3)..(152): Homolog of NCBI NO: 15224605 NR Description: putative blue copper-binding protein; protein id:
  misc_feature (7)..(169): Homolog of NCBI NO: 34915492 NR Description: contains ESTs
  misc_feature (6)..(172): Homolog of NCBI NO: 38636767 NR Description: putative blue copper binding protein
  misc_feature (1)..(169): Homolog of NCBI NO: 38636838 NR Description: putative blue copper binding protein
  misc_feature (1)..(174): Homolog of NCBI NO: 38636764 NR Description: putative blue copper binding protein
  misc_feature (2)..(169): Homolog of NCBI NO: 38636763 NR Description: putative blue copper binding protein
  misc_feature (1)..(173): Homolog of NCBI NO: 37651973 NR Description: blue copper binding protein [Hordeum vulgare
  misc_feature (4)..(174): Homolog of NCBI NO: 38636761 NR Description: putative blue copper binding protein
  misc_feature (1)..(173): Homolog of NCBI NO: 4104058 NR Description: blue copper-binding protein homolog [Triticum
  misc_feature (7)..(174): Homolog of NCBI NO: 38636760 NR Description: putative blue copper binding protein
MATSRLALVSVFAAAVLLGMASAATYNVGEPGGSWDLRTNYGTWVSSKRFHPGDQIVFKYSPQAHDVVEVNKADYDSCSIASPVATHNSGNDAIALASPGTRYFICGFPGHCDAGMKIQINVVPSANSLGPASAPAANSPVSPPPMSAPSSAATKATGFGALAAVMIAAGLMAY

SEQ ID NO: 19246 - protein, 155 aa, Zea mays subsp. mays
  peptide (1)..(155): Ceres Seq. ID no. 12419780
  misc_feature (16)..(93): Pfam Name: Plastocyanin-like domain Pfam Description: Plastocyanin-like domain
  misc_feature (1)..(133): Homolog of NCBI NO: 15224605 NR Description: putative blue copper-binding protein; protein id:
  misc_feature (1)..(150): Homolog of NCBI NO: 34915492 NR Description: contains ESTs
  misc_feature (1)..(153): Homolog of NCBI NO: 38636767 NR Description: putative blue copper binding protein
  misc_feature (1)..(150): Homolog of NCBI NO: 38636838 NR Description: putative blue copper binding protein
  misc_feature (1)..(155): Homolog of NCBI NO: 38636764 NR Description: putative blue copper binding protein
  misc_feature (1)..(150): Homolog of NCBI NO: 38636763 NR Description: putative blue copper binding protein
  misc_feature (1)..(154): Homolog of NCBI NO: 37651973 NR Description: blue copper binding protein [Hordeum vulgare
  misc_feature (1)..(155): Homolog of NCBI NO: 38636761 NR Description: putative blue copper binding protein
  misc_feature (1)..(154): Homolog of NCBI NO: 4104058 NR Description: blue copper-binding protein homolog [Triticum
  misc_feature (1)..(155): Homolog of NCBI NO: 38636760 NR Description: putative blue copper binding protein
MASAATYNVGEPGGSWDLRTNYGTWVSSKRFHPGDQIVFKYSPQAHDVVEVNKADYDSCSIASPVATHNSGNDAIALASPGTRYFICGFPGHCDAGMKIQINVVPSANSLGPASAPAANSPVSPPPMSAPSSAATKATGFGALAAVMIAAGLMAY

SEQ ID NO: 19247 - DNA, 1732 bp, Zea mays subsp. mays
  misc_feature (1)..(1732): Ceres Seq. ID no. 12375791
  misc_feature: MA Experiment ID: 108515 Result: Up-regulated in Transcription
  misc_feature: MA Experiment 108515 PARAMETER Experiment Name: Zm_2mM_SA_P Parameter: Age (day) Value: 8
  misc_feature: MA Experiment 108515 PARAMETER Experiment Name: Zm_2mM_SA_P Parameter: Organism Value: Zea mays
  misc_feature: MA Experiment 108515 PARAMETER Experiment Name: Zm_2mM_SA_P Parameter: Plant Line Value: 35A19
  misc_feature: MA Experiment 108515 PARAMETER Experiment Name: Zm_2mM_SA_P Parameter: Timepoint (hr) Value: 12
  misc_feature: MA Experiment 108515 PARAMETER Experiment Name: Zm_2mM_SA_P Parameter: Tissue Value: Aerial
  misc_feature: MA Experiment 108515 PARAMETER Experiment Name: Zm_2mM_SA_P Parameter: Treatment Value: 2mM SA vs. No Treatment
  misc_feature: MA Experiment ID: 108523 Result: Down-regulated in Transcription
  misc_feature: MA Experiment 108523 PARAMETER Experiment Name: Zm_42deg_Heat_P Parameter: Age (day) Value: 8
  misc_feature: MA Experiment 108523 PARAMETER Experiment Name: Zm_42deg_Heat_P Parameter: Organism Value: Zea mays
  misc_feature: MA Experiment 108523 PARAMETER Experiment Name: Zm_42deg_Heat_P Parameter: Plant Line Value: 35A19
  misc_feature: MA Experiment 108523 PARAMETER Experiment Name: Zm_42deg_Heat_P Parameter: Temperature (deg C) Value: 42 vs. 22
  misc_feature: MA Experiment 108523 PARAMETER Experiment Name: Zm_42deg_Heat_P Parameter: Timepoint (hr) Value: 6
  misc_feature: MA Experiment 108523 PARAMETER Experiment Name: Zm_42deg_Heat_P Parameter: Tissue Value: Aerial
  misc_feature: MA Experiment ID: 108528 Result: Down-regulated in Transcription
  misc_feature: MA Experiment 108528 PARAMETER Experiment Name: Zm_Imbibed_Seeds_P Parameter: Age (day) Value: 5 vs. 2
  misc_feature: MA Experiment 108528 PARAMETER Experiment Name: Zm_Imbibed_Seeds_P Parameter: Organism Value: Zea mays
  misc_feature: MA Experiment 108528 PARAMETER Experiment Name: Zm_Imbibed_Seeds_P Parameter: Plant Line Value: 35A19
  misc_feature: MA Experiment 108528 PARAMETER Experiment Name: Zm_Imbibed_Seeds_P Parameter: Tissue Value: Aerial vs. Embryo
  misc_feature: MA Experiment ID: 108542 Result: Up-regulated in Transcription
  misc_feature: MA Experiment 108542 PARAMETER Experiment Name: Zm_150mM_NaCl_P Parameter: Age (day) Value: 8
  misc_feature: MA Experiment 108542 PARAMETER Experiment Name: Zm_150mM_NaCl_P Parameter: Organism Value: Zea mays
  misc_feature: MA Experiment 108542 PARAMETER Experiment Name: Zm_150mM_NaCl_P Parameter: Plant Line Value: 35A19
  misc_feature: MA Experiment 108542 PARAMETER Experiment Name: Zm_150mM_NaCl_P Parameter: Timepoint (hr) Value: 6
  misc_feature: MA Experiment 108542 PARAMETER Experiment Name: Zm_150mM_NaCl_P Parameter: Tissue Value: Aerial
  misc_feature: MA Experiment 108542 PARAMETER Experiment Name: Zm_150mM_NaCl_P Parameter: Treatment Value: 150mM NaCl vs. No Treatment
  misc_feature: MA Experiment ID: 108543 Result: Down-regulated in Transcription
  misc_feature: MA Experiment ID: 108545 Result: Down-regulated in Transcription
  misc_feature: MA Experiment 108545 PARAMETER Experiment Name: Zm_Imbibed_Seeds_P Parameter: Age (day) Value: 3 vs. 2
  misc_feature: MA Experiment 108545 PARAMETER Experiment Name: Zm_Imbibed_Seeds_P Parameter: Organism Value: Zea mays
  misc_feature: MA Experiment 108545 PARAMETER Experiment Name: Zm_Imbibed_Seeds_P Parameter: Plant Line Value: 35A19
  misc_feature: MA Experiment 108545 PARAMETER Experiment Name: Zm_Imbibed_Seeds_P Parameter: Tissue Value: Aerial vs. Embryo
  misc_feature: MA Experiment ID: 108547 Result: Down-regulated in Transcription
  misc_feature: MA Experiment 108547 PARAMETER Experiment Name: Zm_Imbibed_Seeds_P Parameter: Age (day) Value: 4 vs. 2
  misc_feature: MA Experiment 108547 PARAMETER Experiment Name: Zm_Imbibed_Seeds_P Parameter: Organism Value: Zea mays
  misc_feature: MA Experiment 108547 PARAMETER Experiment Name: Zm_Imbibed_Seeds_P Parameter: Plant Line Value: 35A19
  misc_feature: MA Experiment 108547 PARAMETER Experiment Name: Zm_Imbibed_Seeds_P Parameter: Tissue Value: Aerial vs. Embryo
  misc_feature: MA Experiment ID: 20000477 Result: Up-regulated in Transcription
  misc_feature: MA Experiment 20000477 PARAMETER Experiment Name: Zm_5mM_SA_P Parameter: Age (day) Value: 10
  misc_feature: MA Experiment 20000477 PARAMETER Experiment Name: Zm_5mM_SA_P Parameter: Organism Value: Zea mays
  misc_feature: MA Experiment 20000477 PARAMETER Experiment Name: Zm_5mM_SA_P Parameter: Plant Line Value: 35A19
  misc_feature: MA Experiment 20000477 PARAMETER Experiment Name: Zm_5mM_SA_P Parameter: Timepoint (hr) Value: 48
  misc_feature: MA Experiment 20000477 PARAMETER Experiment Name: Zm_5mM_SA_P Parameter: Tissue Value: Aerial
  misc_feature: MA Experiment 20000477 PARAMETER Experiment Name: Zm_5mM_SA_P Parameter: Treatment Value: 5mM SA vs. No Treatment
  misc_feature: MA Experiment ID: 20000478 Result: Up-regulated in Transcription
  misc_feature: MA Experiment 20000478 PARAMETER Experiment Name: Zm_5mM_SA_P Parameter: Age (day) Value: 11
  misc_feature: MA Experiment 20000478 PARAMETER Experiment Name: Zm_5mM_SA_P Parameter: Organism Value: Zea mays
  misc_feature: MA Experiment 20000478 PARAMETER Experiment Name: Zm_5mM_SA_P Parameter: Plant Line Value: 35A19
  misc_feature: MA Experiment 20000478 PARAMETER Experiment Name: Zm_5mM_SA_P Parameter: Timepoint (hr) Value: 72
  misc_feature: MA Experiment 20000478 PARAMETER Experiment Name: Zm_5mM_SA_P Parameter: Tissue Value: Aerial
  misc_feature: MA Experiment 20000478 PARAMETER Experiment Name: Zm_5mM_SA_P Parameter: Treatment Value: 5mM SA vs. No Treatment
  misc_feature: MA Experiment ID: 20000480 Result: Up-regulated in Transcription
  misc_feature: MA Experiment 20000480 PARAMETER Experiment Name: Zm_Drought_P Parameter: Age (day) Value: 11
  misc_feature: MA Experiment 20000480 PARAMETER Experiment Name: Zm_Drought_P Parameter: Organism Value: Zea mays
  misc_feature: MA Experiment 20000480 PARAMETER Experiment Name: Zm_Drought_P Parameter: Plant Line Value: 35A19
  misc_feature: MA Experiment 20000480 PARAMETER Experiment Name: Zm_Drought_P Parameter: Timepoint (hr) Value: 72
  misc_feature: MA Experiment 20000480 PARAMETER Experiment Name: Zm_Drought_P Parameter: Tissue Value: Aerial
  misc_feature: MA Experiment 20000480 PARAMETER Experiment Name: Zm_Drought_P Parameter: Treatment Value: Drought vs. No Drought
  misc_feature: MA Experiment ID: 20000488 Result: Down-regulated in Transcription
  misc_feature: MA Experiment 20000488 PARAMETER Experiment Name: Zm_50mM_NH4NO3_L_to_H_P Parameter: Organism Value: Zea mays
  misc_feature: MA Experiment 20000488 PARAMETER Experiment Name: Zm_50mM_NH4NO3_L_to_H_P Parameter: Timepoint (hr) Value: 8
  misc_feature: MA Experiment 20000488 PARAMETER Experiment Name: Zm_50mM_NH4NO3_L_to_H_P Parameter: Tissue Value: Leaves
  misc_feature: MA Experiment 20000488 PARAMETER Experiment Name: Zm_50mM_NH4NO3_L_to_H_P Parameter: Treatment Value: 50mM NH4NO3 vs. 100mM Mannitol
  misc_feature: MA Experiment ID: 20000492 Result: Down-regulated in Transcription
  misc_feature: MA Experiment 20000492 PARAMETER Experiment Name: Zm_Hybrid_Seed_Dev_P Parameter: DAP Value: 12
  misc_feature: MA Experiment 20000492 PARAMETER Experiment Name: Zm_Hybrid_Seed_Dev_P Parameter: Organism Value: Zea mays
  misc_feature: MA Experiment 20000492 PARAMETER Experiment Name: Zm_Hybrid_Seed_Dev_P Parameter: Plant Line Value: 35A19
  misc_feature: MA Experiment 20000492 PARAMETER Experiment Name: Zm_Hybrid_Seed_Dev_P Parameter: Tissue Value: Fert Kernel vs. Unfert Floret
  misc_feature: MA Experiment ID: 20000535 Result: Down-regulated in Transcription
  misc_feature: MA Experiment 20000535 PARAMETER Experiment Name: Zm_Hybrid_Seed_Dev_P Parameter: DAP Value: 30 vs. 12
  misc_feature: MA Experiment 20000535 PARAMETER Experiment Name: Zm_Hybrid_Seed_Dev_P Parameter: Organism Value: Zea mays
  misc_feature: MA Experiment 20000535 PARAMETER Experiment Name: Zm_Hybrid_Seed_Dev_P Parameter: Plant Line Value: 35A19
  misc_feature: MA Experiment 20000535 PARAMETER Experiment Name: Zm_Hybrid_Seed_Dev_P Parameter: Tissue Value: Embryo vs. Unfert Floret
  misc_feature: MA Experiment ID: 20000626 Result: Up-regulated in Transcription
  misc_feature: MA Experiment 20000626 PARAMETER Experiment Name: Zm_Herbicide-Treatments_P Parameter: Timepoint (hr) Value: 12
  misc_feature: MA Experiment 20000626 PARAMETER Experiment Name: Zm_Herbicide-Treatments_P Parameter: Tissue Value: Aerial
  misc_feature: MA Experiment 20000626 PARAMETER Experiment Name: Zm_Herbicide-Treatments_P Parameter: Treatment Value: Roundup vs. No Treatment
aaataatagaggcagaggcagagccaagacggttccgttcagtggctggcggcgcatagatagatagccatggcgaagaagctagtggaggaagcgctcctcgcagcggcggacgagcactaggaggagaacctgagcgtgcgcgaggagctgaagaagcagctatggctggctgggcccatgatcgccggcgcgctcctgcagaacgtgatccagatgatctccgtcatgtacgtgggacaccttggagagcccccctcgctggctcatccatggccaactccttcgccaccgtcaccggcctcagcctgctgctaggcatggcaagcgctctagacacactgtgcggccaagcgttcggcgcgaggcagtactatctcctgggcatctacaagcagcgcgccatgttcctgctgaccctggtgagcgtccctctgtccgtggtgtggttctacaccggcgagatcctcctcctgttcggccaggacccggacatcgccgcagaggccggcacctacgcccggtggatgatcccgctgctgttcgcgtacggcctgctgcagtgccacgtccggttcctccagacgcagaacatcgtggtgcccgtgatggcgagcgccggcgccgccgcggcctgccacgtcgtcgtctgctgggcgctggtgtacgcgctcgggatgggcagcaagggcgcggcgctcagcaacgccatctcctactgggtcaacgtggccgtgctgtccgtgtacgtgagggtgtccagcgcctgcaaggagacgtggacgggcttctccacggaggccttccgcgacgcgctcggcttcttcaggcttgcggtcccgtccgctctcatggtctgcttggagatgtggtcgtttgaactcattgtgctcctctcgggccttcttcccaacccaaaactggagacctccgtgctgtcgatcagccttaacactgctgcgttcgtgtggatgatcccctttgggcttagctcagctatcagcactcgcgtgtcgaatgagctgggtgccgggcgtcctcgagccgcccgccttgcggtgcgtgtcgttgtgttgctgtctgtcgccgaagggctaggcgtgggcctcatcctggtgtgcgtgcgctacgtctggggccatgcctacagcaacgtcgaggaggtggtgacgtacgtggccaacatgatgctggtcattgcagtgtccaacttcttcgatggtatccagtgcgtgctttcaggtgtggctagaggctgcggatggcagaagatcggtgcctgcatcaaccttggcgcctactacatcgtcggcatcccctctgcttacctcatagcgttcgtcctgcgtgtcggtgggacgggactctggttgggcatcatatgtgggctcatcgtacagctccttctgctcgcgatcatcactctctgcaccaactgggatagcgaggcaacgaaggcaaagaacagagtgttcaattcttcctctccagcatccggaacgtgaacgcattggcggtgaagtaaacggcgagcaaacacggaaactataggagttatgcctgtagttttggaaacttcagcacctctgatcctctctgattttctggctcccacattaactctaatggttagcattgacacttgcagtctggattttgaaacataaatgcgttccttgaacagagtagaggaagggaccaatggaaaacttatacaatagcgttagatcgc

SEQ ID NO: 19248 - protein, 446 aa, Zea mays subsp. mays
  peptide (1)..(446): Ceres Seq. ID no. 12375792
  misc_feature (31)..(445): Homolog of NCBI NO: 21537267 NR Description: putative integral membrane protein [Arabidopsis
  misc_feature (31)..(445): Homolog of NCBI NO: 15219524 NR Description: putative integral membrane protein
  misc_feature (32)..(446): Homolog of NCBI NO: 37533130 NR Description: putative integral membrane protein
  misc_feature (31)..(444): Homolog of NCBI NO: 37533148 NR Description: putative transmembrane protein
  misc_feature (31)..(444): Homolog of NCBI NO: 37533146 NR Description: putative integral membrane protein
  misc_feature (31)..(441): Homolog of NCBI NO: 15237158 NR Description: MATE efflux family protein, putative
  misc_feature (32)..(436): Homolog of NCBI NO: 22138480 NR Description: hypothetical protein [Oryza sativa (japonica
  misc_feature (32)..(446): Homolog of NCBI NO: 38346676 NR Description: OSJNBa0069D17.7 [Oryza sativa (japonica
  misc_feature (32)..(439): Homolog of NCBI NO: 16797803 NR Description: hypothetical membrane protein-1 [Marchantia
  misc_feature (31)..(428): Homolog of NCBI NO: 15226290 NR Description: hypothetical protein; protein id: At2g34360.1
MAGWAHDRRRAPAERDPDDLRHVRGTPWRAPLAGSSMANSFATVTGLSLLLGMASALDTLCGQAFGARQYYLLGIYKQRAMFLLTLVSVPLSVVWFYTGEILLLFGQDPDIAAEAGTYARWMIPLLFAYGLLQCHVRFLQTQNIVVPVMASAGAAAACHVVVCWALVYALGMGSKGAALSNAISYWVNVAVLSVYVRVSSACKETWTGFSTEAFRDALGFFRLAVPSALMVCLEMWSFELIVLLSGLLPNPKLETSVLSISLNTAAFVWMIPFGLSSAISTRVSNELGAGRPRAARLAVRVVVLLSVAEGLGVGLILVCVRYVWGHAYSNVEEVVTYVANMMLVIAVSNFFDGIQCVLSGVARGCGWQKIGACINLGAYYIVGIPSAYLIAFVLRVGGTGLWLGIICGLIVQLLLLAIITLCTNWDSEATKAKNRVFNSSSPASGT

SEQ ID NO: 19249 - protein, 410 aa, Zea mays subsp. mays
  peptide (1)..(410): Ceres Seq. ID no. 12375793
  misc_feature (1)..(403): Homolog of NCBI NO: 16797803 NR Description: hypothetical membrane protein-1 [Marchantia
  misc_feature (1)..(392): Homolog of NCBI NO: 15226290 NR Description: hypothetical protein; protein id: At2g34360.1
  misc_feature (1)..(409): Homolog of NCBI NO: 21537267 NR Description: putative integral membrane protein [Arabidopsis
  misc_feature (1)..(409): Homolog of NCBI NO: 15219524 NR Description: putative integral membrane protein
  misc_feature (1)..(410): Homolog of NCBI NO: 37533130 NR Description: putative integral membrane protein
  misc_feature (1)..(408): Homolog of NCBI NO: 37533148 NR Description: putative transmembrane protein
  misc_feature (1)..(408): Homolog of NCBI NO: 37533146 NR Description: putative integral membrane protein
  misc_feature (1)..(405): Homolog of NCBI NO: 15237158 NR Description: MATE efflux family protein, putative
  misc_feature (1)..(400): Homolog of NCBI NO: 22138480 NR Description: hypothetical protein [Oryza sativa (japonica
  misc_feature (1)..(410): Homolog of NCBI NO: 38346676 NR Description: OSJNBa0069D17.7 [Oryza sativa (japonica
MANSFATVTGLSLLLGMASALDTLCGQAFGARQYYLLGIYKQRAMFLLTLVSVPLSVVWFYTGEILLLFGQDPDIAAEAGTYARWMIPLLFAYGLLQCHVRFLQTQNIVVPVMASAGAAAACHVVVCWALVYALGMGSKGAALSNAISYWVNVAVLSVYVRVSSACKETWTGFSTEAFRDALGFFRLAVPSALMVCLEMWSFELIVLLSGLLPNPKLETSVLSISLNTAAFVWMIPFGLSSAISTRVSNELGAGRPRAARLAVRVVVLLSVAEGLGVGLILVCVRYVWGHAYSNVEEVVTYVANMMLVIAVSNFFDGIQCVLSGVARGCGWQKIGACINLGAYYIVGIPSAYLIAFVLRVGGTGLWLGIICGLIVQLLLLAIITLCTNWDSEATKAKNRVFNSSSPASGT

SEQ ID NO: 19250 - protein, 394 aa, Zea mays subsp. mays
  peptide (1)..(394): Ceres Seq. ID no. 12375794
  misc_feature (1)..(387): Homolog of NCBI NO: 16797803 NR Description: hypothetical membrane protein-1 [Marchantia
  misc_feature (1)..(376): Homolog of NCBI NO: 15226290 NR Description: hypothetical protein; protein id: At2g34360.1
  misc_feature (1)..(393): Homolog of NCBI NO: 21537267 NR Description: putative integral membrane protein [Arabidopsis
  misc_feature (1)..(393): Homolog of NCBI NO: 15219524 NR Description: putative integral membrane protein
  misc_feature (1)..(394): Homolog of NCBI NO: 37533130 NR Description: putative integral membrane protein
  misc_feature (1)..(392): Homolog of NCBI NO: 37533148 NR Description: putative transmembrane protein
  misc_feature (1)..(392): Homolog of NCBI NO: 37533146 NR Description: putative integral membrane protein
  misc_feature (1)..(389): Homolog of NCBI NO: 15237158 NR Description: MATE efflux family protein, putative
  misc_feature (1)..(384): Homolog of NCBI NO: 22138480 NR Description: hypothetical protein [Oryza sativa (japonica
  misc_feature (1)..(394): Homolog of NCBI NO: 38346676 NR Description: OSJNBa0069D17.7 [Oryza sativa (japonica
MASALDTLCGQAFGARQYYLLGIYKQRAMFLLTLVSVPLSVVWFYTGEILLLFGQDPDIAAEAGTYARWMIPLLFAYGLLQCHVRFLQTQNIVVPVMASAGAAAACHVVVCWALVYALGMGSKGAALSNAISYWVNVAVLSVYVRVSSACKETWTGFSTEAFRDALGFFRLAVPSALMVCLEMWSFELIVLLSGLLPNPKLETSVLSISLNTAAFVWMIPFGLSSAISTRVSNELGAGRPRAARLAVRVVVLLSVAEGLGVGLILVCVRYVWGHAYSNVEEVVTYVANMMLVIAVSNFFDGIQCVLSGVARGCGWQKIGACINLGAYYIVGIPSAYLIAFVLRVGGTGLWLGIICGLIVQLLLLAIITLCTNWDSEATKAKNRVFNSSSPASGT

SEQ ID NO: 19251 - DNA, 1742 bp, Zea mays subsp. mays
  misc_feature (1)..(1742): Ceres Seq. ID no. 12595019
  misc_feature: MA Experiment ID: 108529 Result: Up-regulated in Transcription
  misc_feature: MA Experiment 108529 PARAMETER Experiment Name: Zm_Imbibed_Seeds_P Parameter: Age (day) Value: 5 vs. 2
  misc_feature: MA Experiment 108529 PARAMETER Experiment Name: Zm_Imbibed_Seeds_P Parameter: Organism Value: Zea mays
  misc_feature: MA Experiment 108529 PARAMETER Experiment Name: Zm_Imbibed_Seeds_P Parameter: Plant Line Value: 35A19
  misc_feature: MA Experiment 108529 PARAMETER Experiment Name: Zm_Imbibed_Seeds_P Parameter: Tissue Value: Roots vs. Embryo
  misc_feature: MA Experiment ID: 108535 Result: Down-regulated in Transcription
  misc_feature: MA Experiment 108535 PARAMETER Experiment Name: Zm_Meristem_P Parameter: Age (day) Value: 8
  misc_feature: MA Experiment 108535 PARAMETER Experiment Name: Zm_Meristem_P Parameter: Organism Value: Zea mays
  misc_feature: MA Experiment 108535 PARAMETER Experiment Name: Zm_Meristem_P Parameter: Plant Line Value: 35A19
  misc_feature: MA Experiment 108535 PARAMETER Experiment Name: Zm_Meristem_P Parameter: Tissue Value: Root Meristem vs. Above Root Meristem
  misc_feature: MA Experiment ID: 108540 Result: Down-regulated in Transcription
  misc_feature: MA Experiment 108540 PARAMETER Experiment Name: Zm_20percent_PEG_P Parameter: Age (day) Value: 8
  misc_feature: MA Experiment 108540 PARAMETER Experiment Name: Zm_20percent_PEG_P Parameter: Organism Value: Zea mays
  misc_feature: MA Experiment 108540 PARAMETER Experiment Name: Zm_20percent_PEG_P Parameter: Plant Line Value: 35A19
  misc_feature: MA Experiment 108540 PARAMETER Experiment Name: Zm_20percent_PEG_P Parameter: Timepoint (hr) Value: 6
  misc_feature: MA Experiment 108540 PARAMETER Experiment Name: Zm_20percent_PEG_P Parameter: Tissue Value: Aerial
  misc_feature: MA Experiment 108540 PARAMETER Experiment Name: Zm_20percent_PEG_P Parameter: Treatment Value: 20percent PEG vs. No Treatment
  misc_feature: MA Experiment ID: 108545 Result: Down-regulated in Transcription
  misc_feature: MA Experiment 108545 PARAMETER Experiment Name: Zm_Imbibed_Seeds_P Parameter: Age (day) Value: 3 vs. 2
  misc_feature: MA Experiment 108545 PARAMETER Experiment Name: Zm_Imbibed_Seeds_P Parameter: Organism Value: Zea mays
  misc_feature: MA Experiment 108545 PARAMETER Experiment Name: Zm_Imbibed_Seeds_P Parameter: Plant Line Value: 35A19
  misc_feature: MA Experiment 108545 PARAMETER Experiment Name: Zm_Imbibed_Seeds_P Parameter: Tissue Value: Aerial vs. Embryo
  misc_feature: MA Experiment ID: 108546 Result: Up-regulated in Transcription
  misc_feature: MA Experiment 108546 PARAMETER Experiment Name: Zm_Imbibed_Seeds_P Parameter: Age (day) Value: 3 vs. 2
  misc_feature: MA Experiment 108546 PARAMETER Experiment Name: Zm_Imbibed_Seeds_P Parameter: Organism Value: Zea mays
  misc_feature: MA Experiment 108546 PARAMETER Experiment Name: Zm_Imbibed_Seeds_P Parameter: Plant Line Value: 35A19
  misc_feature: MA Experiment 108546 PARAMETER Experiment Name: Zm_Imbibed_Seeds_P Parameter: Tissue Value: Roots vs. Embryo
  misc_feature: MA Experiment ID: 108689 Result: Down-regulated in Transcription
  misc_feature: MA Experiment 108689 PARAMETER Experiment Name: Zm_Drought_Roots_P Parameter: Age (day) Value: 9
  misc_feature: MA Experiment 108689 PARAMETER Experiment Name: Zm_Drought_Roots_P Parameter: Organism Value: Zea mays
  misc_feature: MA Experiment 108689 PARAMETER Experiment Name: Zm_Drought_Roots_P Parameter: Plant Line Value: 35A19
  misc_feature: MA Experiment 108689 PARAMETER Experiment Name: Zm_Drought_Roots_P Parameter: Timepoint (hr) Value: 24
  misc_feature: MA Experiment 108689 PARAMETER Experiment Name: Zm_Drought_Roots_P Parameter: Tissue Value: Roots
  misc_feature: MA Experiment 108689 PARAMETER Experiment Name: Zm_Drought_Roots_P Parameter: Treatment Value: Drought vs. No Drought
  misc_feature: MA Experiment ID: 20000487 Result: Down-regulated in Transcription
  misc_feature: MA Experiment 20000487 PARAMETER Experiment Name: Zm_50mM_NH4NO3_L_to_H_P Parameter: Organism Value: Zea mays
  misc_feature: MA Experiment 20000487 PARAMETER Experiment Name: Zm_50mM_NH4NO3_L_to_H_P Parameter: Timepoint (hr) Value: 4
  misc_feature: MA Experiment 20000487 PARAMETER Experiment Name: Zm_50mM_NH4NO3_L_to_H_P Parameter: Tissue Value: Leaves
  misc_feature: MA Experiment 20000487 PARAMETER Experiment Name: Zm_50mM_NH4NO3_L_to_H_P Parameter: Treatment Value: 50mM NH4NO3 vs. 100mM Mannitol
  misc_feature: MA Experiment ID: 20000535 Result: Down-regulated in Transcription
  misc_feature: MA Experiment 20000535 PARAMETER Experiment Name: Zm_Hybrid_Seed_Dev_P Parameter: DAP Value: 30 vs. 12
  misc_feature: MA Experiment 20000535 PARAMETER Experiment Name: Zm_Hybrid_Seed_Dev_P Parameter: Organism Value: Zea mays
  misc_feature: MA Experiment 20000535 PARAMETER Experiment Name: Zm_Hybrid_Seed_Dev_P Parameter: Plant Line Value: 35A19
  misc_feature: MA Experiment 20000535 PARAMETER Experiment Name: Zm_Hybrid_Seed_Dev_P Parameter: Tissue Value: Embryo vs. Unfert Floret
ctagaacatcctaatcgaaaagcaatgggaagcaaatggccaaccaatagcaaaaaggcagccgtgtatcgatcgccttatccgggtcctgtggcactggcacaccgcgcgtccggatttggctgagtagctgactagctgagcgagcaatccatcccttcgcccgccgcaccatggaagccctcgcctcggcgcctcgggcgctcttcccgcgcgcgtgcccagtggcgacgccggccggcccagcccggcgccgctccgccgctcctcacatctgcagggcctccgcggcggccggggaggagacgacgccgccgccgccgccggcggccgctcccaagaagatcctcaagaagaagcccgtctactcgatgaagaaagggcagattgtgcgcgtggacaaggagaagtacctgaacagcatcaattatctgtcagtgggacacccgcccttctacaaggggctggactacatataccaagaccgcggcgaggtcttggatatcaggaacttcgaaacaggagaatacgccctgatcgcttgggtggggatcccgacgccaccggcatggctaccaacctacatgctcattaagtcggacaagctcgactacgagaggatatatggccggccggcggcctcgcagggcaccgtagcgccgccgccgaattcatgcttcatttcgcatcaggagtcggccaagcaggacacacctcttgttgttgacttgttgtaggtatatacgtacatgccagtattgccagaacagtcgacagaggcaatctgagacctcagctgctggaataatcaggaagtagatcgagagcgacgtacgatgacgagattcataattgctgctgcacatcacctgaggccggggctgaagcacggcatgttctcccgagaggaagaggagaccgtcatgagcctccacgccaagctcggcaacaagtggtcccagatcgcacggcatctgccgggacggacggacaacgaggtgaagaactactggaactcctacctcaagaagcgtgtcgagggcggcgcgcaggcgaagggctcggcggacccggcgacacccgcccgctccgacgacgtgcacgggagcccggaccccagcgagaacggccagaggtccgtcagccggccggcgaactctggctcgtccgagccggcgggggagtcgtcctcggcggacgactctagctgcctcaccgtcaccgagcctgcgcccgcggtgcggaccgcacgcgcccgtgctccccaaggtcatgttcgcggactggctggacatggactacggaaccagcctgctggcgctgggtccggacgccggtttcttcgacgtggccggccgcagcccgggccagggcctgagccaccaggggtctgcgcaggttgacgggccgtgcggcgtcgtggattccctgcacggcctcggcgtcggcgtcggcgtcggcggcatgtgctgggagttcgacggcgcggcggcggagcagctggacgtgcagggaggagagttctgcgatttgctctccatgagcgagttcctcgggatcaactaggcgtcgggccgttctcttcttcccaacgattcatcttgaagcatccttgtcaaatctgtttcttccgtaggcgagagtgtaaaaaactgtgtgttataccaatgtgcagttactaaagtgtatagtatatgcagaggagctgagtaaagatgtgtgaggattgtcctttccggtcc

SEQ ID NO: 19252 - protein, 188 aa, Zea mays subsp. mays
  peptide (1)..(188): Ceres Seq. ID no. 12595020
  misc_feature (19)..(63): Pfam Name: Myb-like DNA-binding domain Pfam Description: Myb-like DNA-binding domain
  misc_feature (19)..(122): Homolog of NCBI NO: 11358551 NR Description: myb-related transcription factor MYB63
  misc_feature (10)..(114): Homolog of NCBI NO: 19072740 NR Description: typical P-type R2R3 Myb protein [Zea mays]
  misc_feature (10)..(85): Homolog of NCBI NO: 11358531 NR Description: myb-related transcription factor MYB19
  misc_feature (10)..(85): Homolog of NCBI NO: 15242947 NR Description: myb family transcription factor(MYB19); protein
  misc_feature (10)..(130): Homolog of NCBI NO: 11358530 NR Description: myb-related transcription factor MYB18
  misc_feature (1)..(130): Homolog of NCBI NO: 25387539 NR Description: myb-like protein [imported] - Arabidopsis
  misc_feature (1)..(130): Homolog of NCBI NO: 15235149 NR Description: myb family transcription factor; protein id:
  misc_feature (10)..(122): Homolog of NCBI NO: 15219313 NR Description: myb family transcription factor; protein id:
  misc_feature (10)..(122): Homolog of NCBI NO: 7438354 NR Description: myb-related protein YUP8H12R.21 - Arabidopsis
  misc_feature (10)..(143): Homolog of NCBI NO: 32489825 NR Description: OSJNBb0039L24.8 [Oryza sativa (japonica
MTRFIIAAAHHLRPGLKHGMFSREEEETVMSLHAKLGNKWSQIARHLPGRTDNEVKNYWNSYLKKRVEGGAQAKGSADPATPARSDDVHGSPDPSENGQRSVSRPANSGSSEPAGESSSADDSSCLTVTEPAPAVRTARARAPQGHVRGLAGHGLRNQPAGAGSGRRFLRRGRPQPGPGPEPPGVCAG

SEQ ID NO: 19253 - protein, 187 aa, Zea mays subsp. mays
  peptide (1)..(187): Ceres Seq. ID no. 12595021
  misc_feature (1)..(133): Homolog of NCBI NO: 34905786 NR Description: P0401G10.19 [Oryza sativa (japonica
  misc_feature (42)..(150): Homolog of NCBI NO: 18410719 NR Description: expressed protein
MEALASAPRALFPRACPVATPAGPARRRSAAPHICRASAAAGEETTPPPPPAAAPKKILKKKPVYSMKKGQIVRVDKEKYLNSINYLSVGHPPFYKGLDYIYQDRGEVLDIRNFETGEYALIAWVGIPTPPAWLPTYMLIKSDKLDYERIYGRPAASQGTVAPPPNSCFISHQESAKQDTPLVVDLL

SEQ ID NO: 19254 - protein, 169 aa, Zea mays subsp. mays
  peptide (1)..(169): Ceres Seq. ID no. 12595022
  misc_feature (1)..(44): Pfam Name: Myb-like DNA-binding domain Pfam Description: Myb-like DNA-binding domain
  misc_feature (1)..(103): Homolog of NCBI NO: 11358551 NR Description: myb-related transcription factor MYB63
  misc_feature (1)..(95): Homolog of NCBI NO: 19072740 NR Description: typical P-type R2R3 Myb protein [Zea mays]
  misc_feature (1)..(66): Homolog of NCBI NO: 11358531 NR Description: myb-related transcription factor MYB19
  misc_feature (1)..(66): Homolog of NCBI NO: 15242947 NR Description: myb family transcription factor(MYB19); protein
  misc_feature (1)..(111): Homolog of NCBI NO: 11358530 NR Description: myb-related transcription factor MYB18
  misc_feature (1)..(111): Homolog of NCBI NO: 25387539 NR Description: myb-like protein [imported] - Arabidopsis
  misc_feature (1)..(111): Homolog of NCBI NO: 15235149 NR Description: myb family transcription factor; protein id:
  misc_feature (1)..(103): Homolog of NCBI NO: 15219313 NR Description: myb family transcription factor; protein id:
  misc_feature (1)..(103): Homolog of NCBI NO: 7438354 NR Description: myb-related protein YUP8H12R.21 - Arabidopsis
  misc_feature (1)..(124): Homolog of NCBI NO: 32489825 NR Description: OSJNBb0039L24.8 [Oryza sativa (japonica
MFSREEEETVMSLHAKLGNKWSQIARHLPGRTDNEVKNYWNSYLKKRVEGGAQAKGSADPATPARSDDVHGSPDPSENGQRSVSRPANSGSSEPAGESSSADDSSCLTVTEPAPAVRTARARAPQGHVRGLAGHGLRNQPAGAGSGRRFLRRGRPQPGPGPEPPGVCAG

SEQ ID NO: 19255 - DNA, 890 bp, Zea mays subsp. mays
  misc_feature (1)..(890): Ceres Seq. ID no. 13499377
  misc_feature: MA Experiment ID: 108504 Result: Down-regulated in Transcription
  misc_feature: MA Experiment 108504 PARAMETER Experiment Name: Zm_Drought_P Parameter: Age (day) Value: 8
  misc_feature: MA Experiment 108504 PARAMETER Experiment Name: Zm_Drought_P Parameter: Organism Value: Zea mays
  misc_feature: MA Experiment 108504 PARAMETER Experiment Name: Zm_Drought_P Parameter: Plant Line Value: 35A19
  misc_feature: MA Experiment 108504 PARAMETER Experiment Name: Zm_Drought_P Parameter: Timepoint (hr) Value: 12
  misc_feature: MA Experiment 108504 PARAMETER Experiment Name: Zm_Drought_P Parameter: Tissue Value: Aerial
  misc_feature: MA Experiment 108504 PARAMETER Experiment Name: Zm_Drought_P Parameter: Treatment Value: Drought vs. No Drought
  misc_feature: MA Experiment ID: 108522 Result: Down-regulated in Transcription
  misc_feature: MA Experiment 108522 PARAMETER Experiment Name: Zm_42deg_Heat_P Parameter: Age (day) Value: 8
  misc_feature: MA Experiment 108522 PARAMETER Experiment Name: Zm_42deg_Heat_P Parameter: Organism Value: Zea mays
  misc_feature: MA Experiment 108522 PARAMETER Experiment Name: Zm_42deg_Heat_P Parameter: Plant Line Value: 35A19
  misc_feature: MA Experiment 108522 PARAMETER Experiment Name: Zm_42deg_Heat_P Parameter: Temperature (deg C) Value: 42 vs. 22
  misc_feature: MA Experiment 108522 PARAMETER Experiment Name: Zm_42deg_Heat_P Parameter: Timepoint (hr) Value: 1
  misc_feature: MA Experiment 108522 PARAMETER Experiment Name: Zm_42deg_Heat_P Parameter: Tissue Value: Aerial
  misc_feature: MA Experiment ID: 108535 Result: Down-regulated in Transcription
  misc_feature: MA Experiment 108535 PARAMETER Experiment Name: Zm_Meristem_P Parameter: Age (day) Value: 8
  misc_feature: MA Experiment 108535 PARAMETER Experiment Name: Zm_Meristem_P Parameter: Organism Value: Zea mays
  misc_feature: MA Experiment 108535 PARAMETER Experiment Name: Zm_Meristem_P Parameter: Plant Line Value: 35A19
  misc_feature: MA Experiment 108535 PARAMETER Experiment Name: Zm_Meristem_P Parameter: Tissue Value: Root Meristem vs. Above Root Meristem
  misc_feature: MA Experiment ID: 108542 Result: Down-regulated in Transcription
  misc_feature: MA Experiment 108542 PARAMETER Experiment Name: Zm_150mM_NaCl_P Parameter: Age (day) Value: 8
  misc_feature: MA Experiment 108542 PARAMETER Experiment Name: Zm_150mM_NaCl_P Parameter: Organism Value: Zea mays
  misc_feature: MA Experiment 108542 PARAMETER Experiment Name: Zm_150mM_NaCl_P Parameter: Plant Line Value: 35A19
  misc_feature: MA Experiment 108542 PARAMETER Experiment Name: Zm_150mM_NaCl_P Parameter: Timepoint (hr) Value: 6
  misc_feature: MA Experiment 108542 PARAMETER Experiment Name: Zm_150mM_NaCl_P Parameter: Tissue Value: Aerial
  misc_feature: MA Experiment 108542 PARAMETER Experiment Name: Zm_150mM_NaCl_P Parameter: Treatment Value: 150mM NaCl vs. No Treatment
  misc_feature: MA Experiment ID: 108543 Result: Up-regulated in Transcription
  misc_feature: MA Experiment ID: 108597 Result: Down-regulated in Transcription
  misc_feature: MA Experiment 108597 PARAMETER Experiment Name: Zm_100uM_ABA_P Parameter: Age (day) Value: 9
  misc_feature: MA Experiment 108597 PARAMETER Experiment Name: Zm_100uM_ABA_P Parameter: Organism Value: Zea mays
  misc_feature: MA Experiment 108597 PARAMETER Experiment Name: Zm_100uM_ABA_P Parameter: Plant Line Value: 35A19
  misc_feature: MA Experiment 108597 PARAMETER Experiment Name: Zm_100uM_ABA_P Parameter: Timepoint (hr) Value: 24
  misc_feature: MA Experiment 108597 PARAMETER Experiment Name: Zm_100uM_ABA_P Parameter: Tissue Value: Aerial
  misc_feature: MA Experiment 108597 PARAMETER Experiment Name: Zm_100uM_ABA_P Parameter: Treatment Value: 100uM ABA vs. No Treatment
  misc_feature: MA Experiment ID: 108689 Result: Down-regulated in Transcription
  misc_feature: MA Experiment 108689 PARAMETER Experiment Name: Zm_Drought_Roots_P Parameter: Age (day) Value: 9
  misc_feature: MA Experiment 108689 PARAMETER Experiment Name: Zm_Drought_Roots_P Parameter: Organism Value: Zea mays
  misc_feature: MA Experiment 108689 PARAMETER Experiment Name: Zm_Drought_Roots_P Parameter: Plant Line Value: 35A19
  misc_feature: MA Experiment 108689 PARAMETER Experiment Name: Zm_Drought_Roots_P Parameter: Timepoint (hr) Value: 24
  misc_feature: MA Experiment 108689 PARAMETER Experiment Name: Zm_Drought_Roots_P Parameter: Tissue Value: Roots
  misc_feature: MA Experiment 108689 PARAMETER Experiment Name: Zm_Drought_Roots_P Parameter: Treatment Value: Drought vs. No Drought
  misc_feature: MA Experiment ID: 20000479 Result: Down-regulated in Transcription
  misc_feature: MA Experiment 20000479 PARAMETER Experiment Name: Zm_Drought_P Parameter: Age (day) Value: 10
  misc_feature: MA Experiment 20000479 PARAMETER Experiment Name: Zm_Drought_P Parameter: Organism Value: Zea mays
  misc_feature: MA Experiment 20000479 PARAMETER Experiment Name: Zm_Drought_P Parameter: Plant Line Value: 35A19
  misc_feature: MA Experiment 20000479 PARAMETER Experiment Name: Zm_Drought_P Parameter: Timepoint (hr) Value: 48
  misc_feature: MA Experiment 20000479 PARAMETER Experiment Name: Zm_Drought_P Parameter: Tissue Value: Aerial
  misc_feature: MA Experiment 20000479 PARAMETER Experiment Name: Zm_Drought_P Parameter: Treatment Value: Drought vs. No Drought
  misc_feature: MA Experiment ID: 20000480 Result: Down-regulated in Transcription
  misc_feature: MA Experiment 20000480 PARAMETER Experiment Name: Zm_Drought_P Parameter: Age (day) Value: 11
  misc_feature: MA Experiment 20000480 PARAMETER Experiment Name: Zm_Drought_P Parameter: Organism Value: Zea mays
  misc_feature: MA Experiment 20000480 PARAMETER Experiment Name: Zm_Drought_P Parameter: Plant Line Value: 35A19
  misc_feature: MA Experiment 20000480 PARAMETER Experiment Name: Zm_Drought_P Parameter: Timepoint (hr) Value: 72
  misc_feature: MA Experiment 20000480 PARAMETER Experiment Name: Zm_Drought_P Parameter: Tissue Value: Aerial
  misc_feature: MA Experiment 20000480 PARAMETER Experiment Name: Zm_Drought_P Parameter: Treatment Value: Drought vs. No Drought
  misc_feature: MA Experiment ID: 20000492 Result: Down-regulated in Transcription
  misc_feature: MA Experiment 20000492 PARAMETER Experiment Name: Zm_Hybrid_Seed_Dev_P Parameter: DAP Value: 12
  misc_feature: MA Experiment 20000492 PARAMETER Experiment Name: Zm_Hybrid_Seed_Dev_P Parameter: Organism Value: Zea mays
  misc_feature: MA Experiment 20000492 PARAMETER Experiment Name: Zm_Hybrid_Seed_Dev_P Parameter: Plant Line Value: 35A19
  misc_feature: MA Experiment 20000492 PARAMETER Experiment Name: Zm_Hybrid_Seed_Dev_P Parameter: Tissue Value: Fert Kernel vs. Unfert Floret
  misc_feature: MA Experiment ID: 20000535 Result: Down-regulated in Transcription
  misc_feature: MA Experiment 20000535 PARAMETER Experiment Name: Zm_Hybrid_Seed_Dev_P Parameter: DAP Value: 30 vs. 12
  misc_feature: MA Experiment 20000535 PARAMETER Experiment Name: Zm_Hybrid_Seed_Dev_P Parameter: Organism Value: Zea mays
  misc_feature: MA Experiment 20000535 PARAMETER Experiment Name: Zm_Hybrid_Seed_Dev_P Parameter: Plant Line Value: 35A19
  misc_feature: MA Experiment 20000535 PARAMETER Experiment Name: Zm_Hybrid_Seed_Dev_P Parameter: Tissue Value: Embryo vs. Unfert Floret
tagaacatcctaatcaaaagaccaaccagccaaaacacgcccgcgcgcctgtttgttcggccggaggacgccatggccatggaggagggatcaggagcggtggagaaagggccggccgtgggcacggtggctgacgcctccgccagcgtcatcggcgaaggcgccgtgaaggaggaggccgggggcagacggcagccgtcggccggctacgcggccgtcgtgattggcggcaccttcgaccgcctacaccagggccaccatctcttcctgaaggcggcagcggagctggcgagggagaggatcgtggtcggcgtctgcgacggcccgatgctcgccaagaaacagtacgccgacctgatacaaccgatcgagaagcggatgcagaacgccaaggattatattaagtccataaagcccgaccttgatgttcatgtggagcccatcgtcgaccctttcggcccatccatcgttgacccaggccttgaggccatcattgtcagcaaggagacgttgccgggagggcacgctgtcaacaggaagagagcagagagagggctcactcagctgcagatcgaggtgatagagctggtgccagaggagtcgacgggggacaagataagttccacggcattcagaaagatggaagccgagagggcgctgcagcaacagaataaacaagaagatacagcagtaggcactccggttggggtgcaaaacatagcggttcagtcacatggagcatagtacatgaaccgaagttctgttgcctgtacctttttttaaaaaagtacatgaaactttgaggtctctacttccatcacatacaaagggacaatgcttctttgcccaaacatggactgatcatcaatacagaaaagttccagtttctt

SEQ ID NO: 19256 - protein, 223 aa, Zea mays subsp. mays
  peptide (1)..(223): Ceres Seq. ID no. 13499378
  misc_feature (40)..(217): Homolog of NCBI NO: 34873748 NR Description: similar to CoA synthase [Rattus norvegicus]
  misc_feature (36)..(189): Homolog of NCBI NO: 22095395 NR Description: nucleotide binding protein
  misc_feature (36)..(189): Homolog of NCBI NO: 17981025 NR Description: phosphopantetheine adenylyltransferase /
  misc_feature (40)..(217): Homolog of NCBI NO: 40555799 NR Description: 1300003G02Rik protein [Mus musculus]
  misc_feature (40)..(217): Homolog of NCBI NO: 27229125 NR Description: CoA synthase
  misc_feature (36)..(217): Homolog of NCBI NO: 20465246 NR Description: bifunctional phosphopantetheine adenylyl
  misc_feature (26)..(197): Homolog of NCBI NO: 25143409 NR Description: Cytidylyltransferase and Dephospho-CoA kinase
  misc_feature (35)..(200): Homolog of NCBI NO: 39589394 NR Description: Hypothetical protein CBG22156 [Caenorhabditis
  misc_feature (46)..(199): Homolog of NCBI NO: 34393473 NR Description: bifunctional phosphopantetheine adenylyl
  misc_feature (39)..(206): Homolog of NCBI NO: 15224138 NR Description: cytidylyltransferase domain-containing protein
MAMEEGSGAVEKGPAVGTVADASASVIGEGAVKEEAGGRRQPSAGYAAVVIGGTFDRLHQGHHLFLKAAAELARERIVVGVCDGPMLAKKQYADLIQPIEKRMQNAKDYIKSIKPDLDVHVEPIVDPFGPSIVDPGLEAIIVSKETLPGGHAVNRKRAERGLTQLQIEVIELVPEESTGDKISSTAFRKMEAERALQQQNKQEDTAVGTPVGVQNIAVQSHGA

SEQ ID NO: 19257 - protein, 221 aa, Zea mays subsp. mays
  peptide (1)..(221): Ceres Seq. ID no. 13499379
  misc_feature (38)..(215): Homolog of NCBI NO: 34873748 NR Description: similar to CoA synthase [Rattus norvegicus]
  misc_feature (34)..(187): Homolog of NCBI NO: 22095395 NR Description: nucleotide binding protein
  misc_feature (34)..(187): Homolog of NCBI NO: 17981025 NR Description: phosphopantetheine adenylyltransferase /
  misc_feature (38)..(215): Homolog of NCBI NO: 40555799 NR Description: 1300003G02Rik protein [Mus musculus]
  misc_feature (38)..(215): Homolog of NCBI NO: 27229125 NR Description: CoA synthase
  misc_feature (34)..(215): Homolog of NCBI NO: 20465246 NR Description: bifunctional phosphopantetheine adenylyl
  misc_feature (24)..(195): Homolog of NCBI NO: 25143409 NR Description: Cytidylyltransferase and Dephospho-CoA kinase
  misc_feature (33)..(198): Homolog of NCBI NO: 39589394 NR Description: Hypothetical protein CBG22156 [Caenorhabditis
  misc_feature (44)..(197): Homolog of NCBI NO: 34393473 NR Description: bifunctional phosphopantetheine adenylyl
  misc_feature (37)..(204): Homolog of NCBI NO: 15224138 NR Description: cytidylyltransferase domain-containing protein
MEEGSGAVEKGPAVGTVADASASVIGEGAVKEEAGGRRQPSAGYAAVVIGGTFDRLHQGHHLFLKAAAELARERIVVGVCDGPMLAKKQYADLIQPIEKRMQNAKDYIKSIKPDLDVHVEPIVDPFGPSIVDPGLEAIIVSKETLPGGHAVNRKRAERGLTQLQIEVIELVPEESTGDKISSTAFRKMEAERALQQQNKQEDTAVGTPVGVQNIAVQSHGA

SEQ ID NO: 19258 - protein, 138 aa, Zea mays subsp. mays
  peptide (1)..(138): Ceres Seq. ID no. 13499380
  misc_feature (1)..(132): Homolog of NCBI NO: 34873748 NR Description: similar to CoA synthase [Rattus norvegicus]
  misc_feature (1)..(104): Homolog of NCBI NO: 22095395 NR Description: nucleotide binding protein
  misc_feature (1)..(104): Homolog of NCBI NO: 17981025 NR Description: phosphopantetheine adenylyltransferase /
  misc_feature (1)..(132): Homolog of NCBI NO: 40555799 NR Description: 1300003G02Rik protein [Mus musculus]
  misc_feature (1)..(132): Homolog of NCBI NO: 27229125 NR Description: CoA synthase
  misc_feature (1)..(132): Homolog of NCBI NO: 20465246 NR Description: bifunctional phosphopantetheine adenylyl
  misc_feature (1)..(112): Homolog of NCBI NO: 25143409 NR Description: Cytidylyltransferase and Dephospho-CoA kinase
  misc_feature (1)..(115): Homolog of NCBI NO: 39589394 NR Description: Hypothetical protein CBG22156 [Caenorhabditis
  misc_feature (1)..(114): Homolog of NCBI NO: 34393473 NR Description: bifunctional phosphopantetheine adenylyl
  misc_feature (1)..(121): Homolog of NCBI NO: 15224138 NR Description: cytidylyltransferase domain-containing protein
MLAKKQYADLIQPIEKRMQNAKDYIKSIKPDLDVHVEPIVDPFGPSIVDPGLEAIIVSKETLPGGHAVNRKRAERGLTQLQIEVIELVPEESTGDKISSTAFRKMEAERALQQQNKQEDTAVGTPVGVQNIAVQSHGA

SEQ ID NO: 19259 - DNA, 434 bp, Zea mays subsp. mays
  misc_feature (1)..(434): Ceres Seq. ID no. 1852863
  misc_feature: MA Experiment ID: 20000627 Result: Up-regulated in Transcription
  misc_feature: MA Experiment 20000627 PARAMETER Experiment Name: Zm_Herbicide-Treatments_P Parameter: Timepoint (hr) Value: 12
  misc_feature: MA Experiment 20000627 PARAMETER Experiment Name: Zm_Herbicide-Treatments_P Parameter: Tissue Value: Aerial
  misc_feature: MA Experiment 20000627 PARAMETER Experiment Name: Zm_Herbicide-Treatments_P Parameter: Treatment Value: Finale vs. No Treatment
aaaaatgtgtaccttcagtactcaaatagacaggagattgtcaacaacaaggcaactggggaaggttcaggcaacgttttgcttgtgggaatggagggtgttgcaccagattctgtcagcattgatgttctacacgtggtattttctgctttcggatttgttcataagatcgctacctttgagaaagcatctggttatcaggctttgattcagttttctgatgctgaaactgcaacatctgcaaaagctgcactggatggtagatgcattcctagctatttgctaccagaactggatgtggcctgcactttgagaataacctattcagcacacagtgttctcaacgtcaagtatcagagccacaggagtagggacttcactaatccttaccttccttttctggactctgcyaaagatggctctggaccggatgg

SEQ ID NO: 19260 - protein, 144 aa, Zea mays subsp. mays
  peptide (1)..(144): Ceres Seq. ID no. 1852864
  misc_feature (39)..(90): Pfam Name: RNA recognition motif. (a.k.a. RRM, RBD, or RNP domain) Pfam Description: RNA recognition motif. (a.k.a. RRM, RBD, or RNP
  misc_feature (1)..(141): Homolog of NCBI NO: 15232047 NR Description: polypyrimidine tract-binding protein (PTB)
  misc_feature (1)..(141): Homolog of NCBI NO: 11358627 NR Description: polypyrimidine tract-binding protein homolog
  misc_feature (1)..(132): Homolog of NCBI NO: 22329999 NR Description: heterogeneous nuclear ribonucleoprotein (hnRNP),
  misc_feature (21)..(129): Homolog of NCBI NO: 18921326 NR Description: putative polypyrimidine tract-binding protein
  misc_feature (124)..(143): Homolog of NCBI NO: 34912728 NR Description: putative polypyrimidine tract-binding protein
  misc_feature (1)..(101): Homolog of NCBI NO: 34912728 NR Description: putative polypyrimidine tract-binding protein
  misc_feature (43)..(141): Homolog of NCBI NO: 20260638 NR Description: putative polypyrimidine tract-binding protein
  misc_feature (21)..(132): Homolog of NCBI NO: 15238677 NR Description: polypyrimidine tract-binding protein (PTB),
  misc_feature (1)..(142): Homolog of NCBI NO: 15238677 NR Description: polypyrimidine tract-binding protein (PTB),
  misc_feature (1)..(143): Homolog of NCBI NO: 18921326 NR Description: putative polypyrimidine tract-binding protein
  misc_feature (137)..(137): Xaa is any aa, unknown or other
KNVYLQYSNRQEIVNNKATGEGSGNVLLVGMEGVAPDSVSIDVLHVVFSAFGFVHKIATFEKASGYQALIQFSDAETATSAKAALDGRCIPSYLLPELDVACTLRITYSAHSVLNVKYQSHRSRDFTNPYLPFLDSXKDGSGPD

SEQ ID NO: 19261 - protein, 114 aa, Zea mays subsp. mays
  peptide (1)..(114): Ceres Seq. ID no. 1852865
  misc_feature (9)..(60): Pfam Name: RNA recognition motif. (a.k.a. RRM, RBD, or RNP domain) Pfam Description: RNA recognition motif. (a.k.a. RRM, RBD, or RNP
  misc_feature (1)..(102): Homolog of NCBI NO: 22329999 NR Description: heterogeneous nuclear ribonucleoprotein (hnRNP),
  misc_feature (1)..(102): Homolog of NCBI NO: 15238677 NR Description: polypyrimidine tract-binding protein (PTB),
  misc_feature (1)..(99): Homolog of NCBI NO: 18921326 NR Description: putative polypyrimidine tract-binding protein
  misc_feature (13)..(111): Homolog of NCBI NO: 20260638 NR Description: putative polypyrimidine tract-binding protein
  misc_feature (94)..(113): Homolog of NCBI NO: 34912728 NR Description: putative polypyrimidine tract-binding protein
  misc_feature (1)..(71): Homolog of NCBI NO: 34912728 NR Description: putative polypyrimidine tract-binding protein
  misc_feature (1)..(111): Homolog of NCBI NO: 15232047 NR Description: polypyrimidine tract-binding protein (PTB)
  misc_feature (1)..(111): Homolog of NCBI NO: 11358627 NR Description: polypyrimidine tract-binding protein homolog
  misc_feature (1)..(112): Homolog of NCBI NO: 15238677 NR Description: polypyrimidine tract-binding protein (PTB),
  misc_feature (1)..(113): Homolog of NCBI NO: 18921326 NR Description: putative polypyrimidine tract-binding protein
  misc_feature (107)..(107): Xaa is any aa, unknown or other
MEGVAPDSVSIDVLHVVFSAFGFVHKIATFEKASGYQALIQFSDAETATSAKAALDGRCIPSYLLPELDVACTLRITYSAHSVLNVKYQSHRSRDFTNPYLPFLDSXKDGSGPD

SEQ ID NO: 19262 - DNA, 1838 bp, Zea mays subsp. mays; identical to SEQ ID NO: 8854
  misc_feature (1)..(1838): Ceres Seq. ID no. 12372855
  misc_feature: MA Experiment ID: 108535 Result: Down-regulated in Transcription
  misc_feature: MA Experiment 108535 PARAMETER Experiment Name: Zm_Meristem_P Parameter: Age (day) Value: 8
  misc_feature: MA Experiment 108535 PARAMETER Experiment Name: Zm_Meristem_P Parameter: Organism Value: Zea mays
  misc_feature: MA Experiment 108535 PARAMETER Experiment Name: Zm_Meristem_P Parameter: Plant Line Value: 35A19
  misc_feature: MA Experiment 108535 PARAMETER Experiment Name: Zm_Meristem_P Parameter: Tissue Value: Root Meristem vs. Above Root Meristem
  misc_feature: MA Experiment ID: 108687 Result: Up-regulated in Transcription
  misc_feature: MA Experiment 108687 PARAMETER Experiment Name: Zm_Embryos-Flowers__P Parameter: Tissue Value: Embryo vs. Aerial+
  misc_feature: MA Experiment ID: 20000534 Result: Down-regulated in Transcription
  misc_feature: MA Experiment 20000534 PARAMETER Experiment Name: Zm_Hybrid_Pollen_P Parameter: Age (day) Value: 8
  misc_feature: MA Experiment 20000534 PARAMETER Experiment Name: Zm_Hybrid_Pollen_P Parameter: Organism Value: Zea mays
  misc_feature: MA Experiment 20000534 PARAMETER Experiment Name: Zm_Hybrid_Pollen_P Parameter: Plant Line Value: 35A19
  misc_feature: MA Experiment 20000534 PARAMETER Experiment Name: Zm_Hybrid_Pollen_P Parameter: Tissue Value: Pollen vs. Aerial

SEQ ID NO: 19263 - protein, 551 aa, Zea mays subsp. mays; identical to SEQ ID NO: 8855
  peptide (1)..(551): Ceres Seq. ID no. 12372856
  misc_feature (281)..(526): Pfam Name: Shikimate / quinate 5-dehydrogenase Pfam Description: Shikimate / quinate 5-dehydrogenase
  misc_feature (94)..(539): Homolog of NCBI NO: 34914824 NR Description: putative 3-dehydroquinate dehydratase [Oryza
  misc_feature (33)..(95): Homolog of NCBI NO: 34914824 NR Description: putative 3-dehydroquinate dehydratase [Oryza
  misc_feature (33)..(525): Homolog of NCBI NO: 34914828 NR Description: putative 3-dehydroquinate dehydratase / shikimate
  misc_feature (28)..(528): Homolog of NCBI NO: 15230703 NR Description: dehydroquinate dehydratase/shikimate putative; protein id: At3g06350.1 [Arabidopsis thaliana] putative dehydroquinase shikimate dehydrogenase [Arabidopsis
  misc_feature (96)..(540): Homolog of NCBI NO: 7436862 NR Description: 3-dehydroquinate dehydratase (EC 4.2.1.10) /
  misc_feature (27)..(94): Homolog of NCBI NO: 7436862 NR Description: 3-dehydroquinate dehydratase (EC 4.2.1.10) /
  misc_feature (27)..(527): Homolog of NCBI NO: 629688 NR Description: 3-dehydroquinate dehydratase (EC 4.2.1.10) /
  misc_feature (33)..(352): Homolog of NCBI NO: 7488788 NR Description: 3-dehydroquinate dehydratase (EC 4.2.1.10) /
  misc_feature (264)..(551): Homolog of NCBI NO: 21402380 NR Description: Shikimate_DH, Shikimate / quinate 5-dehydrogenase
  misc_feature (264)..(526): Homolog of NCBI NO: 30022412 NR Description: Shikimate 5-dehydrogenase [Bacillus cereus ATCC

SEQ ID NO: 19264 - protein, 540 aa, Zea mays subsp. mays; identical to SEQ ID NO: 8856
  peptide (1)..(540): Ceres Seq. ID no. 12372857
  misc_feature (270)..(515): Pfam Name: Shikimate / quinate 5-dehydrogenase Pfam Description: Shikimate / quinate 5-dehydrogenase
  misc_feature (83)..(528): Homolog of NCBI NO: 34914824 NR Description: putative 3-dehydroquinate dehydratase [Oryza
  misc_feature (22)..(84): Homolog of NCBI NO: 34914824 NR Description: putative 3-dehydroquinate dehydratase [Oryza
  misc_feature (22)..(514): Homolog of NCBI NO: 34914828 NR Description: putative 3-dehydroquinate dehydratase / shikimate
  misc_feature (17)..(517): Homolog of NCBI NO: 15230703 NR Description: dehydroquinate dehydratase/shikimate putative; protein id: At3g06350.1 [Arabidopsis thaliana] putative dehydroquinase shikimate dehydrogenase [Arabidopsis
  misc_feature (85)..(529): Homolog of NCBI NO: 7436862 NR Description: 3-dehydroquinate dehydratase (EC 4.2.1.10) /
  misc_feature (16)..(83): Homolog of NCBI NO: 7436862 NR Description: 3-dehydroquinate dehydratase (EC 4.2.1.10) /
  misc_feature (16)..(516): Homolog of NCBI NO: 629688 NR Description: 3-dehydroquinate dehydratase (EC 4.2.1.10) /
  misc_feature (22)..(341): Homolog of NCBI NO: 7488788 NR Description: 3-dehydroquinate dehydratase (EC 4.2.1.10) /
  misc_feature (253)..(540): Homolog of NCBI NO: 21402380 NR Description: Shikimate_DH, Shikimate / quinate 5-dehydrogenase
  misc_feature (253)..(515): Homolog of NCBI NO: 30022412 NR Description: Shikimate 5-dehydrogenase [Bacillus cereus ATCC

SEQ ID NO: 19265 - protein, 536 aa, Zea mays subsp. mays; identical to SEQ ID NO: 8857
  peptide (1)..(536): Ceres Seq. ID no. 12372858
  misc_feature (266)..(511): Pfam Name: Shikimate / quinate 5-dehydrogenase Pfam Description: Shikimate / quinate 5-dehydrogenase
  misc_feature (79)..(524): Homolog of NCBI NO: 34914824 NR Description: putative 3-dehydroquinate dehydratase [Oryza
  misc_feature (18)..(80): Homolog of NCBI NO: 34914824 NR Description: putative 3-dehydroquinate dehydratase [Oryza
  misc_feature (18)..(510): Homolog of NCBI NO: 34914828 NR Description: putative 3-dehydroquinate dehydratase / shikimate
  misc_feature (13)..(513): Homolog of NCBI NO: 15230703 NR Description: dehydroquinate dehydratase/shikimate putative; protein id: At3g06350.1 [Arabidopsis thaliana] putative dehydroquinase shikimate dehydrogenase [Arabidopsis
  misc_feature (81)..(525): Homolog of NCBI NO: 7436862 NR Description: 3-dehydroquinate dehydratase (EC 4.2.1.10) /
  misc_feature (12)..(79): Homolog of NCBI NO: 7436862 NR Description: 3-dehydroquinate dehydratase (EC 4.2.1.10) /
  misc_feature (12)..(512): Homolog of NCBI NO: 629688 NR Description: 3-dehydroquinate dehydratase (EC 4.2.1.10) /
  misc_feature (18)..(337): Homolog of NCBI NO: 7488788 NR Description: 3-dehydroquinate dehydratase (EC 4.2.1.10) /
  misc_feature (249)..(536): Homolog of NCBI NO: 21402380 NR Description: Shikimate_DH, Shikimate / quinate 5-dehydrogenase
  misc_feature (249)..(511): Homolog of NCBI NO: 30022412 NR Description: Shikimate 5-dehydrogenase [Bacillus cereus ATCC

SEQ ID NO: 19266 - DNA, 1189 bp, Zea mays subsp. mays
  misc_feature (1)..(1189): Ceres Seq. ID no. 12358770
  misc_feature: MA Experiment ID: 108687 Result: Up-regulated in Transcription
  misc_feature: MA Experiment 108687 PARAMETER Experiment Name: Zm_Embryos-Flowers__P Parameter: Tissue Value: Embryo vs. Aerial+
actatatatacagacaccatgcatgtcatcgtctctcgatctattcgatcgacaagccgtgtgttgagtcatttcaaaacaaccagagaaacacatggccaacatccccaagtatcgctggacccaaaaccccttaatccttctatcttgcgctggtgcggtgctggcagtttctactctgatgctgccagtgcctgctgcatcccaaactataaatttcaagaatctttgcattggtgtccataagatcctagacgcatgtgtgggtgccaatgccgaactacgccaagtgtctatggccgccggtgcgaggaacgctagggcgctcctgcttaacagtcagggtatatctgggccacttcccacgggtttgggcgccttctccaacttgagttacgtcgccctcgccaacaacaagctcaccgggccaatcccaccatcagtcgggcacctgcaccactccctccgcgagattgtcttcctcaacaaccagctctccggctgcctccccggcgagctagggatgctcagcaaggcggtcgtcatggacgccggcatgaatcagctcaccggtccaatccctcctctcttttcctgcctcagcagagtcgagcagctcaacctggccgggaaccgcctctatggccatgttcccgacgctctctgcaggctcgcggggccggctggccgcctttccaatctaaccttgtctggcaactactttgtcgccgtcgggccggcatgcgcagcgctgatcaaagacggcgtcctggacgtgaagaacaactgcatttcgggctttgccaaccagaggcctccggcggagtgtgcagcgttccagagccagccaaagacgtgcccggaggaggcgagcactcaggtgtcatgcccagccgcagctaccatgcacatgaacgctgcgccgccgagggatcagcggaagaccaccagggactactacagctacgtgacgtacgctagcctgcgttagtgaggcgccacgtacggccatgcaatgacgcgccaccagtacctatagctggaacttggctatatgtgttatcttcttgtatcattattaattattttgtaccatgcatgtgttggtgtgctgcttgtgattgttgtttgttcgtttgtatcaggtgctactggcatatcttatatattacacgccacttgttagtgt

SEQ ID NO: 19267 - protein, 298 aa, Zea mays subsp. mays
  peptide (1)..(298): Ceres Seq. ID no. 12358771
  misc_feature (74)..(266): Homolog of NCBI NO: 15228861 NR Description: hypothetical protein; protein id: At3g22800.1
  misc_feature (77)..(258): Homolog of NCBI NO: 15235186 NR Description: extensin-like protein; protein id: At4g33970.1
  misc_feature (65)..(255): Homolog of NCBI NO: 5917664 NR Description: extensin-like protein [Lycopersicon esculentum]
  misc_feature (77)..(283): Homolog of NCBI NO: 15226640 NR Description: unknown protein; protein id: At2g15880.1
  misc_feature (77)..(267): Homolog of NCBI NO: 15233499 NR Description: extensin-like protein
  misc_feature (77)..(276): Homolog of NCBI NO: 15224840 NR Description: putative disease resistance protein; protein id:
  misc_feature (73)..(256): Homolog of NCBI NO: 30680322 NR Description: extensin-related protein [Arabidopsis thaliana]
  misc_feature (78)..(256): Homolog of NCBI NO: 15230349 NR Description: unknown protein; protein id: At3g19320.1
  misc_feature (78)..(297): Homolog of NCBI NO: 15222811 NR Description: unknown protein; protein id: At1g49750.1
  misc_feature (76)..(297): Homolog of NCBI NO: 32490271 NR Description: OSJNBb0116K07.13 [Oryza sativa (japonica
MANIPKYRWTQNPLILLSCAGAVLAVSTLMLPVPAASQTINFKNLCIGVHKILDACVGANAELRQVSMAAGARNARALLLNSQGISGPLPTGLGAFSNLSYVALANNKLTGPIPPSVGHLHHSLREIVFLNNQLSGCLPGELGMLSKAVVMDAGMNQLTGPIPPLFSCLSRVEQLNLAGNRLYGHVPDALCRLAGPAGRLSNLTLSGNYFVAVGPACAALIKDGVLDVKNNCISGFANQRPPAECAAFQSQPKTCPEEASTQVSCPAAATMHMNAAPPRDQRKTTRDYYSYVTYASLR

SEQ ID NO: 19268 - protein, 269 aa, Zea mays subsp. mays
  peptide (1)..(269): Ceres Seq. ID no. 12358772
  misc_feature (45)..(237): Homolog of NCBI NO: 15228861 NR Description: hypothetical protein; protein id: At3g22800.1
  misc_feature (48)..(229): Homolog of NCBI NO: 15235186 NR Description: extensin-like protein; protein id: At4g33970.1
  misc_feature (36)..(226): Homolog of NCBI NO: 5917664 NR Description: extensin-like protein [Lycopersicon esculentum]
  misc_feature (48)..(254): Homolog of NCBI NO: 15226640 NR Description: unknown protein; protein id: At2g15880.1
  misc_feature (48)..(238): Homolog of NCBI NO: 15233499 NR Description: extensin-like protein
  misc_feature (48)..(247): Homolog of NCBI NO: 15224840 NR Description: putative disease resistance protein; protein id:
  misc_feature (44)..(227): Homolog of NCBI NO: 30680322 NR Description: extensin-related protein [Arabidopsis thaliana]
  misc_feature (49)..(227): Homolog of NCBI NO: 15230349 NR Description: unknown protein; protein id: At3g19320.1
  misc_feature (49)..(268): Homolog of NCBI NO: 15222811 NR Description: unknown protein; protein id: At1g49750.1
  misc_feature (47)..(268): Homolog of NCBI NO: 32490271 NR Description: OSJNBb0116K07.13 [Oryza sativa (japonica
MLPVPAASQTINFKNLCIGVHKILDACVGANAELRQVSMAAGARNARALLLNSQGISGPLPTGLGAFSNLSYVALANNKLTGPIPPSVGHLHHSLREIVFLNNQLSGCLPGELGMLSKAVVMDAGMNQLTGPIPPLFSCLSRVEQLNLAGNRLYGHVPDALCRLAGPAGRLSNLTLSGNYFVAVGPACAALIKDGVLDVKNNCISGFANQRPPAECAAFQSQPKTCPEEASTQVSCPAAATMHMNAAPPRDQRKTTRDYYSYVTYASLR

SEQ ID NO: 19269 - protein, 231 aa, Zea mays subsp. mays
  peptide (1)..(231): Ceres Seq. ID no. 12358773
  misc_feature (9)..(230): Homolog of NCBI NO: 32490271 NR Description: OSJNBb0116K07.13 [Oryza sativa (japonica
  misc_feature (7)..(199): Homolog of NCBI NO: 15228861 NR Description: hypothetical protein; protein id: At3g22800.1
  misc_feature (10)..(191): Homolog of NCBI NO: 15235186 NR Description: extensin-like protein; protein id: At4g33970.1
  misc_feature (1)..(188): Homolog of NCBI NO: 5917664 NR Description: extensin-like protein [Lycopersicon esculentum]
  misc_feature (10)..(216): Homolog of NCBI NO: 15226640 NR Description: unknown protein; protein id: At2g15880.1
  misc_feature (10)..(200): Homolog of NCBI NO: 15233499 NR Description: extensin-like protein
  misc_feature (10)..(209): Homolog of NCBI NO: 15224840 NR Description: putative disease resistance protein; protein id:
  misc_feature (6)..(189): Homolog of NCBI NO: 30680322 NR Description: extensin-related protein [Arabidopsis thaliana]
  misc_feature (11)..(189): Homolog of NCBI NO: 15230349 NR Description: unknown protein; protein id: At3g19320.1
  misc_feature (11)..(230): Homolog of NCBI NO: 15222811 NR Description: unknown protein; protein id: At1g49750.1
MAAGARNARALLLNSQGISGPLPTGLGAFSNLSYVALANNKLTGPIPPSVGHLHHSLREIVFLNNQLSGCLPGELGMLSKAVVMDAGMNQLTGPIPPLFSCLSRVEQLNLAGNRLYGHVPDALCRLAGPAGRLSNLTLSGNYFVAVGPACAALIKDGVLDVKNNCISGFANQRPPAECAAFQSQPKTCPEEASTQVSCPAAATMHMNAAPPRDQRKTTRDYYSYVTYASLR

SEQ ID NO: 19270 - DNA, 1588 bp, Zea mays subsp. mays
  misc_feature (1)..(1588): Ceres Seq. ID no. 12376845
  misc_feature: MA Experiment ID: 108529 Result: Up-regulated in Transcription
  misc_feature: MA Experiment 108529 PARAMETER Experiment Name: Zm_Imbibed_Seeds_P Parameter: Age (day) Value: 5 vs. 2
  misc_feature: MA Experiment 108529 PARAMETER Experiment Name: Zm_Imbibed_Seeds_P Parameter: Organism Value: Zea mays
  misc_feature: MA Experiment 108529 PARAMETER Experiment Name: Zm_Imbibed_Seeds_P Parameter: Plant Line Value: 35A19
  misc_feature: MA Experiment 108529 PARAMETER Experiment Name: Zm_Imbibed_Seeds_P Parameter: Tissue Value: Roots vs. Embryo
  misc_feature: MA Experiment ID: 108535 Result: Down-regulated in Transcription
  misc_feature: MA Experiment 108535 PARAMETER Experiment Name: Zm_Meristem_P Parameter: Age (day) Value: 8
  misc_feature: MA Experiment 108535 PARAMETER Experiment Name: Zm_Meristem_P Parameter: Organism Value: Zea mays
  misc_feature: MA Experiment 108535 PARAMETER Experiment Name: Zm_Meristem_P Parameter: Plant Line Value: 35A19
  misc_feature: MA Experiment 108535 PARAMETER Experiment Name: Zm_Meristem_P Parameter: Tissue Value: Root Meristem vs. Above Root Meristem
  misc_feature: MA Experiment ID: 108543 Result: Down-regulated in Transcription
  misc_feature: MA Experiment ID: 108546 Result: Up-regulated in Transcription
  misc_feature: MA Experiment 108546 PARAMETER Experiment Name: Zm_Imbibed_Seeds_P Parameter: Age (day) Value: 3 vs. 2
  misc_feature: MA Experiment 108546 PARAMETER Experiment Name: Zm_Imbibed_Seeds_P Parameter: Organism Value: Zea mays
  misc_feature: MA Experiment 108546 PARAMETER Experiment Name: Zm_Imbibed_Seeds_P Parameter: Plant Line Value: 35A19
  misc_feature: MA Experiment 108546 PARAMETER Experiment Name: Zm_Imbibed_Seeds_P Parameter: Tissue Value: Roots vs. Embryo
gagaccattacctagaacatcctaatcgaaaaaccgattcccacgtgattgcggcgcggccgcgcgaggagtgctcgtagccctcccccccgcccgcccgcccagattcggtcgcccatggcgagggacccagcccgcaccgtcttcataggtaacttggacgaaaaggtatctgagagaatcttgtatgagattcttattcaggcaggccatgtagtagacctgcatgtacccagtgacaaggagagtaacagtctcaaaggttacgcttttgttgagtatgaaaccgaggaaatcgcacaatacgctgttaagcttttctcaggacttgttcggatcagtggtaaaacgcttaagttcatgattgctggttatgacaaaccgtcttcaaatgtcaatacctcagtaatgctcaatcctgtaccctcttcaaatggcaataatccacatatcaggtggtaaacgggaggattggaggttatgtcttttctctcactccttatccatatggttttcaagctttatcaggtggacaagtacacggccatggccagcctttgcacatcggacatacttgaaggcttgaagctgtcgtccttacagtctcatcgaccgatgccacagcgacacatgcacgaacaagagcacctgcccgactgagcgtgcacgacctcgcgccgatcagggccaagaactcacccccgtcgtgtgtgccgatggaggtggaggccgacgggatccaggaagccaccgcaggcgcaggagacggcggcggcgtggcacgcatgtcttcttctgcgtcgccgcgacgtccaggggcaacaagaacagcatctcctacttccacaccaacgcggtcggcgaggacgccgagtcggcgctcgcgctcgccgcgctctgcctcgaccacgcccccgaccaccaccggtggcaccaccacaccgtcgccggggcgaagacgttcgcgttcctctcggccgacgacggccgcacgtacttcgccgcggccgacccgagccccggcgccgccgaggtggtccggttcctggagcgcgtccgcgacgcgtgcgacgccgcgcccaggaagcgcctgcgcgacgaggcggtggcccccgtcgctcgccagttcgccaggacgctgcgggcggcggcggcgggcccgagctcaggcgcggagctaccggaggcctcgctgcaggcgaaggagccgtccacgccgctggcgccggtctgcgagaaagacgaggaggagcgccagagggccggagagcgacgtcgcgccttcttgcagccggaggaaagcgcaagcgcgcttccggggtggcgcccgtggtggcgccacgcgtcggtcgtgatcgtcgtggatgtggtgctgtgcctcgtgctgttcgccgtgtggatgggggtttgcaaaggcttcgggtgtctgcgatgaaaatcgcccgagagcatgcaattgtaaatttgtaatcacatccatgctgtgtgcatggttcgcgttctttatgttaatttgcttgtcagatatcacatctacaatttgaaggaaaaaaacggtttaagaaacgaagacgcatgccttcaatgc

SEQ ID NO: 19271 - protein, 212 aa, Zea mays subsp. mays
  peptide (1)..(212): Ceres Seq. ID no. 12376846
  misc_feature (25)..(155): Pfam Name: Mucin-like glycoprotein Pfam Description: Mucin-like glycoprotein
  misc_feature (1)..(212): Homolog of NCBI NO: 19923466 NR Description: splicing coactivator subunit SRm300
  misc_feature (1)..(212): Homolog of NCBI NO: 6649242 NR Description: splicing coactivator subunit SRm300 [Homo sapiens]
  misc_feature (1)..(212): Homolog of NCBI NO: 5821143 NR Description: RNA binding protein [Homo sapiens]
  misc_feature (1)..(212): Homolog of NCBI NO: 5821145 NR Description: RNA binding protein [Homo sapiens]
  misc_feature (1)..(208): Homolog of NCBI NO: 19923466 NR Description: splicing coactivator subunit SRm300
  misc_feature (1)..(208): Homolog of NCBI NO: 6649242 NR Description: splicing coactivator subunit SRm300 [Homo sapiens]
  misc_feature (1)..(208): Homolog of NCBI NO: 7512967 NR Description: hypothetical protein KIAA0324 - human (fragment)
  misc_feature (1)..(208): Homolog of NCBI NO: 6634015 NR Description: KIAA0324 protein [Homo sapiens]
  misc_feature (1)..(208): Homolog of NCBI NO: 5821151 NR Description: RNA binding protein [Homo sapiens]
  misc_feature (2)..(212): Homolog of NCBI NO: 25143299 NR Description: pre-mRNA splicing SR protein related RSR-1 (68.2
MEVEADGIQEATAGAGDGGGVARMSSSASPRRPGATRTASPTSTPTRSARTPSRRSRSPRSASTTPPTTTGGTTTPSPGRRRSRSSRPTTAARTSPRPTRAPAPPRWSGSWSASATRATPRPGSACATRRWPPSLASSPGRCGRRRRARAQARSYRRPRCRRRSRPRRWRRSARKTRRSARGPESDVAPSCSRRKAQARFRGGARGGATRRS

SEQ ID NO: 19272 - protein, 189 aa, Zea mays subsp. mays
  peptide (1)..(189): Ceres Seq. ID no. 12376847
  misc_feature (2)..(132): Pfam Name: Mucin-like glycoprotein Pfam Description: Mucin-like glycoprotein
  misc_feature (1)..(189): Homolog of NCBI NO: 19923466 NR Description: splicing coactivator subunit SRm300
  misc_feature (1)..(189): Homolog of NCBI NO: 6649242 NR Description: splicing coactivator subunit SRm300 [Homo sapiens]
  misc_feature (1)..(189): Homolog of NCBI NO: 5821143 NR Description: RNA binding protein [Homo sapiens]
  misc_feature (1)..(189): Homolog of NCBI NO: 5821145 NR Description: RNA binding protein [Homo sapiens]
  misc_feature (1)..(185): Homolog of NCBI NO: 19923466 NR Description: splicing coactivator subunit SRm300
  misc_feature (1)..(185): Homolog of NCBI NO: 6649242 NR Description: splicing coactivator subunit SRm300 [Homo sapiens]
  misc_feature (1)..(185): Homolog of NCBI NO: 7512967 NR Description: hypothetical protein KIAA0324 - human (fragment)
  misc_feature (1)..(185): Homolog of NCBI NO: 6634015 NR Description: KIAA0324 protein [Homo sapiens]
  misc_feature (1)..(185): Homolog of NCBI NO: 5821151 NR Description: RNA binding protein [Homo sapiens]
  misc_feature (1)..(189): Homolog of NCBI NO: 25143299 NR Description: pre-mRNA splicing SR protein related RSR-1 (68.2
MSSSASPRRPGATRTASPTSTPTRSARTPSRRSRSPRSASTTPPTTTGGTTTPSPGRRRSRSSRPTTAARTSPRPTRAPAPPRWSGSWSASATRATPRPGSACATRRWPPSLASSPGRCGRRRRARAQARSYRRPRCRRRSRPRRWRRSARKTRRSARGPESDVAPSCSRRKAQARFRGGARGGATRRS

SEQ ID NO: 19273 - protein, 114 aa, Zea mays subsp. mays
  peptide (1)..(114): Ceres Seq. ID no. 12376848
  misc_feature (9)..(81): Pfam Name: RNA recognition motif. (a.k.a. RRM, RBD, or RNP domain) Pfam Description: RNA recognition motif. (a.k.a. RRM, RBD, or RNP
  misc_feature (1)..(99): Homolog of NCBI NO: 34858075 NR Description: similar to Sf3b4 protein [Rattus norvegicus]
  misc_feature (3)..(99): Homolog of NCBI NO: 21593441 NR Description: putative spliceosome associated protein
  misc_feature (3)..(99): Homolog of NCBI NO: 15224186 NR Description: pre-mRNA splicing factor SF3b, putative
  misc_feature (3)..(99): Homolog of NCBI NO: 14334958 NR Description: putative spliceosome associated protein
  misc_feature (3)..(100): Homolog of NCBI NO: 19114913 NR Description: spliceosome associated protein 49; RNA binding
  misc_feature (3)..(99): Homolog of NCBI NO: 37535012 NR Description: putative spliceosomal protein
  misc_feature (3)..(91): Homolog of NCBI NO: 40738651 NR Description: hypothetical protein AN6501.2 [Aspergillus
  misc_feature (27)..(92): Homolog of NCBI NO: 7486312 NR Description: hypothetical protein F28M11.30 - Arabidopsis
  misc_feature (8)..(92): Homolog of NCBI NO: 30681329 NR Description: RNA recognition motif (RRM)-containing protein
  misc_feature (1)..(103): Homolog of NCBI NO: 34907328 NR Description: P0698A10.26 [Oryza sativa (japonica
MARDPARTVFIGNLDEKVSERILYEILIQAGHVVDLHVPSDKESNSLKGYAFVEYETEEIAQYAVKLFSGLVRISGKTLKFMIAGYDKPSSNVNTSVMLNPVPSSNGNNPHIRW

SEQ ID NO: 19274 - DNA, 1172 bp, Zea mays subsp. mays
  misc_feature (1)..(1172): Ceres Seq. ID no. 12424116
  misc_feature: MA Experiment ID: 108522 Result: Down-regulated in Transcription
  misc_feature: MA Experiment 108522 PARAMETER Experiment Name: Zm_42deg_Heat_P Parameter: Age (day) Value: 8
  misc_feature: MA Experiment 108522 PARAMETER Experiment Name: Zm_42deg_Heat_P Parameter: Organism Value: Zea mays
  misc_feature: MA Experiment 108522 PARAMETER Experiment Name: Zm_42deg_Heat_P Parameter: Plant Line Value: 35A19
  misc_feature: MA Experiment 108522 PARAMETER Experiment Name: Zm_42deg_Heat_P Parameter: Temperature (deg C) Value: 42 vs. 22
  misc_feature: MA Experiment 108522 PARAMETER Experiment Name: Zm_42deg_Heat_P Parameter: Timepoint (hr) Value: 1
  misc_feature: MA Experiment 108522 PARAMETER Experiment Name: Zm_42deg_Heat_P Parameter: Tissue Value: Aerial
  misc_feature: MA Experiment ID: 108528 Result: Down-regulated in Transcription
  misc_feature: MA Experiment 108528 PARAMETER Experiment Name: Zm_Imbibed_Seeds_P Parameter: Age (day) Value: 5 vs. 2
  misc_feature: MA Experiment 108528 PARAMETER Experiment Name: Zm_Imbibed_Seeds_P Parameter: Organism Value: Zea mays
  misc_feature: MA Experiment 108528 PARAMETER Experiment Name: Zm_Imbibed_Seeds_P Parameter: Plant Line Value: 35A19
  misc_feature: MA Experiment 108528 PARAMETER Experiment Name: Zm_Imbibed_Seeds_P Parameter: Tissue Value: Aerial vs. Embryo
  misc_feature: MA Experiment ID: 108530 Result: Down-regulated in Transcription
  misc_feature: MA Experiment 108530 PARAMETER Experiment Name: Zm_Imbibed_Seeds_P Parameter: Age (day) Value: 6 vs. 2
  misc_feature: MA Experiment 108530 PARAMETER Experiment Name: Zm_Imbibed_Seeds_P Parameter: Organism Value: Zea mays
  misc_feature: MA Experiment 108530 PARAMETER Experiment Name: Zm_Imbibed_Seeds_P Parameter: Plant Line Value: 35A19
  misc_feature: MA Experiment 108530 PARAMETER Experiment Name: Zm_Imbibed_Seeds_P Parameter: Tissue Value: Aerial vs. Embryo
  misc_feature: MA Experiment ID: 108536 Result: Down-regulated in Transcription
  misc_feature: MA Experiment 108536 PARAMETER Experiment Name: Zm_Meristem_P Parameter: Age (day) Value: 8
  misc_feature: MA Experiment 108536 PARAMETER Experiment Name: Zm_Meristem_P Parameter: Organism Value: Zea mays
  misc_feature: MA Experiment 108536 PARAMETER Experiment Name: Zm_Meristem_P Parameter: Plant Line Value: 35A19
  misc_feature: MA Experiment 108536 PARAMETER Experiment Name: Zm_Meristem_P Parameter: Tissue Value: Shoot Meristem vs. Above Shoot Meristem
  misc_feature: MA Experiment ID: 108543 Result: Up-regulated in Transcription
  misc_feature: MA Experiment ID: 108544 Result: Down-regulated in Transcription
  misc_feature: MA Experiment ID: 108547 Result: Down-regulated in Transcription
  misc_feature: MA Experiment 108547 PARAMETER Experiment Name: Zm_Imbibed_Seeds_P Parameter: Age (day) Value: 4 vs. 2
  misc_feature: MA Experiment 108547 PARAMETER Experiment Name: Zm_Imbibed_Seeds_P Parameter: Organism Value: Zea mays
  misc_feature: MA Experiment 108547 PARAMETER Experiment Name: Zm_Imbibed_Seeds_P Parameter: Plant Line Value: 35A19
  misc_feature: MA Experiment 108547 PARAMETER Experiment Name: Zm_Imbibed_Seeds_P Parameter: Tissue Value: Aerial vs. Embryo
  misc_feature: MA Experiment ID: 108559 Result: Down-regulated in Transcription
  misc_feature: MA Experiment 108559 PARAMETER Experiment Name: Zm_5mM_NO_P Parameter: Age (day) Value: 8
  misc_feature: MA Experiment 108559 PARAMETER Experiment Name: Zm_5mM_NO_P Parameter: Organism Value: Zea mays
  misc_feature: MA Experiment 108559 PARAMETER Experiment Name: Zm_5mM_NO_P Parameter: Plant Line Value: 35A19
  misc_feature: MA Experiment 108559 PARAMETER Experiment Name: Zm_5mM_NO_P Parameter: Timepoint (hr) Value: 12
  misc_feature: MA Experiment 108559 PARAMETER Experiment Name: Zm_5mM_NO_P Parameter: Tissue Value: Aerial
  misc_feature: MA Experiment 108559 PARAMETER Experiment Name: Zm_5mM_NO_P Parameter: Treatment Value: 5mM NO vs. No Treatment
  misc_feature: MA Experiment ID: 108597 Result: Down-regulated in Transcription
  misc_feature: MA Experiment 108597 PARAMETER Experiment Name: Zm_100uM_ABA_P Parameter: Age (day) Value: 9
  misc_feature: MA Experiment 108597 PARAMETER Experiment Name: Zm_100uM_ABA_P Parameter: Organism Value: Zea mays
  misc_feature: MA Experiment 108597 PARAMETER Experiment Name: Zm_100uM_ABA_P Parameter: Plant Line Value: 35A19
  misc_feature: MA Experiment 108597 PARAMETER Experiment Name: Zm_100uM_ABA_P Parameter: Timepoint (hr) Value: 24
  misc_feature: MA Experiment 108597 PARAMETER Experiment Name: Zm_100uM_ABA_P Parameter: Tissue Value: Aerial
  misc_feature: MA Experiment 108597 PARAMETER Experiment Name: Zm_100uM_ABA_P Parameter: Treatment Value: 100uM ABA vs. No Treatment
  misc_feature: MA Experiment ID: 108688 Result: Down-regulated in Transcription
  misc_feature: MA Experiment 108688 PARAMETER Experiment Name: Zm_Embryos-Flowers__P Parameter: Tissue Value: Immature Flowers vs. Aerial+
  misc_feature: MA Experiment ID: 20000477 Result: Down-regulated in Transcription
  misc_feature: MA Experiment 20000477 PARAMETER Experiment Name: Zm_5mM_SA_P Parameter: Age (day) Value: 10
  misc_feature: MA Experiment 20000477 PARAMETER Experiment Name: Zm_5mM_SA_P Parameter: Organism Value: Zea mays
  misc_feature: MA Experiment 20000477 PARAMETER Experiment Name: Zm_5mM_SA_P Parameter: Plant Line Value: 35A19
  misc_feature: MA Experiment 20000477 PARAMETER Experiment Name: Zm_5mM_SA_P Parameter: Timepoint (hr) Value: 48
  misc_feature: MA Experiment 20000477 PARAMETER Experiment Name: Zm_5mM_SA_P Parameter: Tissue Value: Aerial
  misc_feature: MA Experiment 20000477 PARAMETER Experiment Name: Zm_5mM_SA_P Parameter: Treatment Value: 5mM SA vs. No Treatment
  misc_feature: MA Experiment ID: 20000478 Result: Down-regulated in Transcription
  misc_feature: MA Experiment 20000478 PARAMETER Experiment Name: Zm_5mM_SA_P Parameter: Age (day) Value: 11
  misc_feature: MA Experiment 20000478 PARAMETER Experiment Name: Zm_5mM_SA_P Parameter: Organism Value: Zea mays
  misc_feature: MA Experiment 20000478 PARAMETER Experiment Name: Zm_5mM_SA_P Parameter: Plant Line Value: 35A19
  misc_feature: MA Experiment 20000478 PARAMETER Experiment Name: Zm_5mM_SA_P Parameter: Timepoint (hr) Value: 72
  misc_feature: MA Experiment 20000478 PARAMETER Experiment Name: Zm_5mM_SA_P Parameter: Tissue Value: Aerial
  misc_feature: MA Experiment 20000478 PARAMETER Experiment Name: Zm_5mM_SA_P Parameter: Treatment Value: 5mM SA vs. No Treatment
  misc_feature: MA Experiment ID: 20000479 Result: Down-regulated in Transcription
  misc_feature: MA Experiment 20000479 PARAMETER Experiment Name: Zm_Drought_P Parameter: Age (day) Value: 10
  misc_feature: MA Experiment 20000479 PARAMETER Experiment Name: Zm_Drought_P Parameter: Organism Value: Zea mays
  misc_feature: MA Experiment 20000479 PARAMETER Experiment Name: Zm_Drought_P Parameter: Plant Line Value: 35A19
  misc_feature: MA Experiment 20000479 PARAMETER Experiment Name: Zm_Drought_P Parameter: Timepoint (hr) Value: 48
  misc_feature: MA Experiment 20000479 PARAMETER Experiment Name: Zm_Drought_P Parameter: Tissue Value: Aerial
  misc_feature: MA Experiment 20000479 PARAMETER Experiment Name: Zm_Drought_P Parameter: Treatment Value: Drought vs. No Drought
  misc_feature: MA Experiment ID: 20000480 Result: Down-regulated in Transcription
  misc_feature: MA Experiment 20000480 PARAMETER Experiment Name: Zm_Drought_P Parameter: Age (day) Value: 11
  misc_feature: MA Experiment 20000480 PARAMETER Experiment Name: Zm_Drought_P Parameter: Organism Value: Zea mays
  misc_feature: MA Experiment 20000480 PARAMETER Experiment Name: Zm_Drought_P Parameter: Plant Line Value: 35A19
  misc_feature: MA Experiment 20000480 PARAMETER Experiment Name: Zm_Drought_P Parameter: Timepoint (hr) Value: 72
  misc_feature: MA Experiment 20000480 PARAMETER Experiment Name: Zm_Drought_P Parameter: Tissue Value: Aerial
  misc_feature: MA Experiment 20000480 PARAMETER Experiment Name: Zm_Drought_P Parameter: Treatment Value: Drought vs. No Drought
  misc_feature: MA Experiment ID: 20000488 Result: Down-regulated in Transcription
  misc_feature: MA Experiment 20000488 PARAMETER Experiment Name: Zm_50mM_NH4NO3_L_to_H_P Parameter: Organism Value: Zea mays
  misc_feature: MA Experiment 20000488 PARAMETER Experiment Name: Zm_50mM_NH4NO3_L_to_H_P Parameter: Timepoint (hr) Value: 8
  misc_feature: MA Experiment 20000488 PARAMETER Experiment Name: Zm_50mM_NH4NO3_L_to_H_P Parameter: Tissue Value: Leaves
  misc_feature: MA Experiment 20000488 PARAMETER Experiment Name: Zm_50mM_NH4NO3_L_to_H_P Parameter: Treatment Value: 50mM NH4NO3 vs. 100mM Mannitol
  misc_feature: MA Experiment ID: 20000492 Result: Up-regulated in Transcription
  misc_feature: MA Experiment 20000492 PARAMETER Experiment Name: Zm_Hybrid_Seed_Dev_P Parameter: DAP Value: 12
  misc_feature: MA Experiment 20000492 PARAMETER Experiment Name: Zm_Hybrid_Seed_Dev_P Parameter: Organism Value: Zea mays
  misc_feature: MA Experiment 20000492 PARAMETER Experiment Name: Zm_Hybrid_Seed_Dev_P Parameter: Plant Line Value: 35A19
  misc_feature: MA Experiment 20000492 PARAMETER Experiment Name: Zm_Hybrid_Seed_Dev_P Parameter: Tissue Value: Fert Kernel vs. Unfert Floret
  misc_feature: MA Experiment ID: 20000535 Result: Up-regulated in Transcription
  misc_feature: MA Experiment 20000535 PARAMETER Experiment Name: Zm_Hybrid_Seed_Dev_P Parameter: DAP Value: 30 vs. 12
  misc_feature: MA Experiment 20000535 PARAMETER Experiment Name: Zm_Hybrid_Seed_Dev_P Parameter: Organism Value: Zea mays
  misc_feature: MA Experiment 20000535 PARAMETER Experiment Name: Zm_Hybrid_Seed_Dev_P Parameter: Plant Line Value: 35A19
  misc_feature: MA Experiment 20000535 PARAMETER Experiment Name: Zm_Hybrid_Seed_Dev_P Parameter: Tissue Value: Embryo vs. Unfert Floret
  misc_feature: MA Experiment ID: 20000626 Result: Down-regulated in Transcription
  misc_feature: MA Experiment 20000626 PARAMETER Experiment Name: Zm_Herbicide-Treatments_P Parameter: Timepoint (hr) Value: 12
  misc_feature: MA Experiment 20000626 PARAMETER Experiment Name: Zm_Herbicide-Treatments_P Parameter: Tissue Value: Aerial
  misc_feature: MA Experiment 20000626 PARAMETER Experiment Name: Zm_Herbicide-Treatments_P Parameter: Treatment Value: Roundup vs. No Treatment
  misc_feature: MA Experiment ID: 20000629 Result: Up-regulated in Transcription
  misc_feature: MA Experiment 20000629 PARAMETER Experiment Name: Zm_Herbicide-Treatments_P Parameter: Timepoint (hr) Value: 12
  misc_feature: MA Experiment 20000629 PARAMETER Experiment Name: Zm_Herbicide-Treatments_P Parameter: Tissue Value: Aerial
  misc_feature: MA Experiment 20000629 PARAMETER Experiment Name: Zm_Herbicide-Treatments_P Parameter: Treatment Value: Trimec vs. No Treatment
gcacgagaccattacctagaacatcctaatcgaaaaaccagaccagctcatcatcacattcgcatacatctcttctagcacgcaaagatcgagctatagctagctctgcaaccagagacaaggaggactacccttcgccggccggcctaaggaggagtacgtacagaacttgggacatggaaaccgtcgtgggcgacctcatggcgaccgagctgaggcttggcctgccgggcaccgtcgacgactgcagccagccccaactggtgaaggccacgccgccgtcgacgccaaggggcaagaggcgcgccaccgccgatgccgtggaggaagccgccggcgccgaggaggcaagcaagcgtgacgccgagacggcgcccccggcagccaaggcgcccgtggtgggttggccgccggtgaggtcgtaccggaagagctgcttccagcaggccagcagcaagcaggcggcggcggccaaacaggaggcggcggcggcggcggcggcgcccggctgcacggcatcgtnngcagccgccacaaacaccagcagctgcagcagcgccgccgttgtcgtcggctccttcgtcaaagtgagcatggacggcgccccgtacctgaggaaggtggacctgaggatgtacaggggctacagggagctccgggaggccctggaggccatgttcgtttcctccagcagcgccaacaacctgtcggagttcgccgtcacctacaggacaaggacggcgacctcatgctcgtcggagacgtgccgttcgagatgttcgctagcacctgcaagaagctgaggatcatgaagagatctgaagccacaggcctggggtcgtcgtcagcgaggcagcaatgaagatgatcccatctgatcgagaggacctgcatgcccggcaacgttgaacaacatgtcgatcgaacgtcatggtggccttattaattgtttctttcttttcttttcttccttttgtttaattatttttgctgttctggttggcgccgccgtggatcggagggatccccaagccgaaggatgagcttggctggcgcatcgaagcgcatgcaacggatgtgtgcggctttggttctgtaataggacaaccagtggtccttttttcgatctattagcggcacaaaaggagctagatgcatgctgaggttgtttc

SEQ ID NO: 19275 - protein, 208 aa, Zea mays subsp. mays
  peptide (1)..(208): Ceres Seq. ID no. 12424117
  misc_feature (7)..(94): Pfam Name: AUX/IAA family Pfam Description: AUX/IAA family
  misc_feature (7)..(91): Homolog of NCBI NO: 1352057 NR Description: AUXIN-INDUCED PROTEIN IAA4
  misc_feature (133)..(187): Homolog of NCBI NO: 34550779 NR Description: Gbiaa-Re [Gossypium barbadense]
  misc_feature (7)..(110): Homolog of NCBI NO: 34550779 NR Description: Gbiaa-Re [Gossypium barbadense]
  misc_feature (133)..(187): Homolog of NCBI NO: 11131103 NR Description: Auxin-induced protein 22D (Indole-3-acetic acid
  misc_feature (7)..(96): Homolog of NCBI NO: 11131103 NR Description: Auxin-induced protein 22D (Indole-3-acetic acid
  misc_feature (133)..(187): Homolog of NCBI NO: 416641 NR Description: Auxin-induced protein 22B (Indole-3-acetic acid
  misc_feature (7)..(90): Homolog of NCBI NO: 416641 NR Description: Auxin-induced protein 22B (Indole-3-acetic acid
  misc_feature (41)..(187): Homolog of NCBI NO: 34897206 NR Description: putative auxin-induced protein
  misc_feature (133)..(168): Homolog of NCBI NO: 15219692 NR Description: putative auxin-induced protein AUX2-11
  misc_feature (7)..(94): Homolog of NCBI NO: 15219692 NR Description: putative auxin-induced protein AUX2-11
  misc_feature (116)..(116): Xaa is any aa, unknown or other
METVVGDLMATELRLGLPGTVDDCSQPQLVKATPPSTPRGKRRATADAVEEAAGAEEASKRDAETAPPAAKAPVVGWPPVRSYRKSCFQQASSKQAAAAKQEAAAAAAAPGCTASXAAATNTSSCSSAAVVVGSFVKVSMDGAPYLRKVDLRMYRGYRELREALEAMFVSSSSANNLSEFAVTYRTRTATSCSSETCRSRCSLAPARS

SEQ ID NO: 19276 - protein, 200 aa, Zea mays subsp. mays
  peptide (1)..(200): Ceres Seq. ID no. 12424118
  misc_feature (1)..(86): Pfam Name: AUX/IAA family Pfam Description: AUX/IAA family
  misc_feature (1)..(83): Homolog of NCBI NO: 1352057 NR Description: AUXIN-INDUCED PROTEIN IAA4
  misc_feature (125)..(179): Homolog of NCBI NO: 34550779 NR Description: Gbiaa-Re [Gossypium barbadense]
  misc_feature (1)..(102): Homolog of NCBI NO: 34550779 NR Description: Gbiaa-Re [Gossypium barbadense]
  misc_feature (125)..(179): Homolog of NCBI NO: 11131103 NR Description: Auxin-induced protein 22D (Indole-3-acetic acid
  misc_feature (1)..(88): Homolog of NCBI NO: 11131103 NR Description: Auxin-induced protein 22D (Indole-3-acetic acid
  misc_feature (125)..(179): Homolog of NCBI NO: 416641 NR Description: Auxin-induced protein 22B (Indole-3-acetic acid
  misc_feature (1)..(82): Homolog of NCBI NO: 416641 NR Description: Auxin-induced protein 22B (Indole-3-acetic acid
  misc_feature (33)..(179): Homolog of NCBI NO: 34897206 NR Description: putative auxin-induced protein
  misc_feature (125)..(160): Homolog of NCBI NO: 15219692 NR Description: putative auxin-induced protein AUX2-11
  misc_feature (1)..(86): Homolog of NCBI NO: 15219692 NR Description: putative auxin-induced protein AUX2-11
  misc_feature (108)..(108): Xaa is any aa, unknown or other
MATELRLGLPGTVDDCSQPQLVKATPPSTPRGKRRATADAVEEAAGAEEASKRDAETAPPAAKAPVVGWPPVRSYRKSCFQQASSKQAAAAKQEAAAAAAAPGCTASXAAATNTSSCSSAAVVVGSFVKVSMDGAPYLRKVDLRMYRGYRELREALEAMFVSSSSANNLSEFAVTYRTRTATSCSSETCRSRCSLAPARS

SEQ ID NO: 19277 - DNA, 1489 bp, Zea mays subsp. mays
  misc_feature (1)..(1489): Ceres Seq. ID no. 12633927
  misc_feature: MA Experiment ID: 108528 Result: Up-regulated in Transcription
  misc_feature: MA Experiment 108528 PARAMETER Experiment Name: Zm_Imbibed_Seeds_P Parameter: Age (day) Value: 5 vs. 2
  misc_feature: MA Experiment 108528 PARAMETER Experiment Name: Zm_Imbibed_Seeds_P Parameter: Organism Value: Zea mays
  misc_feature: MA Experiment 108528 PARAMETER Experiment Name: Zm_Imbibed_Seeds_P Parameter: Plant Line Value: 35A19
  misc_feature: MA Experiment 108528 PARAMETER Experiment Name: Zm_Imbibed_Seeds_P Parameter: Tissue Value: Aerial vs. Embryo
  misc_feature: MA Experiment ID: 20000477 Result: Down-regulated in Transcription
  misc_feature: MA Experiment 20000477 PARAMETER Experiment Name: Zm_5mM_SA_P Parameter: Age (day) Value: 10
  misc_feature: MA Experiment 20000477 PARAMETER Experiment Name: Zm_5mM_SA_P Parameter: Organism Value: Zea mays
  misc_feature: MA Experiment 20000477 PARAMETER Experiment Name: Zm_5mM_SA_P Parameter: Plant Line Value: 35A19
  misc_feature: MA Experiment 20000477 PARAMETER Experiment Name: Zm_5mM_SA_P Parameter: Timepoint (hr) Value: 48
  misc_feature: MA Experiment 20000477 PARAMETER Experiment Name: Zm_5mM_SA_P Parameter: Tissue Value: Aerial
  misc_feature: MA Experiment 20000477 PARAMETER Experiment Name: Zm_5mM_SA_P Parameter: Treatment Value: 5mM SA vs. No Treatment
  misc_feature: MA Experiment ID: 20000478 Result: Down-regulated in Transcription
  misc_feature: MA Experiment 20000478 PARAMETER Experiment Name: Zm_5mM_SA_P Parameter: Age (day) Value: 11
  misc_feature: MA Experiment 20000478 PARAMETER Experiment Name: Zm_5mM_SA_P Parameter: Organism Value: Zea mays
  misc_feature: MA Experiment 20000478 PARAMETER Experiment Name: Zm_5mM_SA_P Parameter: Plant Line Value: 35A19
  misc_feature: MA Experiment 20000478 PARAMETER Experiment Name: Zm_5mM_SA_P Parameter: Timepoint (hr) Value: 72
  misc_feature: MA Experiment 20000478 PARAMETER Experiment Name: Zm_5mM_SA_P Parameter: Tissue Value: Aerial
  misc_feature: MA Experiment 20000478 PARAMETER Experiment Name: Zm_5mM_SA_P Parameter: Treatment Value: 5mM SA vs. No Treatment
  misc_feature: MA Experiment ID: 20000480 Result: Down-regulated in Transcription
  misc_feature: MA Experiment 20000480 PARAMETER Experiment Name: Zm_Drought_P Parameter: Age (day) Value: 11
  misc_feature: MA Experiment 20000480 PARAMETER Experiment Name: Zm_Drought_P Parameter: Organism Value: Zea mays
  misc_feature: MA Experiment 20000480 PARAMETER Experiment Name: Zm_Drought_P Parameter: Plant Line Value: 35A19
  misc_feature: MA Experiment 20000480 PARAMETER Experiment Name: Zm_Drought_P Parameter: Timepoint (hr) Value: 72
  misc_feature: MA Experiment 20000480 PARAMETER Experiment Name: Zm_Drought_P Parameter: Tissue Value: Aerial
  misc_feature: MA Experiment 20000480 PARAMETER Experiment Name: Zm_Drought_P Parameter: Treatment Value: Drought vs. No Drought
  misc_feature: MA Experiment ID: 20000492 Result: Up-regulated in Transcription
  misc_feature: MA Experiment 20000492 PARAMETER Experiment Name: Zm_Hybrid_Seed_Dev_P Parameter: DAP Value: 12
  misc_feature: MA Experiment 20000492 PARAMETER Experiment Name: Zm_Hybrid_Seed_Dev_P Parameter: Organism Value: Zea mays
  misc_feature: MA Experiment 20000492 PARAMETER Experiment Name: Zm_Hybrid_Seed_Dev_P Parameter: Plant Line Value: 35A19
  misc_feature: MA Experiment 20000492 PARAMETER Experiment Name: Zm_Hybrid_Seed_Dev_P Parameter: Tissue Value: Fert Kernel vs. Unfert Floret
gcacgagaccattacctagaacatcctaatcgaaaactatcttcctgcttcggacagttgagagagagagagagggatcgagagcgcggcggaggcgatggcgagcggagggaagggactcaacgcgactggggagttcttccggcggagggacgagtggaggaggcaccctatggcggggaaccagctgcgccacgccacacccgggctcggcatcgccatcgtcgccttcgggatctacctcgtcggcgaggccgcctacaaccgcctctaccgcccctccggcgtcgacttcactctctctcactcccaaaccaatctaccttccgcccatgggcccaccgccgcgccgccgccaactcctgctgtctctcgcgctgctcgccaccgcggccgcctgctgcgcggcgggggcggcgcccaggctgtcgcccaactactaccgccgcagctgcccgcgcgtggagcggatcgtgtcggacgccgtcgccgccaagcagcgcgccaacccgtccacggcggcgggcacgctgcggctcttcttccacgactgcttcgtcaacggctgcgacgcctcggtgctggtctcgccgctctcctccaccgacgccgcgccggagcgcgccgcggagatcaacctctccctgcccggggacgccttcgacgccgtggcccgcgccaaggcggcgctggaggccgcgtgcccgggcgtcgtctcctgcgccgacgcgctggcgctagcggcgcgcgacctcgtggccgccctgggcgggccccggttccccgtcgcgctgggccgccgcgactcccgccnntcnnacgcgcgcgacgtcgagggcaacctgccccgcaccaacatgtcggcgcgagccatggtgcgcctcttcgcccgcaagggcctcgcgccccgggagatggtggcgctggccggcgcccacaccgtcggcttctcccactgcgccgagttcgcgccccgcatctacggctaccggggcgccagccacgacccgcggctcaacccggagttcgcgcgcgcgctgcagcgctcctgcgcgggataccgcaccgaccccaccgtctccatcttcaacgacatcgtcacgccccgggacttcgacgagacctactacaagaacctgccccacggcctcggcctgctcgcctccgacgccgccatctgggagtacccgcccaccagggtcttcgcccagcgctacgccgccaaccgcaccgccttcttcgaggacttcgccgccgcgatgcagaggctcggcgccgtcggcgtcaagacggggcgccagggcgtcgtcaggcgccgctgcgacgcgctcgactgagtggcgtcgttcgacggcgttgcttattgtgctattgggtcggtcgatcgttggaaagcttcgaattcgattacgggatgtacttggaaaatggggcgtgtgctttttcagagtggtaactgaagtgatgaactgagggcaagctaattctg

SEQ ID NO: 19278 - protein, 452 aa, Zea mays subsp. mays
  peptide (1)..(452): Ceres Seq. ID no. 12633928
  misc_feature (83)..(367): Pfam Name: Herpesvirus alkaline exonuclease Pfam Description: Herpesvirus alkaline exonuclease
  misc_feature (239)..(239): Xaa is any aa, unknown or other
  misc_feature (240)..(240): Xaa is any aa, unknown or other
  misc_feature (241)..(241): Xaa is any aa, unknown or other
MASGGKGLNATGEFFRRRDEWRRHPMAGNQLRHATPGLGIAIVAFGIYLVGEAAYNRLYRPSGVDFTLSHSQTNLPSAHGPTAAPPPTPAVSRAARHRGRLLRGGGGAQAVAQLLPPQLPARGADRVGRRRRQAARQPVHGGGHAAALLPRLLRQRLRRLGAGLAALLHRRRAGARRGDQPLPARGRLRRRGPRQGGAGGRVPGRRLLRRRAGASGARPRGRPGRAPVPRRAGPPRLPXXXRARRRGQPAPHQHVGASHGAPLRPQGPRAPGDGGAGRRPHRRLLPLRRVRAPHLRLPGRQPRPAAQPGVRARAAALLRGIPHRPHRLHLQRHRHAPGLRRDLLQEPAPRPRPARLRRRHLGVPAHQGLRPALRRQPHRLLRGLRRRDAEARRRRRQDGAPGRRQAPLRRARLSGVVRRRCLLCYWVGRSLESFEFDYGMYLENGACAFSEW

SEQ ID NO: 19279 - protein, 427 aa, Zea mays subsp. mays
  peptide (1)..(427): Ceres Seq. ID no. 12633929
  misc_feature (58)..(342): Pfam Name: Herpesvirus alkaline exonuclease Pfam Description: Herpesvirus alkaline exonuclease
  misc_feature (214)..(214): Xaa is any aa, unknown or other
  misc_feature (215)..(215): Xaa is any aa, unknown or other
  misc_feature (216)..(216): Xaa is any aa, unknown or other
MAGNQLRHATPGLGIAIVAFGIYLVGEAAYNRLYRPSGVDFTLSHSQTNLPSAHGPTAAPPPTPAVSRAARHRGRLLRGGGGAQAVAQLLPPQLPARGADRVGRRRRQAARQPVHGGGHAAALLPRLLRQRLRRLGAGLAALLHRRRAGARRGDQPLPARGRLRRRGPRQGGAGGRVPGRRLLRRRAGASGARPRGRPGRAPVPRRAGPPRLPXXXRARRRGQPAPHQHVGASHGAPLRPQGPRAPGDGGAGRRPHRRLLPLRRVRAPHLRLPGRQPRPAAQPGVRARAAALLRGIPHRPHRLHLQRHRHAPGLRRDLLQEPAPRPRPARLRRRHLGVPAHQGLRPALRRQPHRLLRGLRRRDAEARRRRRQDGAPGRRQAPLRRARLSGVVRRRCLLCYWVGRSLESFEFDYGMYLENGACAFSEW

SEQ ID NO: 19280 - protein, 334 aa, Zea mays subsp. mays
  peptide (1)..(334): Ceres Seq. ID no. 12633930
  misc_feature (11)..(334): Homolog of NCBI NO: 12056452 NR Description: peroxidase [Zea mays]
  misc_feature (55)..(334): Homolog of NCBI NO: 1890317 NR Description: peroxidase ATP26a [Arabidopsis thaliana]
  misc_feature (14)..(331): Homolog of NCBI NO: 15221670 NR Description: peroxidase, putative; protein id: At1g24110.1
  misc_feature (28)..(334): Homolog of NCBI NO: 14334600 NR Description: putative peroxidase [Arabidopsis thaliana]
  misc_feature (28)..(334): Homolog of NCBI NO: 15232929 NR Description: peroxidase, putative
  misc_feature (1)..(334): Homolog of NCBI NO: 15242580 NR Description: peroxidase, putative; protein id: At5g40150.1
  misc_feature (30)..(331): Homolog of NCBI NO: 15236620 NR Description: peroxidase, putative; protein id: At4g17690.1
  misc_feature (17)..(331): Homolog of NCBI NO: 21593687 NR Description: peroxidase [Arabidopsis thaliana]
  misc_feature (14)..(331): Homolog of NCBI NO: 18422742 NR Description: peroxidase, putative
  misc_feature (14)..(331): Homolog of NCBI NO: 9759442 NR Description: peroxidase [Arabidopsis thaliana]
  misc_feature (161)..(161): Xaa is any aa, unknown or other
  misc_feature (162)..(162): Xaa is any aa, unknown or other
  misc_feature (163)..(163): Xaa is any aa, unknown or other
MGPPPRRRQLLLSLALLATAAACCAAGAAPRLSPNYYRRSCPRVERIVSDAVAAKQRANPSTAAGTLRLFFHDCFVNGCDASVLVSPLSSTDAAPERAAEINLSLPGDAFDAVARAKAALEAACPGVVSCADALALAARDLVAALGGPRFPVALGRRDSRXXXARDVEGNLPRTNMSARAMVRLFARKGLAPREMVALAGAHTVGFSHCAEFAPRIYGYRGASHDPRLNPEFARALQRSCAGYRTDPTVSIFNDIVTPRDFDETYYKNLPHGLGLLASDAAIWEYPPTRVFAQRYAANRTAFFEDFAAAMQRLGAVGVKTGRQGVVRRRCDALD

SEQ ID NO: 19281 - DNA, 1141 bp, Zea mays subsp. mays
  misc_feature (1)..(1141): Ceres Seq. ID no. 12375733
  misc_feature: MA Experiment ID: 108527 Result: Up-regulated in Transcription
  misc_feature: MA Experiment 108527 PARAMETER Experiment Name: Zm_5mM_NO_P Parameter: Age (day) Value: 8
  misc_feature: MA Experiment 108527 PARAMETER Experiment Name: Zm_5mM_NO_P Parameter: Organism Value: Zea mays
  misc_feature: MA Experiment 108527 PARAMETER Experiment Name: Zm_5mM_NO_P Parameter: Plant Line Value: 35A19
  misc_feature: MA Experiment 108527 PARAMETER Experiment Name: Zm_5mM_NO_P Parameter: Timepoint (hr) Value: 6
  misc_feature: MA Experiment 108527 PARAMETER Experiment Name: Zm_5mM_NO_P Parameter: Tissue Value: Aerial
  misc_feature: MA Experiment 108527 PARAMETER Experiment Name: Zm_5mM_NO_P Parameter: Treatment Value: 5mM NO vs. No Treatment
  misc_feature: MA Experiment ID: 108535 Result: Down-regulated in Transcription
  misc_feature: MA Experiment 108535 PARAMETER Experiment Name: Zm_Meristem_P Parameter: Age (day) Value: 8
  misc_feature: MA Experiment 108535 PARAMETER Experiment Name: Zm_Meristem_P Parameter: Organism Value: Zea mays
  misc_feature: MA Experiment 108535 PARAMETER Experiment Name: Zm_Meristem_P Parameter: Plant Line Value: 35A19
  misc_feature: MA Experiment 108535 PARAMETER Experiment Name: Zm_Meristem_P Parameter: Tissue Value: Root Meristem vs. Above Root Meristem
  misc_feature: MA Experiment ID: 108559 Result: Up-regulated in Transcription
  misc_feature: MA Experiment 108559 PARAMETER Experiment Name: Zm_5mM_NO_P Parameter: Age (day) Value: 8
  misc_feature: MA Experiment 108559 PARAMETER Experiment Name: Zm_5mM_NO_P Parameter: Organism Value: Zea mays
  misc_feature: MA Experiment 108559 PARAMETER Experiment Name: Zm_5mM_NO_P Parameter: Plant Line Value: 35A19
  misc_feature: MA Experiment 108559 PARAMETER Experiment Name: Zm_5mM_NO_P Parameter: Timepoint (hr) Value: 12
  misc_feature: MA Experiment 108559 PARAMETER Experiment Name: Zm_5mM_NO_P Parameter: Tissue Value: Aerial
  misc_feature: MA Experiment 108559 PARAMETER Experiment Name: Zm_5mM_NO_P Parameter: Treatment Value: 5mM NO vs. No Treatment
  misc_feature: MA Experiment ID: 20000535 Result: Down-regulated in Transcription
  misc_feature: MA Experiment 20000535 PARAMETER Experiment Name: Zm_Hybrid_Seed_Dev_P Parameter: DAP Value: 30 vs. 12
  misc_feature: MA Experiment 20000535 PARAMETER Experiment Name: Zm_Hybrid_Seed_Dev_P Parameter: Organism Value: Zea mays
  misc_feature: MA Experiment 20000535 PARAMETER Experiment Name: Zm_Hybrid_Seed_Dev_P Parameter: Plant Line Value: 35A19
  misc_feature: MA Experiment 20000535 PARAMETER Experiment Name: Zm_Hybrid_Seed_Dev_P Parameter: Tissue Value: Embryo vs. Unfert Floret
gcacgagaccattacctagaacatcctaatcgaaaaaaacacctcccaacccaatctcctcagtcctcactcctcagagagagccccaagccaagatctgcgcgggcaagtcaccaggcgaagcaccggctcccatggccgtggacctgatgggctgctacgccccgcgccgcgccaacgaccagctcgccatccaggaggcggcggcggccgggctccgcaacctggagctgctggtgacgtccctgtccacgcaggccgccgcgccgcacagggccgctgatcagccgttcggcgagatcgccggccgggccgtctccaagttccgcaaggtcatctccatcctcgaccgcacggggcacgcccgcttccgccgcgggcccgtcgagccgtcgccgccgccggcgcctcctgtcgtccccggtccgcccgtcagcgtggcgcagccgccgcagagcctgacgctggatttcacgaagccgaacctggccgtgtcggccgccacgtccgtcacctccacgtccttcttctcgtcggtcacggccggcgagggcagcgtctccaagggccggagcctcatgtcctccgggaagccgccgctgtctggccacaagcggaagccctgcgccggcgcccactccgaggccaccaccaacggcagccgttgccactgctccaagagaaggaagaaccgcgtgaagaggagcatcagagtgccggcgatcagctcgaaggtcgccgacatcccgccggacgagtactcgtggaggaagtacggccagaagcctatcaagggctccccttacccacgtggctactacaagtgcagcactgtgcggggatgcccggcgaggaagcacgtggagcgggccaccgacgacccggccatgctggtggtgacgtacgagggcgagcaccgccacacgccgggcgcggtccaggggccgagccccctggcgaccgcgtcgccggtgcccgtcgccgtctccgccggcaacgggctcgttgtctagtctactaaaagctaggattagcttctcgtcttctttgttttttttttttgtttgagctgatgtccgtgtaaaacaaggaagaaggttgtagaaagagggagaggaggacaccggaatttcgatgccgg

SEQ ID NO: 19282 - protein, 292 aa, Zea mays subsp. mays
  peptide (1)..(292): Ceres Seq. ID no. 12375734
  misc_feature (205)..(264): Pfam Name: WRKY DNA -binding domain Pfam Description: WRKY DNA -binding domain
  misc_feature (88)..(269): Homolog of NCBI NO: 30689072 NR Description: WRKY family transcription factor [Arabidopsis
  misc_feature (88)..(269): Homolog of NCBI NO: 22329054 NR Description: WRKY family transcription factor
  misc_feature (1)..(39): Homolog of NCBI NO: 4894963 NR Description: DNA-binding protein WRKY3 [Avena sativa]
  misc_feature (81)..(281): Homolog of NCBI NO: 4894963 NR Description: DNA-binding protein WRKY3 [Avena sativa]
  misc_feature (86)..(265): Homolog of NCBI NO: 38175580 NR Description: putative DNA-binding protein NtWRKY3
  misc_feature (1)..(93): Homolog of NCBI NO: 10798760 NR Description: WRKY transcription factor Nt-SubD48 [Nicotiana
  misc_feature (83)..(272): Homolog of NCBI NO: 10798760 NR Description: WRKY transcription factor Nt-SubD48 [Nicotiana
  misc_feature (1)..(118): Homolog of NCBI NO: 4760596 NR Description: DNA-binding protein NtWRKY3 [Nicotiana tabacum]
  misc_feature (118)..(269): Homolog of NCBI NO: 4760596 NR Description: DNA-binding protein NtWRKY3 [Nicotiana tabacum]
  misc_feature (1)..(291): Homolog of NCBI NO: 38346908 NR Description: OSJNBb0015N08.8 [Oryza sativa (japonica
MAVDLMGCYAPRRANDQLAIQEAAAAGLRNLELLVTSLSTQAAAPHRAADQPFGEIAGRAVSKFRKVISILDRTGHARFRRGPVEPSPPPAPPVVPGPPVSVAQPPQSLTLDFTKPNLAVSAATSVTSTSFFSSVTAGEGSVSKGRSLMSSGKPPLSGHKRKPCAGAHSEATTNGSRCHCSKRRKNRVKRSIRVPAISSKVADIPPDEYSWRKYGQKPIKGSPYPRGYYKCSTVRGCPARKHVERATDDPAMLVVTYEGEHRHTPGAVQGPSPLATASPVPVAVSAGNGLVV

SEQ ID NO: 19283 - protein, 287 aa, Zea mays subsp. mays
  peptide (1)..(287): Ceres Seq. ID no. 12375735
  misc_feature (200)..(259): Pfam Name: WRKY DNA -binding domain Pfam Description: WRKY DNA -binding domain
  misc_feature (1)..(34): Homolog of NCBI NO: 4894963 NR Description: DNA-binding protein WRKY3 [Avena sativa]
  misc_feature (76)..(276): Homolog of NCBI NO: 4894963 NR Description: DNA-binding protein WRKY3 [Avena sativa]
  misc_feature (81)..(260): Homolog of NCBI NO: 38175580 NR Description: putative DNA-binding protein NtWRKY3
  misc_feature (1)..(88): Homolog of NCBI NO: 10798760 NR Description: WRKY transcription factor Nt-SubD48 [Nicotiana
  misc_feature (83)..(264): Homolog of NCBI NO: 30689072 NR Description: WRKY family transcription factor [Arabidopsis
  misc_feature (83)..(264): Homolog of NCBI NO: 22329054 NR Description: WRKY family transcription factor
  misc_feature (78)..(267): Homolog of NCBI NO: 10798760 NR Description: WRKY transcription factor Nt-SubD48 [Nicotiana
  misc_feature (1)..(113): Homolog of NCBI NO: 4760596 NR Description: DNA-binding protein NtWRKY3 [Nicotiana tabacum]
  misc_feature (113)..(264): Homolog of NCBI NO: 4760596 NR Description: DNA-binding protein NtWRKY3 [Nicotiana tabacum]
  misc_feature (1)..(286): Homolog of NCBI NO: 38346908 NR Description: OSJNBb0015N08.8 [Oryza sativa (japonica
MGCYAPRRANDQLAIQEAAAAGLRNLELLVTSLSTQAAAPHRAADQPFGEIAGRAVSKFRKVISILDRTGHARFRRGPVEPSPPPAPPVVPGPPVSVAQPPQSLTLDFTKPNLAVSAATSVTSTSFFSSVTAGEGSVSKGRSLMSSGKPPLSGHKRKPCAGAHSEATTNGSRCHCSKRRKNRVKRSIRVPAISSKVADIPPDEYSWRKYGQKPIKGSPYPRGYYKCSTVRGCPARKHVERATDDPAMLVVTYEGEHRHTPGAVQGPSPLATASPVPVAVSAGNGLVV

SEQ ID NO: 19284 - DNA, 890 bp, Zea mays subsp. mays; identical to SEQ ID NO: 4580
  misc_feature (1)..(890): Ceres Seq. ID no. 12387086
  misc_feature: MA Experiment ID: 108522 Result: Down-regulated in Transcription
  misc_feature: MA Experiment 108522 PARAMETER Experiment Name: Zm_42deg_Heat_P Parameter: Age (day) Value: 8
  misc_feature: MA Experiment 108522 PARAMETER Experiment Name: Zm_42deg_Heat_P Parameter: Organism Value: Zea mays
  misc_feature: MA Experiment 108522 PARAMETER Experiment Name: Zm_42deg_Heat_P Parameter: Plant Line Value: 35A19
  misc_feature: MA Experiment 108522 PARAMETER Experiment Name: Zm_42deg_Heat_P Parameter: Temperature (deg C) Value: 42 vs. 22
  misc_feature: MA Experiment 108522 PARAMETER Experiment Name: Zm_42deg_Heat_P Parameter: Timepoint (hr) Value: 1
  misc_feature: MA Experiment 108522 PARAMETER Experiment Name: Zm_42deg_Heat_P Parameter: Tissue Value: Aerial
  misc_feature: MA Experiment ID: 108523 Result: Down-regulated in Transcription
  misc_feature: MA Experiment 108523 PARAMETER Experiment Name: Zm_42deg_Heat_P Parameter: Age (day) Value: 8
  misc_feature: MA Experiment 108523 PARAMETER Experiment Name: Zm_42deg_Heat_P Parameter: Organism Value: Zea mays
  misc_feature: MA Experiment 108523 PARAMETER Experiment Name: Zm_42deg_Heat_P Parameter: Plant Line Value: 35A19
  misc_feature: MA Experiment 108523 PARAMETER Experiment Name: Zm_42deg_Heat_P Parameter: Temperature (deg C) Value: 42 vs. 22
  misc_feature: MA Experiment 108523 PARAMETER Experiment Name: Zm_42deg_Heat_P Parameter: Timepoint (hr) Value: 6
  misc_feature: MA Experiment 108523 PARAMETER Experiment Name: Zm_42deg_Heat_P Parameter: Tissue Value: Aerial
  misc_feature: MA Experiment ID: 108544 Result: Up-regulated in Transcription

SEQ ID NO: 19285 - protein, 193 aa, Zea mays subsp. mays; identical to SEQ ID NO: 4581
  peptide (1)..(193): Ceres Seq. ID no. 12387087
  misc_feature (31)..(191): Pfam Name: AhpC/TSA family Pfam Description: AhpC/TSA family
  misc_feature (31)..(191): Pfam Name: AhpC/TSA family Pfam Description: AhpC/TSA family
  misc_feature (61)..(193): Homolog of NCBI NO: 27376428 NR Description: peroxiredoxin [Bradyrhizobium japonicum]
  misc_feature (58)..(190): Homolog of NCBI NO: 27367181 NR Description: Peroxiredoxin [Vibrio vulnificus CMCP6]
  misc_feature (56)..(191): Homolog of NCBI NO: 15964668 NR Description: HYPOTHETICAL PEROXIREDOXIN PROTEIN [Sinorhizobium
  misc_feature (62)..(193): Homolog of NCBI NO: 15888122 NR Description: AGR_C_1423p [Agrobacterium tumefaciens]
  misc_feature (48)..(193): Homolog of NCBI NO: 23501379 NR Description: ahpC/TSA family protein [Brucella suis 1330]
  misc_feature (61)..(193): Homolog of NCBI NO: 27376428 NR Description: peroxiredoxin [Bradyrhizobium japonicum]
  misc_feature (56)..(191): Homolog of NCBI NO: 15964668 NR Description: HYPOTHETICAL PEROXIREDOXIN PROTEIN [Sinorhizobium
  misc_feature (48)..(193): Homolog of NCBI NO: 23501379 NR Description: ahpC/TSA family protein [Brucella suis 1330]
  misc_feature (1)..(193): Homolog of NCBI NO: 34903114 NR Description: unnamed protein product [Oryza sativa (japonica
  misc_feature (11)..(193): Homolog of NCBI NO: 7658343 NR Description: unknown protein; 13384-11892 [Arabidopsis
  misc_feature (11)..(193): Homolog of NCBI NO: 18397457 NR Description: expressed protein
  misc_feature (6)..(193): Homolog of NCBI NO: 21553531 NR Description: unknown [Arabidopsis thaliana]
  misc_feature (48)..(193): Homolog of NCBI NO: 17987739 NR Description: THIOL PEROXIDASE [Brucella melitensis]
  misc_feature (62)..(193): Homolog of NCBI NO: 15888122 NR Description: AGR_C_1423p [Agrobacterium tumefaciens]
  misc_feature (58)..(190): Homolog of NCBI NO: 27367181 NR Description: Peroxiredoxin [Vibrio vulnificus CMCP6]
  misc_feature (48)..(193): Homolog of NCBI NO: 17987739 NR Description: THIOL PEROXIDASE [Brucella melitensis]
  misc_feature (6)..(193): Homolog of NCBI NO: 21553531 NR Description: unknown [Arabidopsis thaliana]
  misc_feature (11)..(193): Homolog of NCBI NO: 18397457 NR Description: expressed protein
  misc_feature (11)..(193): Homolog of NCBI NO: 7658343 NR Description: unknown protein; 13384-11892 [Arabidopsis
  misc_feature (1)..(193): Homolog of NCBI NO: 34903114 NR Description: unnamed protein product [Oryza sativa (japonica

SEQ ID NO: 19286 - DNA, 1033 bp, Zea mays subsp. mays
  misc_feature (1)..(1033): Ceres Seq. ID no. 12420210
  misc_feature: MA Experiment ID: 108536 Result: Down-regulated in Transcription
  misc_feature: MA Experiment 108536 PARAMETER Experiment Name: Zm_Meristem_P Parameter: Age (day) Value: 8
  misc_feature: MA Experiment 108536 PARAMETER Experiment Name: Zm_Meristem_P Parameter: Organism Value: Zea mays
  misc_feature: MA Experiment 108536 PARAMETER Experiment Name: Zm_Meristem_P Parameter: Plant Line Value: 35A19
  misc_feature: MA Experiment 108536 PARAMETER Experiment Name: Zm_Meristem_P Parameter: Tissue Value: Shoot Meristem vs. Above Shoot Meristem
aagctagtggcgagagaggtcgtgcgcagtgcctggtgggtctagtctagtggcatcatggaggaggcggtggaggccgtggtcgcggccggagtggagccgttcccgacggtggacaagtgcgacgcgtcgggccgcggcgcgcacgccgtggtggcggacctggacggcgcgctgctgcgctcccgcagcgcgttcccgtactacgcgctggtggccttcgaggccggcggcgtgccgcgcctgctgctgctgctgctgctggccccgctggccgcggcgctgcgggcgctggcctcggagtcggctgcgcgcgcgtgctggtgttcgcggccacggcgggcgcccgggtgcgcgacatcgagtcggcggcgcgcgccgtgctcccgcgcttctacgccgccgacgtgcacccggccgcgtggcgggtgttctcggcctgcgcacggaggcgcgtcgtgctcacggccgcgcccaggatcatggccgagccgttcttcagggactgcctcggcgccgacgccgtcgcgggcaccgagctcgccacgtggcgcggccgcgccacgggcatggtggacagccgcaggggcgtcctcgtcggctggagcagggccgacgcgctgcgggagatattggccggcgacgacgacgangacgccgcgcccgacgtcggcctcgggaacagccgctccgactaccccttcatgagcatgtgcaaggcgtcaacaatcangtacgtctacacacacgcccacgggtttgggcggtagttgggaccgatgagccttcatgcatgtttngtatgcgttgcaagctaaaaaaggatctgcctagactgtcagcacacacgacacggcgcaaactcgtcgtgtgggcttgggacatcctgcatatgccaactgccccttggggttccttgttaacaagtcttgccggccggtacacctttgagggtgttagacatggttaaaggttttggaggcagagatttcctattcactaagtcacgcttatnnataaatcataaccacct

SEQ ID NO: 19287 - protein, 216 aa, Zea mays subsp. mays
  peptide (1)..(216): Ceres Seq. ID no. 12420211
  misc_feature (31)..(76): Homolog of NCBI NO: 34912958 NR Description: B1158C05.6 [Oryza sativa (japonica
  misc_feature (23)..(85): Homolog of NCBI NO: 15229747 NR Description: unknown protein; protein id: At3g11430.1
  misc_feature (23)..(79): Homolog of NCBI NO: 15239924 NR Description: putative protein; protein id: At5g06090.1
  misc_feature (3)..(85): Homolog of NCBI NO: 37534314 NR Description: hypothetical protein [Oryza sativa (japonica
  misc_feature (16)..(83): Homolog of NCBI NO: 17064780 NR Description: Unknown protein [Arabidopsis thaliana]
  misc_feature (16)..(83): Homolog of NCBI NO: 15236810 NR Description: putative protein; protein id: At4g00410.1
  misc_feature (16)..(83): Homolog of NCBI NO: 15223437 NR Description: hypothetical protein
  misc_feature (16)..(85): Homolog of NCBI NO: 15224445 NR Description: unknown protein
  misc_feature (53)..(84): Homolog of NCBI NO: 29788867 NR Description: hypothetical protein [Oryza sativa (japonica
  misc_feature (15)..(84): Homolog of NCBI NO: 38000002 NR Description: unknown protein [Oryza sativa (japonica
  misc_feature (199)..(199): Xaa is any aa, unknown or other
MEEAVEAVVAAGVEPFPTVDKCDASGRGAHAVVADLDGALLRSRSAFPYYALVAFEAGGVPRLLLLLLLAPLAAALRALASESAARACWCSRPRRAPGCATSSRRRAPCSRASTPPTCTRPRGGCSRPAHGGASCSRPRPGSWPSRSSGTASAPTPSRAPSSPRGAAAPRAWWTAAGASSSAGAGPTRCGRYWPATTTXTPRPTSASGTAAPTTPS

SEQ ID NO: 19288 - DNA, 2102 bp, Zea mays subsp. mays
  misc_feature (1)..(2102): Ceres Seq. ID no. 13493251
  misc_feature: MA Experiment ID: 108522 Result: Down-regulated in Transcription
  misc_feature: MA Experiment 108522 PARAMETER Experiment Name: Zm_42deg_Heat_P Parameter: Age (day) Value: 8
  misc_feature: MA Experiment 108522 PARAMETER Experiment Name: Zm_42deg_Heat_P Parameter: Organism Value: Zea mays
  misc_feature: MA Experiment 108522 PARAMETER Experiment Name: Zm_42deg_Heat_P Parameter: Plant Line Value: 35A19
  misc_feature: MA Experiment 108522 PARAMETER Experiment Name: Zm_42deg_Heat_P Parameter: Temperature (deg C) Value: 42 vs. 22
  misc_feature: MA Experiment 108522 PARAMETER Experiment Name: Zm_42deg_Heat_P Parameter: Timepoint (hr) Value: 1
  misc_feature: MA Experiment 108522 PARAMETER Experiment Name: Zm_42deg_Heat_P Parameter: Tissue Value: Aerial
  misc_feature: MA Experiment ID: 108528 Result: Up-regulated in Transcription
  misc_feature: MA Experiment 108528 PARAMETER Experiment Name: Zm_Imbibed_Seeds_P Parameter: Age (day) Value: 5 vs. 2
  misc_feature: MA Experiment 108528 PARAMETER Experiment Name: Zm_Imbibed_Seeds_P Parameter: Organism Value: Zea mays
  misc_feature: MA Experiment 108528 PARAMETER Experiment Name: Zm_Imbibed_Seeds_P Parameter: Plant Line Value: 35A19
  misc_feature: MA Experiment 108528 PARAMETER Experiment Name: Zm_Imbibed_Seeds_P Parameter: Tissue Value: Aerial vs. Embryo
  misc_feature: MA Experiment ID: 108530 Result: Up-regulated in Transcription
  misc_feature: MA Experiment 108530 PARAMETER Experiment Name: Zm_Imbibed_Seeds_P Parameter: Age (day) Value: 6 vs. 2
  misc_feature: MA Experiment 108530 PARAMETER Experiment Name: Zm_Imbibed_Seeds_P Parameter: Organism Value: Zea mays
  misc_feature: MA Experiment 108530 PARAMETER Experiment Name: Zm_Imbibed_Seeds_P Parameter: Plant Line Value: 35A19
  misc_feature: MA Experiment 108530 PARAMETER Experiment Name: Zm_Imbibed_Seeds_P Parameter: Tissue Value: Aerial vs. Embryo
  misc_feature: MA Experiment ID: 108536 Result: Down-regulated in Transcription
  misc_feature: MA Experiment 108536 PARAMETER Experiment Name: Zm_Meristem_P Parameter: Age (day) Value: 8
  misc_feature: MA Experiment 108536 PARAMETER Experiment Name: Zm_Meristem_P Parameter: Organism Value: Zea mays
  misc_feature: MA Experiment 108536 PARAMETER Experiment Name: Zm_Meristem_P Parameter: Plant Line Value: 35A19
  misc_feature: MA Experiment 108536 PARAMETER Experiment Name: Zm_Meristem_P Parameter: Tissue Value: Shoot Meristem vs. Above Shoot Meristem
  misc_feature: MA Experiment ID: 108545 Result: Up-regulated in Transcription
  misc_feature: MA Experiment 108545 PARAMETER Experiment Name: Zm_Imbibed_Seeds_P Parameter: Age (day) Value: 3 vs. 2
  misc_feature: MA Experiment 108545 PARAMETER Experiment Name: Zm_Imbibed_Seeds_P Parameter: Organism Value: Zea mays
  misc_feature: MA Experiment 108545 PARAMETER Experiment Name: Zm_Imbibed_Seeds_P Parameter: Plant Line Value: 35A19
  misc_feature: MA Experiment 108545 PARAMETER Experiment Name: Zm_Imbibed_Seeds_P Parameter: Tissue Value: Aerial vs. Embryo
  misc_feature: MA Experiment ID: 108556 Result: Down-regulated in Transcription
  misc_feature: MA Experiment 108556 PARAMETER Experiment Name: Zm_Drought_P Parameter: Age (day) Value: 9
  misc_feature: MA Experiment 108556 PARAMETER Experiment Name: Zm_Drought_P Parameter: Organism Value: Zea mays
  misc_feature: MA Experiment 108556 PARAMETER Experiment Name: Zm_Drought_P Parameter: Plant Line Value: 35A19
  misc_feature: MA Experiment 108556 PARAMETER Experiment Name: Zm_Drought_P Parameter: Timepoint (hr) Value: 24
  misc_feature: MA Experiment 108556 PARAMETER Experiment Name: Zm_Drought_P Parameter: Tissue Value: Aerial
  misc_feature: MA Experiment 108556 PARAMETER Experiment Name: Zm_Drought_P Parameter: Treatment Value: Drought vs. No Drought
  misc_feature: MA Experiment ID: 20000492 Result: Down-regulated in Transcription
  misc_feature: MA Experiment 20000492 PARAMETER Experiment Name: Zm_Hybrid_Seed_Dev_P Parameter: DAP Value: 12
  misc_feature: MA Experiment 20000492 PARAMETER Experiment Name: Zm_Hybrid_Seed_Dev_P Parameter: Organism Value: Zea mays
  misc_feature: MA Experiment 20000492 PARAMETER Experiment Name: Zm_Hybrid_Seed_Dev_P Parameter: Plant Line Value: 35A19
  misc_feature: MA Experiment 20000492 PARAMETER Experiment Name: Zm_Hybrid_Seed_Dev_P Parameter: Tissue Value: Fert Kernel vs. Unfert Floret
taatcgaaaaataatcgacacacacctaacagagtaacagacaccaaacaacgcccatcactcgcgccgtacatcctgcctcctcccgcgcgcgcgcgtgcgtgcacgctagctagctgccggtcgcctcgccaccatggtgttcgacgcgagcggcagcaggtcggcggcggcggcgtcggggaaccctctccgcgtgatcctgacgcgcgggttcgcgcggcaggtgctcgtggggcggtggttgacggtgttcgcgagcctgctcatcatggcgtcctccggcgcgacgtacatcttcgggagctactccggcacgctcaagtcgtcgctcgggtacgaccagcgcacgctcaacaccgtgtccttcttcaaggacctcggcgccaacctgggcgtcttctcggggctcatcaacgaggtgaccccgccgtgggtggtgctggccatgggcgccgccatgaacctgtccgggtacctcatggtgtacctggccgtgtccgggcgcaccgcgccgccgccgctgtggctcgtctgcctctacttcttcgtgggcgccaactcgcagtcgttcgccaacaccggcgcgctggtgacctgcgtcaagaacttccccgacagccgcggggtggtgctcggcatcctcaagggcttcgtcggcctcagcggcgccgtgtacacgcagctgtacctggccctgtacggcggcgacgacgccgagtcgctgatcctcctcgtcgcctggctccccgcggcggtgtccgtcgtgttcgtccacaccatccggtacatgccgtacccgcgccgccgtgggcaggagacgagctccgactccgaccccttcttctgcttcctctacctctccatcgcgctggcgtgcttcctcctcgtcatgatcgtggtgcagaagcaggtgcccttctcccgcgccgcgtacggcgtggccgccacgccgctgctcatcctcctcctcatgcccctcggcgtcgtcgtcaagcaggagtacaagatctaccgggagcgccagctcgacgccgccgacccgccgccgccgaccatcgtctccgcgtcggcaacggacgccatcaagaaaacagagcagcagccggcgtcgtcgtcgttctgtgggtgcgtgaggaccatgttccgtccgccggctcgtggggaggactacacgatcctgcaggcgctggtgagcgtggacatgctggtgctgttcgtggcgacaatctgcggcgtgggcgggacgctgacggcgatcgacaacatggggcagatcggggagtcgctgggctacccagccaggagcgtcaacacgttcgtgtccctgatcagcatctggaactacgcggggcgcgtgacggcgggctacgcctcggaggcggcgctggcccggtaccgcgtgccgcggccgctgctgctgacgggggtgctggcgctggcgtgcgcggggcacgtgctgatcgcgctgggcgcgccgcggtccctgtacgcggcgtcggtggtcgtcgggttctgcttcggcgcgcagtggccgctggtgttcgccatcatctcggaggtgttcgggctcaagtactactccacgctctacaacttgggcggcatggccagccccgtgggctcctacatcctgaacgtgcgcgtggcggggcggctctacgacgcggcggccgcgcggcagcgcggccgcggcaggatctgcctcggggtggagtgctaccggcggtcgttcctgatcgtcacggcggaccacggtggtcggcgcgctggtgtcgctcgtgctggtgtggcggacgtggacgttctacaggggcgacatctacgcgaggttccgggacggagacgagggcccggggcgggacgggcgcctgccggtcgaccagaaacgggaggaggagcagagggagaaggcggcggccaacggcaggaaggcgtgaggtggtgagcgggagcgggaaggcatggtcagggacgacgacgagtggggtgtacttgtacatgtgaatatagtactttttttgttgcattcacccgtgatgaccgacccttgttacctttcaaatttaaatagcctaaaaaaagccttcttgtccgtttcc

SEQ ID NO: 19289 - protein, 603 aa, Zea mays subsp. mays
  peptide (1)..(603): Ceres Seq. ID no. 13493252
  misc_feature (35)..(191): Pfam Name: Sugar (and other) transporter Pfam Description: Sugar (and other) transporter
  misc_feature (24)..(286): Homolog of NCBI NO: 18395988 NR Description: expressed protein [Arabidopsis thaliana]
  misc_feature (348)..(538): Homolog of NCBI NO: 15221898 NR Description: hypothetical protein [Arabidopsis thaliana]
  misc_feature (28)..(287): Homolog of NCBI NO: 15221898 NR Description: hypothetical protein [Arabidopsis thaliana]
  misc_feature (230)..(538): Homolog of NCBI NO: 34897160 NR Description: putative nodule-specific protein
  misc_feature (5)..(328): Homolog of NCBI NO: 34897160 NR Description: putative nodule-specific protein
  misc_feature (25)..(538): Homolog of NCBI NO: 3329366 NR Description: nodule-specific protein Nlj70 [Lotus japonicus]
  misc_feature (34)..(538): Homolog of NCBI NO: 15226338 NR Description: nodulin-related protein [Arabidopsis thaliana]
  misc_feature (30)..(538): Homolog of NCBI NO: 15225053 NR Description: nodulin-related protein [Arabidopsis thaliana]
  misc_feature (27)..(538): Homolog of NCBI NO: 37531482 NR Description: hypothetical protein [Oryza sativa (japonica
  misc_feature (1)..(538): Homolog of NCBI NO: 34394606 NR Description: putative nodule-specific protein
MVFDASGSRSAAAASGNPLRVILTRGFARQVLVGRWLTVFASLLIMASSGATYIFGSYSGTLKSSLGYDQRTLNTVSFFKDLGANLGVFSGLINEVTPPWVVLAMGAAMNLSGYLMVYLAVSGRTAPPPLWLVCLYFFVGANSQSFANTGALVTCVKNFPDSRGVVLGILKGFVGLSGAVYTQLYLALYGGDDAESLILLVAWLPAAVSVVFVHTIRYMPYPRRRGQETSSDSDPFFCFLYLSIALACFLLVMIVVQKQVPFSRAAYGVAATPLLILLLMPLGVVVKQEYKIYRERQLDAADPPPPTIVSASATDAIKKTEQQPASSSFCGCVRTMFRPPARGEDYTILQALVSVDMLVLFVATICGVGGTLTAIDNMGQIGESLGYPARSVNTFVSLISIWNYAGRVTAGYASEAALARYRVPRPLLLTGVLALACAGHVLIALGAPRSLYAASVVVGFCFGAQWPLVFAIISEVFGLKYYSTLYNLGGMASPVGSYILNVRVAGRLYDAAAARQRGRGRICLGVECYRRSFLIVTADHGGRRAGVARAGVADVDVLQGRHLREVPGRRRGPGAGRAPAGRPETGGGAEGEGGGQRQEGVRW

SEQ ID NO: 19290 - protein, 558 aa, Zea mays subsp. mays
  peptide (1)..(558): Ceres Seq. ID no. 13493253
  misc_feature (1)..(146): Pfam Name: Sugar (and other) transporter Pfam Description: Sugar (and other) transporter
  misc_feature (1)..(241): Homolog of NCBI NO: 18395988 NR Description: expressed protein [Arabidopsis thaliana]
  misc_feature (303)..(493): Homolog of NCBI NO: 15221898 NR Description: hypothetical protein [Arabidopsis thaliana]
  misc_feature (1)..(242): Homolog of NCBI NO: 15221898 NR Description: hypothetical protein [Arabidopsis thaliana]
  misc_feature (185)..(493): Homolog of NCBI NO: 34897160 NR Description: putative nodule-specific protein
  misc_feature (1)..(283): Homolog of NCBI NO: 34897160 NR Description: putative nodule-specific protein
  misc_feature (1)..(493): Homolog of NCBI NO: 3329366 NR Description: nodule-specific protein Nlj70 [Lotus japonicus]
  misc_feature (1)..(493): Homolog of NCBI NO: 15226338 NR Description: nodulin-related protein [Arabidopsis thaliana]
  misc_feature (1)..(493): Homolog of NCBI NO: 15225053 NR Description: nodulin-related protein [Arabidopsis thaliana]
  misc_feature (1)..(493): Homolog of NCBI NO: 37531482 NR Description: hypothetical protein [Oryza sativa (japonica
  misc_feature (1)..(493): Homolog of NCBI NO: 34394606 NR Description: putative nodule-specific protein
MASSGATYIFGSYSGTLKSSLGYDQRTLNTVSFFKDLGANLGVFSGLINEVTPPWVVLAMGAAMNLSGYLMVYLAVSGRTAPPPLWLVCLYFFVGANSQSFANTGALVTCVKNFPDSRGVVLGILKGFVGLSGAVYTQLYLALYGGDDAESLILLVAWLPAAVSVVFVHTIRYMPYPRRRGQETSSDSDPFFCFLYLSIALACFLLVMIVVQKQVPFSRAAYGVAATPLLILLLMPLGVVVKQEYKIYRERQLDAADPPPPTIVSASATDAIKKTEQQPASSSFCGCVRTMFRPPARGEDYTILQALVSVDMLVLFVATICGVGGTLTAIDNMGQIGESLGYPARSVNTFVSLISIWNYAGRVTAGYASEAALARYRVPRPLLLTGVLALACAGHVLIALGAPRSLYAASVVVGFCFGAQWPLVFAIISEVFGLKYYSTLYNLGGMASPVGSYILNVRVAGRLYDAAAARQRGRGRICLGVECYRRSFLIVTADHGGRRAGVARAGVADVDVLQGRHLREVPGRRRGPGAGRAPAGRPETGGGAEGEGGGQRQEGVRW

SEQ ID NO: 19291 - protein, 499 aa, Zea mays subsp. mays
  peptide (1)..(499): Ceres Seq. ID no. 13493254
  misc_feature (1)..(87): Pfam Name: Sugar (and other) transporter Pfam Description: Sugar (and other) transporter
  misc_feature (1)..(182): Homolog of NCBI NO: 18395988 NR Description: expressed protein [Arabidopsis thaliana]
  misc_feature (244)..(434): Homolog of NCBI NO: 15221898 NR Description: hypothetical protein [Arabidopsis thaliana]
  misc_feature (1)..(183): Homolog of NCBI NO: 15221898 NR Description: hypothetical protein [Arabidopsis thaliana]
  misc_feature (126)..(434): Homolog of NCBI NO: 34897160 NR Description: putative nodule-specific protein
  misc_feature (1)..(224): Homolog of NCBI NO: 34897160 NR Description: putative nodule-specific protein
  misc_feature (1)..(434): Homolog of NCBI NO: 3329366 NR Description: nodule-specific protein Nlj70 [Lotus japonicus]
  misc_feature (1)..(434): Homolog of NCBI NO: 15226338 NR Description: nodulin-related protein [Arabidopsis thaliana]
  misc_feature (1)..(434): Homolog of NCBI NO: 15225053 NR Description: nodulin-related protein [Arabidopsis thaliana]
  misc_feature (1)..(434): Homolog of NCBI NO: 37531482 NR Description: hypothetical protein [Oryza sativa (japonica
  misc_feature (1)..(434): Homolog of NCBI NO: 34394606 NR Description: putative nodule-specific protein
MGAAMNLSGYLMVYLAVSGRTAPPPLWLVCLYFFVGANSQSFANTGALVTCVKNFPDSRGVVLGILKGFVGLSGAVYTQLYLALYGGDDAESLILLVAWLPAAVSVVFVHTIRYMPYPRRRGQETSSDSDPFFCFLYLSIALACFLLVMIVVQKQVPFSRAAYGVAATPLLILLLMPLGVVVKQEYKIYRERQLDAADPPPPTIVSASATDAIKKTEQQPASSSFCGCVRTMFRPPARGEDYTILQALVSVDMLVLFVATICGVGGTLTAIDNMGQIGESLGYPARSVNTFVSLISIWNYAGRVTAGYASEAALARYRVPRPLLLTGVLALACAGHVLIALGAPRSLYAASVVVGFCFGAQWPLVFAIISEVFGLKYYSTLYNLGGMASPVGSYILNVRVAGRLYDAAAARQRGRGRICLGVECYRRSFLIVTADHGGRRAGVARAGVADVDVLQGRHLREVPGRRRGPGAGRAPAGRPETGGGAEGEGGGQRQEGVRW

SEQ ID NO: 19292 - DNA, 1663 bp, Zea mays subsp. mays
  misc_feature (1)..(1663): Ceres Seq. ID no. 12381819
  misc_feature: MA Experiment ID: 108522 Result: Up-regulated in Transcription
  misc_feature: MA Experiment 108522 PARAMETER Experiment Name: Zm_42deg_Heat_P Parameter: Age (day) Value: 8
  misc_feature: MA Experiment 108522 PARAMETER Experiment Name: Zm_42deg_Heat_P Parameter: Organism Value: Zea mays
  misc_feature: MA Experiment 108522 PARAMETER Experiment Name: Zm_42deg_Heat_P Parameter: Plant Line Value: 35A19
  misc_feature: MA Experiment 108522 PARAMETER Experiment Name: Zm_42deg_Heat_P Parameter: Temperature (deg C) Value: 42 vs. 22
  misc_feature: MA Experiment 108522 PARAMETER Experiment Name: Zm_42deg_Heat_P Parameter: Timepoint (hr) Value: 1
  misc_feature: MA Experiment 108522 PARAMETER Experiment Name: Zm_42deg_Heat_P Parameter: Tissue Value: Aerial
  misc_feature: MA Experiment ID: 108535 Result: Up-regulated in Transcription
  misc_feature: MA Experiment 108535 PARAMETER Experiment Name: Zm_Meristem_P Parameter: Age (day) Value: 8
  misc_feature: MA Experiment 108535 PARAMETER Experiment Name: Zm_Meristem_P Parameter: Organism Value: Zea mays
  misc_feature: MA Experiment 108535 PARAMETER Experiment Name: Zm_Meristem_P Parameter: Plant Line Value: 35A19
  misc_feature: MA Experiment 108535 PARAMETER Experiment Name: Zm_Meristem_P Parameter: Tissue Value: Root Meristem vs. Above Root Meristem
  misc_feature: MA Experiment ID: 108545 Result: Down-regulated in Transcription
  misc_feature: MA Experiment 108545 PARAMETER Experiment Name: Zm_Imbibed_Seeds_P Parameter: Age (day) Value: 3 vs. 2
  misc_feature: MA Experiment 108545 PARAMETER Experiment Name: Zm_Imbibed_Seeds_P Parameter: Organism Value: Zea mays
  misc_feature: MA Experiment 108545 PARAMETER Experiment Name: Zm_Imbibed_Seeds_P Parameter: Plant Line Value: 35A19
  misc_feature: MA Experiment 108545 PARAMETER Experiment Name: Zm_Imbibed_Seeds_P Parameter: Tissue Value: Aerial vs. Embryo
  misc_feature: MA Experiment ID: 108547 Result: Down-regulated in Transcription
  misc_feature: MA Experiment 108547 PARAMETER Experiment Name: Zm_Imbibed_Seeds_P Parameter: Age (day) Value: 4 vs. 2
  misc_feature: MA Experiment 108547 PARAMETER Experiment Name: Zm_Imbibed_Seeds_P Parameter: Organism Value: Zea mays
  misc_feature: MA Experiment 108547 PARAMETER Experiment Name: Zm_Imbibed_Seeds_P Parameter: Plant Line Value: 35A19
  misc_feature: MA Experiment 108547 PARAMETER Experiment Name: Zm_Imbibed_Seeds_P Parameter: Tissue Value: Aerial vs. Embryo
actactggtagaactagagcttagaagtgccggttttccacgaggcgagcgcgcggtcatggggtcactgtcgacggcggaggggcagcggccgcacgccgtgtgcatgccgtacccggcgcagggccacgtgacgcccatgctcaagctcgccaagctcctccacgcgcggggcttccagatcaccttcgtcaacaccgagttcaaccaccgccgcctgctccactcgcgcgggcccgacgcgctcgaccgcgtgcccgggttccgcttcgacgccattcccgacggcctcccgccgtccgacgccgacgccacgcaggacatccccgcgctctgctactccaccatgaccacctgcctcccgcacctcctcgcgctcctcgccagggtcgacgccgacgccgggtccccgccggtcacctgcctcgtcgtggacgccgtcatgtcgttcggcttcgacgccgccaggcagatcggcgtgcccgtcgccgcgctctggaccgccagcgcctgcgggttcatgggctaccggaactacagaaacctcatcgactggggcctcgtgccattcaagagcgccgcggacctccaggacaacgtcggcggcggccacctcgccaccgtggtcaccggcgcgcgcggcatgtgcgacggcgtgcagctgcgcgacttccccaacttcatccgcaccacggaccgcgcggacttcatgttcaacttcctcatgcgcgagtccgagcggctgtcgctccccgacggcgtcatcgtcaacaccttcgaggacctcgagggagccacgctggacgccatgcgcgctatcctcccgacggtgtaccccgtcggcccgctcctcctccgcgagcgcctggagatccccgctagcagcccgctcgcggtcctcggctccaacctctggaaggaggaggaaggcctcctggagtggctcgctggccgcgcgccgcgatccgtggtgtacgtgaactacggcagcatcacggtgatgaccaactcgcagctgctcgagttcgcgtggggcctggccaacagcgggtacccgttcgtgtggaacatccggccggacctggtgaagggcgactccgccgtgctgccgccggagttcgcgtccgccgtcgagggccgcgcgttgctgacgacgtggtgcccgcaggaggcggcgatccagcatgaggcggtcggggtgttcctgactcactccggctggaactccaccctggagagcctctgcgcgggggtgcccatgctgagctggcccttcttcgcggagcagcagaccaactgccggtacaagcgcacggagtggggagtcgggatggagatcggcggcgaggtgcggcgcgacgaggtgacggtcgttctaaaggaggccatggacggggagaaggggagggagatgcgccggcgcgcagaggagtggaaggagaaggccgtgaaggtgacgctgccgggtgggcctgcggagactaacctcgagagggtcatccacgaggtgctgctctcccagaaaaagggatagactgccaacgcgtgatcgtcgtgggagtatcatgttcgggagcatcatgccttgcccctcgctttgctgtgttttcttatttacgtgtgttagctttgaataattaattatctcaactttcagctctcg

SEQ ID NO: 19293 - protein, 510 aa, Zea mays subsp. mays
  peptide (1)..(510): Ceres Seq. ID no. 12381820
  misc_feature (32)..(507): Pfam Name: UDP-glucoronosyl and UDP-glucosyl transferase Pfam Description: UDP-glucoronosyl and UDP-glucosyl transferase
  misc_feature (20)..(508): Homolog of NCBI NO: 15219876 NR Description: UDP-glucose glucosyltransferase, putative
  misc_feature (20)..(507): Homolog of NCBI NO: 25286821 NR Description: T16E15.2 protein - Arabidopsis thaliana
  misc_feature (29)..(504): Homolog of NCBI NO: 19911203 NR Description: glucosyltransferase-10 [Vigna angularis]
  misc_feature (29)..(507): Homolog of NCBI NO: 15219870 NR Description: UDP-glucose glucosyltransferase
  misc_feature (29)..(507): Homolog of NCBI NO: 17065006 NR Description: UDP-glucose glucosyltransferase [Arabidopsis
  misc_feature (26)..(508): Homolog of NCBI NO: 38347667 NR Description: OSJNBa0054D14.2 [Oryza sativa (japonica
  misc_feature (36)..(509): Homolog of NCBI NO: 38344775 NR Description: OSJNBb0026L04.6 [Oryza sativa (japonica
  misc_feature (26)..(509): Homolog of NCBI NO: 38569140 NR Description: OSJNBb0033P05.8 [Oryza sativa (japonica
  misc_feature (20)..(506): Homolog of NCBI NO: 38569139 NR Description: OSJNBb0033P05.7 [Oryza sativa (japonica
  misc_feature (20)..(506): Homolog of NCBI NO: 38344776 NR Description: OSJNBb0026L04.7 [Oryza sativa (japonica
LLVELELRSAGFPRGERAVMGSLSTAEGQRPHAVCMPYPAQGHVTPMLKLAKLLHARGFQITFVNTEFNHRRLLHSRGPDALDRVPGFRFDAIPDGLPPSDADATQDIPALCYSTMTTCLPHLLALLARVDADAGSPPVTCLVVDAVMSFGFDAARQIGVPVAALWTASACGFMGYRNYRNLIDWGLVPFKSAADLQDNVGGGHLATVVTGARGMCDGVQLRDFPNFIRTTDRADFMFNFLMRESERLSLPDGVIVNTFEDLEGATLDAMRAILPTVYPVGPLLLRERLEIPASSPLAVLGSNLWKEEEGLLEWLAGRAPRSVVYVNYGSITVMTNSQLLEFAWGLANSGYPFVWNIRPDLVKGDSAVLPPEFASAVEGRALLTTWCPQEAAIQHEAVGVFLTHSGWNSTLESLCAGVPMLSWPFFAEQQTNCRYKRTEWGVGMEIGGEVRRDEVTVVLKEAMDGEKGREMRRRAEEWKEKAVKVTLPGGPAETNLERVIHEVLLSQKKG

SEQ ID NO: 19294 - protein, 491 aa, Zea mays subsp. mays
  peptide (1)..(491): Ceres Seq. ID no. 12381821
  misc_feature (13)..(488): Pfam Name: UDP-glucoronosyl and UDP-glucosyl transferase Pfam Description: UDP-glucoronosyl and UDP-glucosyl transferase
  misc_feature (1)..(489): Homolog of NCBI NO: 15219876 NR Description: UDP-glucose glucosyltransferase, putative
  misc_feature (1)..(488): Homolog of NCBI NO: 25286821 NR Description: T16E15.2 protein - Arabidopsis thaliana
  misc_feature (10)..(485): Homolog of NCBI NO: 19911203 NR Description: glucosyltransferase-10 [Vigna angularis]
  misc_feature (10)..(488): Homolog of NCBI NO: 15219870 NR Description: UDP-glucose glucosyltransferase
  misc_feature (10)..(488): Homolog of NCBI NO: 17065006 NR Description: UDP-glucose glucosyltransferase [Arabidopsis
  misc_feature (7)..(489): Homolog of NCBI NO: 38347667 NR Description: OSJNBa0054D14.2 [Oryza sativa (japonica
  misc_feature (17)..(490): Homolog of NCBI NO: 38344775 NR Description: OSJNBb0026L04.6 [Oryza sativa (japonica
  misc_feature (7)..(490): Homolog of NCBI NO: 38569140 NR Description: OSJNBb0033P05.8 [Oryza sativa (japonica
  misc_feature (1)..(487): Homolog of NCBI NO: 38569139 NR Description: OSJNBb0033P05.7 [Oryza sativa (japonica
  misc_feature (1)..(487): Homolog of NCBI NO: 38344776 NR Description: OSJNBb0026L04.7 [Oryza sativa (japonica
MGSLSTAEGQRPHAVCMPYPAQGHVTPMLKLAKLLHARGFQITFVNTEFNHRRLLHSRGPDALDRVPGFRFDAIPDGLPPSDADATQDIPALCYSTMTTCLPHLLALLARVDADAGSPPVTCLVVDAVMSFGFDAARQIGVPVAALWTASACGFMGYRNYRNLIDWGLVPFKSAADLQDNVGGGHLATVVTGARGMCDGVQLRDFPNFIRTTDRADFMFNFLMRESERLSLPDGVIVNTFEDLEGATLDAMRAILPTVYPVGPLLLRERLEIPASSPLAVLGSNLWKEEEGLLEWLAGRAPRSVVYVNYGSITVMTNSQLLEFAWGLANSGYPFVWNIRPDLVKGDSAVLPPEFASAVEGRALLTTWCPQEAAIQHEAVGVFLTHSGWNSTLESLCAGVPMLSWPFFAEQQTNCRYKRTEWGVGMEIGGEVRRDEVTVVLKEAMDGEKGREMRRRAEEWKEKAVKVTLPGGPAETNLERVIHEVLLSQKKG

SEQ ID NO: 19295 - protein, 475 aa, Zea mays subsp. mays
  peptide (1)..(475): Ceres Seq. ID no. 12381822
  misc_feature (1)..(472): Pfam Name: UDP-glucoronosyl and UDP-glucosyl transferase Pfam Description: UDP-glucoronosyl and UDP-glucosyl transferase
  misc_feature (1)..(472): Homolog of NCBI NO: 17065006 NR Description: UDP-glucose glucosyltransferase [Arabidopsis
  misc_feature (1)..(473): Homolog of NCBI NO: 38347667 NR Description: OSJNBa0054D14.2 [Oryza sativa (japonica
  misc_feature (1)..(474): Homolog of NCBI NO: 38344775 NR Description: OSJNBb0026L04.6 [Oryza sativa (japonica
  misc_feature (1)..(473): Homolog of NCBI NO: 15219876 NR Description: UDP-glucose glucosyltransferase, putative
  misc_feature (1)..(469): Homolog of NCBI NO: 19911203 NR Description: glucosyltransferase-10 [Vigna angularis]
  misc_feature (1)..(472): Homolog of NCBI NO: 15219870 NR Description: UDP-glucose glucosyltransferase
  misc_feature (1)..(472): Homolog of NCBI NO: 25286821 NR Description: T16E15.2 protein - Arabidopsis thaliana
  misc_feature (1)..(474): Homolog of NCBI NO: 38569140 NR Description: OSJNBb0033P05.8 [Oryza sativa (japonica
  misc_feature (1)..(471): Homolog of NCBI NO: 38569139 NR Description: OSJNBb0033P05.7 [Oryza sativa (japonica
  misc_feature (1)..(471): Homolog of NCBI NO: 38344776 NR Description: OSJNBb0026L04.7 [Oryza sativa (japonica
MPYPAQGHVTPMLKLAKLLHARGFQITFVNTEFNHRRLLHSRGPDALDRVPGFRFDAIPDGLPPSDADATQDIPALCYSTMTTCLPHLLALLARVDADAGSPPVTCLVVDAVMSFGFDAARQIGVPVAALWTASACGFMGYRNYRNLIDWGLVPFKSAADLQDNVGGGHLATVVTGARGMCDGVQLRDFPNFIRTTDRADFMFNFLMRESERLSLPDGVIVNTFEDLEGATLDAMRAILPTVYPVGPLLLRERLEIPASSPLAVLGSNLWKEEEGLLEWLAGRAPRSVVYVNYGSITVMTNSQLLEFAWGLANSGYPFVWNIRPDLVKGDSAVLPPEFASAVEGRALLTTWCPQEAAIQHEAVGVFLTHSGWNSTLESLCAGVPMLSWPFFAEQQTNCRYKRTEWGVGMEIGGEVRRDEVTVVLKEAMDGEKGREMRRRAEEWKEKAVKVTLPGGPAETNLERVIHEVLLSQKKG

SEQ ID NO: 19296 - DNA, 1230 bp, Zea mays subsp. mays
  misc_feature (1)..(1230): Ceres Seq. ID no. 12360571
  misc_feature: MA Experiment ID: 108529 Result: Down-regulated in Transcription
  misc_feature: MA Experiment 108529 PARAMETER Experiment Name: Zm_Imbibed_Seeds_P Parameter: Age (day) Value: 5 vs. 2
  misc_feature: MA Experiment 108529 PARAMETER Experiment Name: Zm_Imbibed_Seeds_P Parameter: Organism Value: Zea mays
  misc_feature: MA Experiment 108529 PARAMETER Experiment Name: Zm_Imbibed_Seeds_P Parameter: Plant Line Value: 35A19
  misc_feature: MA Experiment 108529 PARAMETER Experiment Name: Zm_Imbibed_Seeds_P Parameter: Tissue Value: Roots vs. Embryo
  misc_feature: MA Experiment ID: 108546 Result: Down-regulated in Transcription
  misc_feature: MA Experiment 108546 PARAMETER Experiment Name: Zm_Imbibed_Seeds_P Parameter: Age (day) Value: 3 vs. 2
  misc_feature: MA Experiment 108546 PARAMETER Experiment Name: Zm_Imbibed_Seeds_P Parameter: Organism Value: Zea mays
  misc_feature: MA Experiment 108546 PARAMETER Experiment Name: Zm_Imbibed_Seeds_P Parameter: Plant Line Value: 35A19
  misc_feature: MA Experiment 108546 PARAMETER Experiment Name: Zm_Imbibed_Seeds_P Parameter: Tissue Value: Roots vs. Embryo
gcacgagaccattacctagaacatcctaatcgaaaagggaactagaattcgacgccgctgtggactggtcatggcgtgctaccgcgcatccacggcgccgacggcccaccgaggtctaggaaaaatagaatggttggtatggtagggtaggtgaaccggtgaagattagagggactgagggagagggaccgtgacaccgtgtctagccagccaacctgctgctctagcccacctgcatggcggtgtcagcgccggtcactctctgcccctcggattctcgctccctctcttccgcgctcgtttcttcccgatccaacaagccttcttcacttgatgctgttcggtcacggcggttgaatttgggagattcagctatgccaacgcagatctccacaaggcagtctcttcggtttgctttaccttcgaacaatgcacgtccaatatcgactgcagcaagaatgacatgttttgctaagaagcaacatattgctgccgtgcccttatgtactttggaggccaaaaggtatgaacctatagtcaaaatgtgtggcattacatctgccttcgatgctgagatggctttgaaggctggagctaaattaattgggatgattctttggcccaagtccaaacgctctatcccattgtctgaagctaaagagatatccagagtggccaaatcttacggggctgaatcagtgggtgtgtttgtggatgatgatagtagtactatcttgacagcatctgattcatgcaacctcgatcttatccagcttcatggagatagctcccgagaactacttcctctgctttggaagaacaacaggattatatatgtgctaaatgctgatgaggatggtaaacttatcaatgctcctccaagtgaggaatatgttcttgattggtttttggtggacagtgcaaaaggtggaagttgcaaagggttcaactgggaaaaattccaaatgccaactgttaaaagcaagaacgggtggttattagcaggaggccttcatgcagataatgttcacgaagccgcttctgctctaaagccaaatggcctggatgttagcagtggcatatgttttcctgacggtttacggaaagacccgaagagaatgtgttccttcatgagcagtgtaaaaactttgaatctcctctaacatactagtgctttattggtcgtagtttcttggtgcagtatgtggaaactgaataaatggcagtcct

SEQ ID NO: 19297 - protein, 308 aa, Zea mays subsp. mays
  peptide (1)..(308): Ceres Seq. ID no. 12360572
  misc_feature (101)..(301): Pfam Name: N-(5'phosphoribosyl)anthranilate (PRA) isomerase Pfam Description: N-(5'phosphoribosyl)anthranilate (PRA) isomerase
  misc_feature (93)..(304): Homolog of NCBI NO: 5031261 NR Description: phosphoribosylanthranilate isomerase [Arabidopsis
  misc_feature (93)..(306): Homolog of NCBI NO: 1403670 NR Description: phosphoribosylanthranilate isomerase [Arabidopsis
  misc_feature (93)..(306): Homolog of NCBI NO: 30681012 NR Description: phosphoribosylanthranilate isomerase (PAI2)
  misc_feature (93)..(306): Homolog of NCBI NO: 10178136 NR Description: phosphoribosylanthranilate isomerase [Arabidopsis
  misc_feature (93)..(306): Homolog of NCBI NO: 25407008 NR Description: hypothetical protein [imported] - Arabidopsis
  misc_feature (93)..(306): Homolog of NCBI NO: 15223003 NR Description: phosphoribosylanthranilate isomerase
  misc_feature (93)..(306): Homolog of NCBI NO: 5031258 NR Description: phosphoribosylanthranilate isomerase [Arabidopsis
  misc_feature (93)..(306): Homolog of NCBI NO: 5031254 NR Description: phosphoribosylanthranilate isomerase [Arabidopsis
  misc_feature (93)..(306): Homolog of NCBI NO: 5031256 NR Description: phosphoribosylanthranilate isomerase [Arabidopsis
  misc_feature (99)..(306): Homolog of NCBI NO: 619749 NR Description: phosphoribosylanthranilate isomerase
MAVSAPVTLCPSDSRSLSSALVSSRSNKPSSLDAVRSRRLNLGDSAMPTQISTRQSLRFALPSNNARPISTAARMTCFAKKQHIAAVPLCTLEAKRYEPIVKMCGITSAFDAEMALKAGAKLIGMILWPKSKRSIPLSEAKEISRVAKSYGAESVGVFVDDDSSTILTASDSCNLDLIQLHGDSSRELLPLLWKNNRIIYVLNADEDGKLINAPPSEEYVLDWFLVDSAKGGSCKGFNWEKFQMPTVKSKNGWLLAGGLHADNVHEAASALKPNGLDVSSGICFPDGLRKDPKRMCSFMSSVKTLNLL

SEQ ID NO: 19298 - protein, 262 aa, Zea mays subsp. mays
  peptide (1)..(262): Ceres Seq. ID no. 12360573
  misc_feature (55)..(255): Pfam Name: N-(5'phosphoribosyl)anthranilate (PRA) isomerase Pfam Description: N-(5'phosphoribosyl)anthranilate (PRA) isomerase
  misc_feature (47)..(258): Homolog of NCBI NO: 5031261 NR Description: phosphoribosylanthranilate isomerase [Arabidopsis
  misc_feature (47)..(260): Homolog of NCBI NO: 1403670 NR Description: phosphoribosylanthranilate isomerase [Arabidopsis
  misc_feature (47)..(260): Homolog of NCBI NO: 30681012 NR Description: phosphoribosylanthranilate isomerase (PAI2)
  misc_feature (47)..(260): Homolog of NCBI NO: 10178136 NR Description: phosphoribosylanthranilate isomerase [Arabidopsis
  misc_feature (47)..(260): Homolog of NCBI NO: 25407008 NR Description: hypothetical protein [imported] - Arabidopsis
  misc_feature (47)..(260): Homolog of NCBI NO: 15223003 NR Description: phosphoribosylanthranilate isomerase
  misc_feature (47)..(260): Homolog of NCBI NO: 5031258 NR Description: phosphoribosylanthranilate isomerase [Arabidopsis
  misc_feature (47)..(260): Homolog of NCBI NO: 5031254 NR Description: phosphoribosylanthranilate isomerase [Arabidopsis
  misc_feature (47)..(260): Homolog of NCBI NO: 5031256 NR Description: phosphoribosylanthranilate isomerase [Arabidopsis
  misc_feature (53)..(260): Homolog of NCBI NO: 619749 NR Description: phosphoribosylanthranilate isomerase
MPTQISTRQSLRFALPSNNARPISTAARMTCFAKKQHIAAVPLCTLEAKRYEPIVKMCGITSAFDAEMALKAGAKLIGMILWPKSKRSIPLSEAKEISRVAKSYGAESVGVFVDDDSSTILTASDSCNLDLIQLHGDSSRELLPLLWKNNRIIYVLNADEDGKLINAPPSEEYVLDWFLVDSAKGGSCKGFNWEKFQMPTVKSKNGWLLAGGLHADNVHEAASALKPNGLDVSSGICFPDGLRKDPKRMCSFMSSVKTLNLL

SEQ ID NO: 19299 - protein, 234 aa, Zea mays subsp. mays
  peptide (1)..(234): Ceres Seq. ID no. 12360574
  misc_feature (27)..(227): Pfam Name: N-(5'phosphoribosyl)anthranilate (PRA) isomerase Pfam Description: N-(5'phosphoribosyl)anthranilate (PRA) isomerase
  misc_feature (19)..(230): Homolog of NCBI NO: 5031261 NR Description: phosphoribosylanthranilate isomerase [Arabidopsis
  misc_feature (19)..(232): Homolog of NCBI NO: 1403670 NR Description: phosphoribosylanthranilate isomerase [Arabidopsis
  misc_feature (19)..(232): Homolog of NCBI NO: 30681012 NR Description: phosphoribosylanthranilate isomerase (PAI2)
  misc_feature (19)..(232): Homolog of NCBI NO: 10178136 NR Description: phosphoribosylanthranilate isomerase [Arabidopsis
  misc_feature (19)..(232): Homolog of NCBI NO: 25407008 NR Description: hypothetical protein [imported] - Arabidopsis
  misc_feature (19)..(232): Homolog of NCBI NO: 15223003 NR Description: phosphoribosylanthranilate isomerase
  misc_feature (19)..(232): Homolog of NCBI NO: 5031258 NR Description: phosphoribosylanthranilate isomerase [Arabidopsis
  misc_feature (19)..(232): Homolog of NCBI NO: 5031254 NR Description: phosphoribosylanthranilate isomerase [Arabidopsis
  misc_feature (19)..(232): Homolog of NCBI NO: 5031256 NR Description: phosphoribosylanthranilate isomerase [Arabidopsis
  misc_feature (25)..(232): Homolog of NCBI NO: 619749 NR Description: phosphoribosylanthranilate isomerase
MTCFAKKQHIAAVPLCTLEAKRYEPIVKMCGITSAFDAEMALKAGAKLIGMILWPKSKRSIPLSEAKEISRVAKSYGAESVGVFVDDDSSTILTASDSCNLDLIQLHGDSSRELLPLLWKNNRIIYVLNADEDGKLINAPPSEEYVLDWFLVDSAKGGSCKGFNWEKFQMPTVKSKNGWLLAGGLHADNVHEAASALKPNGLDVSSGICFPDGLRKDPKRMCSFMSSVKTLNLL

SEQ ID NO: 19300 - DNA, 912 bp, Zea mays subsp. mays
  misc_feature (1)..(912): Ceres Seq. ID no. 12375830
  misc_feature: MA Experiment ID: 20000480 Result: Up-regulated in Transcription
  misc_feature: MA Experiment 20000480 PARAMETER Experiment Name: Zm_Drought_P Parameter: Age (day) Value: 11
  misc_feature: MA Experiment 20000480 PARAMETER Experiment Name: Zm_Drought_P Parameter: Organism Value: Zea mays
  misc_feature: MA Experiment 20000480 PARAMETER Experiment Name: Zm_Drought_P Parameter: Plant Line Value: 35A19
  misc_feature: MA Experiment 20000480 PARAMETER Experiment Name: Zm_Drought_P Parameter: Timepoint (hr) Value: 72
  misc_feature: MA Experiment 20000480 PARAMETER Experiment Name: Zm_Drought_P Parameter: Tissue Value: Aerial
  misc_feature: MA Experiment 20000480 PARAMETER Experiment Name: Zm_Drought_P Parameter: Treatment Value: Drought vs. No Drought
aatcccctcccgccgcgtcacatcgccgccgtcctcgtgccccgttacctctaaaaccctagcggggagccggggatgaagatccagtgcaacgcgtgcggggccgcggaggcgcgggtgctgtgctgcgcggacgaggccccgctctgcgtcgcctgcgacgaggaggtgcacgccgccaacaagctcgccgggaagcaccagcgggtgccgctcctgacggacgccgccgtcgctgccgccgcggcggccccggccgtgcccaagtgcgacatctgtcaggaggcttctggatacttcttctgcctagaggaccgtgcactactttgtagagactgtgatgttgctatacacacagtgaattcctttgtttcagtacatcagagattcctgctaactggagttcaggtgggtcttgatcctgctgatccagttccacctattgctgaaaagcacgttaatgctgctggtggatcagtaaatcaaccagtgagacatcagccaaagagaagcccgacagttcaattttcagttgaagggagtgcttctgttcctactaaaaatgtaacaaatggagattgttcaaggcagaattttgtcccaacagccaggggagaagtggttgattggactatgaataatagtacaattcggtcagtagaatctccgcctaagtacatttcagaggaaagcccgacacttctgcaatctagccagaccacaacagtcttctccaaccaaattaatggcaacagtgatggggcctaccacttgtcattctcaggtggtaatgtgacagacagcctaccagattggcccgtggatgagttcttcagtaactcagaatatggtccaaactttggcttctccgagaatggttcttctaagggtgataacgctaagctggggggc

SEQ ID NO: 19301 - protein, 279 aa, Zea mays subsp. mays
  peptide (1)..(279): Ceres Seq. ID no. 12375831
  misc_feature (60)..(107): Pfam Name: B-box zinc finger Pfam Description: B-box zinc finger
  misc_feature (1)..(112): Homolog of NCBI NO: 15234983 NR Description: CONSTANS B-box zinc finger family protein
  misc_feature (1)..(160): Homolog of NCBI NO: 3618314 NR Description: zinc finger protein [Oryza sativa (japonica
  misc_feature (1)..(130): Homolog of NCBI NO: 38344979 NR Description: OSJNBa0011L07.9 [Oryza sativa (japonica
  misc_feature (1)..(214): Homolog of NCBI NO: 3618310 NR Description: zinc finger protein [Oryza sativa (japonica
  misc_feature (1)..(278): Homolog of NCBI NO: 34903708 NR Description: putative zinc-finger protein
  misc_feature (184)..(271): Homolog of NCBI NO: 17433085 NR Description: Zinc finger protein constans-like 7
  misc_feature (1)..(129): Homolog of NCBI NO: 17433085 NR Description: Zinc finger protein constans-like 7
  misc_feature (184)..(278): Homolog of NCBI NO: 18412037 NR Description: CONSTANS B-box zinc finger family protein
  misc_feature (1)..(129): Homolog of NCBI NO: 18412037 NR Description: CONSTANS B-box zinc finger family protein
  misc_feature (1)..(278): Homolog of NCBI NO: 7489603 NR Description: zinc-finger protein R2931 [imported] - rice
MKIQCNACGAAEARVLCCADEAPLCVACDEEVHAANKLAGKHQRVPLLTDAAVAAAAAAPAVPKCDICQEASGYFFCLEDRALLCRDCDVAIHTVNSFVSVHQRFLLTGVQVGLDPADPVPPIAEKHVNAAGGSVNQPVRHQPKRSPTVQFSVEGSASVPTKNVTNGDCSRQNFVPTARGEVVDWTMNNSTIRSVESPPKYISEESPTLLQSSQTTTVFSNQINGNSDGAYHLSFSGGNVTDSLPDWPVDEFFSNSEYGPNFGFSENGSSKGDNAKLGG

SEQ ID NO: 19302 - DNA, 478 bp, Zea mays subsp. mays
  misc_feature (1)..(478): Ceres Seq. ID no. 5761353
  misc_feature: MA Experiment ID: 108535 Result: Up-regulated in Transcription
  misc_feature: MA Experiment 108535 PARAMETER Experiment Name: Zm_Meristem_P Parameter: Age (day) Value: 8
  misc_feature: MA Experiment 108535 PARAMETER Experiment Name: Zm_Meristem_P Parameter: Organism Value: Zea mays
  misc_feature: MA Experiment 108535 PARAMETER Experiment Name: Zm_Meristem_P Parameter: Plant Line Value: 35A19
  misc_feature: MA Experiment 108535 PARAMETER Experiment Name: Zm_Meristem_P Parameter: Tissue Value: Root Meristem vs. Above Root Meristem
  misc_feature: MA Experiment ID: 20000535 Result: Up-regulated in Transcription
  misc_feature: MA Experiment 20000535 PARAMETER Experiment Name: Zm_Hybrid_Seed_Dev_P Parameter: DAP Value: 30 vs. 12
  misc_feature: MA Experiment 20000535 PARAMETER Experiment Name: Zm_Hybrid_Seed_Dev_P Parameter: Organism Value: Zea mays
  misc_feature: MA Experiment 20000535 PARAMETER Experiment Name: Zm_Hybrid_Seed_Dev_P Parameter: Plant Line Value: 35A19
  misc_feature: MA Experiment 20000535 PARAMETER Experiment Name: Zm_Hybrid_Seed_Dev_P Parameter: Tissue Value: Embryo vs. Unfert Floret
accaacaggaaaaaaggcccagaggcagtgccgtgaccgattcgagacgcaagagaaggatcgagacgaggcggcggttttccggggcagcatcgtctcggccacgaagatgtcttactcaaggggctcawgtgaaaggtatggatctcgctcaccttactcgagaagcacaaggtaccgaagtcgctctaggagtgtcgactctagtgatgctgaaaaccctgggaacaacctgtatgtgactggtttgtcggctcgtgtaacggatcgagatctggagaagcacttctccactgagggtgaggtgattgatgcaagcgttgtgtatgatccttggacaagggaatcacgggggtttggttttgttaccatggctgctgttaaagatgcagatcgctgcatcaaatatctggaccgtttctgtgttgcaaggtcgggtcataactgttgagaaggcaaagagaagacgaggtagaac

SEQ ID NO: 19303 - protein, 149 aa, Zea mays subsp. mays
  peptide (1)..(149): Ceres Seq. ID no. 5761354
  misc_feature (78)..(138): Pfam Name: RNA recognition motif. (a.k.a. RRM, RBD, or RNP domain) Pfam Description: RNA recognition motif. (a.k.a. RRM, RBD, or RNP
  misc_feature (19)..(138): Homolog of NCBI NO: 1350820 NR Description: 30 kDa ribonucleoprotein, chloroplast precursor
  misc_feature (45)..(131): Homolog of NCBI NO: 40738429 NR Description: hypothetical protein AN6676.2 [Aspergillus
  misc_feature (36)..(139): Homolog of NCBI NO: 7489207 NR Description: transformer-SR ribonucleoprotein - common tobacco
  misc_feature (36)..(139): Homolog of NCBI NO: 40253470 NR Description: putative transformer-SR ribonucleoprotein
  misc_feature (35)..(139): Homolog of NCBI NO: 11275253 NR Description: transformer-2-like protein - liverwort
  misc_feature (37)..(138): Homolog of NCBI NO: 30680096 NR Description: transformer serine/arginine-rich
  misc_feature (64)..(138): Homolog of NCBI NO: 8778550 NR Description: F22G5.31 [Arabidopsis thaliana]
  misc_feature (37)..(138): Homolog of NCBI NO: 28973767 NR Description: putative transformer-SR ribonucleoprotein
  misc_feature (37)..(138): Homolog of NCBI NO: 18390758 NR Description: transformer serine/arginine-rich
  misc_feature (59)..(139): Homolog of NCBI NO: 34902002 NR Description: putative transformer serine/arginine-rich
  misc_feature (44)..(44): Xaa is any aa, unknown or other
PTGKKAQRQCRDRFETQEKDRDEAAVFRGSIVSATKMSYSRGSXERYGSRSPYSRSTRYRSRSRSVDSSDAENPGNNLYVTGLSARVTDRDLEKHFSTEGEVIDASVVYDPWTRESRGFGFVTMAAVKDADRCIKYLDRFCVARSGHNC

SEQ ID NO: 19304 - protein, 113 aa, Zea mays subsp. mays
  peptide (1)..(113): Ceres Seq. ID no. 5761355
  misc_feature (42)..(102): Pfam Name: RNA recognition motif. (a.k.a. RRM, RBD, or RNP domain) Pfam Description: RNA recognition motif. (a.k.a. RRM, RBD, or RNP
  misc_feature (1)..(102): Homolog of NCBI NO: 1350820 NR Description: 30 kDa ribonucleoprotein, chloroplast precursor
  misc_feature (9)..(95): Homolog of NCBI NO: 40738429 NR Description: hypothetical protein AN6676.2 [Aspergillus
  misc_feature (1)..(103): Homolog of NCBI NO: 7489207 NR Description: transformer-SR ribonucleoprotein - common tobacco
  misc_feature (1)..(103): Homolog of NCBI NO: 40253470 NR Description: putative transformer-SR ribonucleoprotein
  misc_feature (1)..(103): Homolog of NCBI NO: 11275253 NR Description: transformer-2-like protein - liverwort
  misc_feature (1)..(102): Homolog of NCBI NO: 30680096 NR Description: transformer serine/arginine-rich
  misc_feature (28)..(102): Homolog of NCBI NO: 8778550 NR Description: F22G5.31 [Arabidopsis thaliana]
  misc_feature (1)..(102): Homolog of NCBI NO: 28973767 NR Description: putative transformer-SR ribonucleoprotein
  misc_feature (1)..(102): Homolog of NCBI NO: 18390758 NR Description: transformer serine/arginine-rich
  misc_feature (23)..(103): Homolog of NCBI NO: 34902002 NR Description: putative transformer serine/arginine-rich
  misc_feature (8)..(8): Xaa is any aa, unknown or other
MSYSRGSXERYGSRSPYSRSTRYRSRSRSVDSSDAENPGNNLYVTGLSARVTDRDLEKHFSTEGEVIDASVVYDPWTRESRGFGFVTMAAVKDADRCIKYLDRFCVARSGHNC

SEQ ID NO: 19305 - protein, 79 aa, Zea mays subsp. mays
  peptide (1)..(79): Ceres Seq. ID no. 5761356
  misc_feature (43)..(43): Xaa is any aa, unknown or other
QQEKRPRGSAVTDSRRKRRIETRRRFSGAASSRPRRCLTQGAXVKGMDLAHLTREAQGTEVALGVSTLVMLKTLGTTCM

SEQ ID NO: 19306 - DNA, 1433 bp, Zea mays subsp. mays
  misc_feature (1)..(1433): Ceres Seq. ID no. 12382332
  misc_feature: MA Experiment ID: 108522 Result: Up-regulated in Transcription
  misc_feature: MA Experiment 108522 PARAMETER Experiment Name: Zm_42deg_Heat_P Parameter: Age (day) Value: 8
  misc_feature: MA Experiment 108522 PARAMETER Experiment Name: Zm_42deg_Heat_P Parameter: Organism Value: Zea mays
  misc_feature: MA Experiment 108522 PARAMETER Experiment Name: Zm_42deg_Heat_P Parameter: Plant Line Value: 35A19
  misc_feature: MA Experiment 108522 PARAMETER Experiment Name: Zm_42deg_Heat_P Parameter: Temperature (deg C) Value: 42 vs. 22
  misc_feature: MA Experiment 108522 PARAMETER Experiment Name: Zm_42deg_Heat_P Parameter: Timepoint (hr) Value: 1
  misc_feature: MA Experiment 108522 PARAMETER Experiment Name: Zm_42deg_Heat_P Parameter: Tissue Value: Aerial
  misc_feature: MA Experiment ID: 108523 Result: Up-regulated in Transcription
  misc_feature: MA Experiment 108523 PARAMETER Experiment Name: Zm_42deg_Heat_P Parameter: Age (day) Value: 8
  misc_feature: MA Experiment 108523 PARAMETER Experiment Name: Zm_42deg_Heat_P Parameter: Organism Value: Zea mays
  misc_feature: MA Experiment 108523 PARAMETER Experiment Name: Zm_42deg_Heat_P Parameter: Plant Line Value: 35A19
  misc_feature: MA Experiment 108523 PARAMETER Experiment Name: Zm_42deg_Heat_P Parameter: Temperature (deg C) Value: 42 vs. 22
  misc_feature: MA Experiment 108523 PARAMETER Experiment Name: Zm_42deg_Heat_P Parameter: Timepoint (hr) Value: 6
  misc_feature: MA Experiment 108523 PARAMETER Experiment Name: Zm_42deg_Heat_P Parameter: Tissue Value: Aerial
  misc_feature: MA Experiment ID: 108527 Result: Up-regulated in Transcription
  misc_feature: MA Experiment 108527 PARAMETER Experiment Name: Zm_5mM_NO_P Parameter: Age (day) Value: 8
  misc_feature: MA Experiment 108527 PARAMETER Experiment Name: Zm_5mM_NO_P Parameter: Organism Value: Zea mays
  misc_feature: MA Experiment 108527 PARAMETER Experiment Name: Zm_5mM_NO_P Parameter: Plant Line Value: 35A19
  misc_feature: MA Experiment 108527 PARAMETER Experiment Name: Zm_5mM_NO_P Parameter: Timepoint (hr) Value: 6
  misc_feature: MA Experiment 108527 PARAMETER Experiment Name: Zm_5mM_NO_P Parameter: Tissue Value: Aerial
  misc_feature: MA Experiment 108527 PARAMETER Experiment Name: Zm_5mM_NO_P Parameter: Treatment Value: 5mM NO vs. No Treatment
  misc_feature: MA Experiment ID: 108544 Result: Down-regulated in Transcription
gcacgagaccattacctagaacatcctaatcgaaaagaaccatccagaagcagccgcctcctgctcttaaaaaactctcgtctctggtcatccattccacacacccaacatcacgaaaccacgcgcagatccaaacgaacccgagcccttccaaaccctaagctcgcctcccctcccccccaaacaccaccgcgcacctatggcgaagtacggcgagggcgacaagcggtggatcgtggaggagcgcgccgacggcaccaacgtccacaactggcactgggcggagcgcgactgcctggagtggtcccgcgcgcggctctcttccctgctcgcgggcctcaccatcctcgacggcgagggcggcctcagtctccgcaccgtcgcgctcgacaagcttgatggcgaggcctacgtcaacatccgcaagggcaaggtcatcccggggtacgagctctcgctcaccctctcctgggaggccgaggccgcctcggagtccggagctgcgaaggtcaccggcaccgctgaggttccctacctcgccgacgagaacgccgacgaggaccccgacctccgcgtcaccgtgcgcggcgacgagacgcccctcgcgctccgcgccaaggacgccttcctctcccgcgggaaacccatggtgctcgagaagatccgggagttcgtcgctgccatggccaagggtggaccggccaaggacgagctggactccaagaaaactcccacgaaggtcgccggctccgcaccggcgaaggaggcggtactggctcctgcgccggctgtggagaagaaaaaggccaaggggaaggacaaggagggcttcaagaccattgagatgacggagaagttctactgccgctcaaaggacatatatgagatcttgatggatgagaacagatggaaagggtttacgcagagcaatgcgaggatcagcagagaggttggaggggaatttagcctcttcgacgggtccatcactggcgtcaacgaggagctgcaggaagggaagctgattgcacaaaagtggcggtttggaagctggcctgacggcttgtactcctcggtccggttggtgtttgatgagcccgagtctggagttacaatcataaagctcaaacaaactgatgtgccagaggaagacaagtatggaaattcaactgtggtagagaacaccgagagaggctggagagaactcatattccagcggatacgcggagtgttcggttttgggatctaaagaatctaaagaggcgatttggcatgaagttagatttcaaatttttacggggtcagaccatgcacgtcatagcaatccatgttttattcacccatttgttttccatgtccttaaacacagaacactgcatatcgtggggggtttaaaaacatctgttattcgaacgctgcaatgttgcttgctcccg

SEQ ID NO: 19307 - protein, 348 aa, Zea mays subsp. mays
  peptide (1)..(348): Ceres Seq. ID no. 12382333
  misc_feature (209)..(348): Pfam Name: Aha1 domain Pfam Description: Aha1 domain
  misc_feature (1)..(347): Homolog of NCBI NO: 24585720 NR Description: CG1416-PA [Drosophila melanogaster]
  misc_feature (1)..(347): Homolog of NCBI NO: 6912280 NR Description: chromosome 14 open reading frame 3 [Homo sapiens]
  misc_feature (1)..(347): Homolog of NCBI NO: 26345022 NR Description: unnamed protein product [Mus musculus]
  misc_feature (1)..(347): Homolog of NCBI NO: 27370976 NR Description: Similar to chromosome 14 open reading frame 3
  misc_feature (1)..(347): Homolog of NCBI NO: 22122515 NR Description: cDNA sequence BC023857; hypothetical protein
  misc_feature (1)..(347): Homolog of NCBI NO: 40786381 NR Description: Bm44 [Bombyx mori]
  misc_feature (1)..(54): Homolog of NCBI NO: 30682028 NR Description: expressed protein [Arabidopsis thaliana]
  misc_feature (89)..(348): Homolog of NCBI NO: 30682028 NR Description: expressed protein [Arabidopsis thaliana]
  misc_feature (1)..(348): Homolog of NCBI NO: 18399461 NR Description: expressed protein
  misc_feature (1)..(348): Homolog of NCBI NO: 21539453 NR Description: unknown protein [Arabidopsis thaliana]
MAKYGEGDKRWIVEERADGTNVHNWHWAERDCLEWSRARLSSLLAGLTILDGEGGLSLRTVALDKLDGEAYVNIRKGKVIPGYELSLTLSWEAEAASESGAAKVTGTAEVPYLADENADEDPDLRVTVRGDETPLALRAKDAFLSRGKPMVLEKIREFVAAMAKGGPAKDELDSKKTPTKVAGSAPAKEAVLAPAPAVEKKKAKGKDKEGFKTIEMTEKFYCRSKDIYEILMDENRWKGFTQSNARISREVGGEFSLFDGSITGVNEELQEGKLIAQKWRFGSWPDGLYSSVRLVFDEPESGVTIIKLKQTDVPEEDKYGNSTVVENTERGWRELIFQRIRGVFGFGI

SEQ ID NO: 19308 - protein, 199 aa, Zea mays subsp. mays
  peptide (1)..(199): Ceres Seq. ID no. 12382334
  misc_feature (60)..(199): Pfam Name: Aha1 domain Pfam Description: Aha1 domain
  misc_feature (1)..(198): Homolog of NCBI NO: 26345022 NR Description: unnamed protein product [Mus musculus]
  misc_feature (1)..(198): Homolog of NCBI NO: 27370976 NR Description: Similar to chromosome 14 open reading frame 3
  misc_feature (1)..(198): Homolog of NCBI NO: 22122515 NR Description: cDNA sequence BC023857; hypothetical protein
  misc_feature (1)..(198): Homolog of NCBI NO: 40786381 NR Description: Bm44 [Bombyx mori]
  misc_feature (1)..(198): Homolog of NCBI NO: 24585720 NR Description: CG1416-PA [Drosophila melanogaster]
  misc_feature (1)..(198): Homolog of NCBI NO: 6912280 NR Description: chromosome 14 open reading frame 3 [Homo sapiens]
  misc_feature (1)..(198): Homolog of NCBI NO: 33416591 NR Description: Unknown (protein for MGC:66167) [Danio rerio]
  misc_feature (1)..(199): Homolog of NCBI NO: 30682028 NR Description: expressed protein [Arabidopsis thaliana]
  misc_feature (1)..(199): Homolog of NCBI NO: 18399461 NR Description: expressed protein
  misc_feature (1)..(199): Homolog of NCBI NO: 21539453 NR Description: unknown protein [Arabidopsis thaliana]
MVLEKIREFVAAMAKGGPAKDELDSKKTPTKVAGSAPAKEAVLAPAPAVEKKKAKGKDKEGFKTIEMTEKFYCRSKDIYEILMDENRWKGFTQSNARISREVGGEFSLFDGSITGVNEELQEGKLIAQKWRFGSWPDGLYSSVRLVFDEPESGVTIIKLKQTDVPEEDKYGNSTVVENTERGWRELIFQRIRGVFGFGI

SEQ ID NO: 19309 - protein, 187 aa, Zea mays subsp. mays
  peptide (1)..(187): Ceres Seq. ID no. 12382335
  misc_feature (48)..(187): Pfam Name: Aha1 domain Pfam Description: Aha1 domain
  misc_feature (1)..(186): Homolog of NCBI NO: 33416591 NR Description: Unknown (protein for MGC:66167) [Danio rerio]
  misc_feature (1)..(186): Homolog of NCBI NO: 24585720 NR Description: CG1416-PA [Drosophila melanogaster]
  misc_feature (1)..(186): Homolog of NCBI NO: 6912280 NR Description: chromosome 14 open reading frame 3 [Homo sapiens]
  misc_feature (1)..(186): Homolog of NCBI NO: 26345022 NR Description: unnamed protein product [Mus musculus]
  misc_feature (1)..(186): Homolog of NCBI NO: 27370976 NR Description: Similar to chromosome 14 open reading frame 3
  misc_feature (1)..(186): Homolog of NCBI NO: 22122515 NR Description: cDNA sequence BC023857; hypothetical protein
  misc_feature (1)..(186): Homolog of NCBI NO: 40786381 NR Description: Bm44 [Bombyx mori]
  misc_feature (1)..(187): Homolog of NCBI NO: 30682028 NR Description: expressed protein [Arabidopsis thaliana]
  misc_feature (1)..(187): Homolog of NCBI NO: 18399461 NR Description: expressed protein
  misc_feature (1)..(187): Homolog of NCBI NO: 21539453 NR Description: unknown protein [Arabidopsis thaliana]
MAKGGPAKDELDSKKTPTKVAGSAPAKEAVLAPAPAVEKKKAKGKDKEGFKTIEMTEKFYCRSKDIYEILMDENRWKGFTQSNARISREVGGEFSLFDGSITGVNEELQEGKLIAQKWRFGSWPDGLYSSVRLVFDEPESGVTIIKLKQTDVPEEDKYGNSTVVENTERGWRELIFQRIRGVFGFGI

SEQ ID NO: 19310 - DNA, 1211 bp, Zea mays subsp. mays
  misc_feature (1)..(1211): Ceres Seq. ID no. 12390281
  misc_feature: MA Experiment ID: 108528 Result: Down-regulated in Transcription
  misc_feature: MA Experiment 108528 PARAMETER Experiment Name: Zm_Imbibed_Seeds_P Parameter: Age (day) Value: 5 vs. 2
  misc_feature: MA Experiment 108528 PARAMETER Experiment Name: Zm_Imbibed_Seeds_P Parameter: Organism Value: Zea mays
  misc_feature: MA Experiment 108528 PARAMETER Experiment Name: Zm_Imbibed_Seeds_P Parameter: Plant Line Value: 35A19
  misc_feature: MA Experiment 108528 PARAMETER Experiment Name: Zm_Imbibed_Seeds_P Parameter: Tissue Value: Aerial vs. Embryo
gcacgagaccattacctagaacatcctaatcgaaaaacccaaacgaatattatagaagctggctgaaaagctgagtgtttggcagtccgcagtagcttttggtggccagtagcttttggaaatggactccattgtcggttgtcgcctctgaccgtaccacctctgttacctgcaccgccgctccgttaaatcgcggcccgatcgccgatgcctccccgccccgtcccactattctctcgcctgcgcttccgcctcccgagttgcgccgccgtctccatctccacccctccatcctccgcggcgcccctgcactacggccatcgcactcccctcgctagcccttttcctctgtccccaccttgcccgcgcatcctccgtgcggccgtcgcggtttcttcgctggatctgcgcccgatcaccggcgggttcgcgctattcagcatggctgctgcctcctccgccacctccgtccacgacttcaccgtcaaggatgctagcgggaaagatgtggaccttagcacctataaggggaaggttctgctcatagtcaatgttgcatctcagtgtggcttaaccaattccaactacacagagctgagccagttgtatgagaagtacaaggaccagggttttgagatccttgcattcccatgcaaccagttcggtgggcaggagcctggcactaatgaggagattgtccagtttgcttgtactcgcttcaaggctgagtatccaattttcgacaaggttgatgtcaatggtgacaatactgcacccatttacaagttcctgaagtccagcaaaggtagtctctttggcgataacataaaatggaacttctccaaattcttggttgacaaagaggggcatgttgtggagcggtatgcaccaacaacttccccactgagcatcgagaaggacatcaagaaactactagggagttattaaaccttgtaattggattcagtagccctaccaaactgctgctttgcatcgagcacctgatgcctcagtagcgttttaataaagttgtttttataaccgagatgttttgtatttcttctgtattccctgctttgtggtaaatgtcatgtaataaaaatgatgcaatccacgatttatcttgaaaggttatgtatccaggtcggttgttatgagatatttgagaaatgagttttggcatgggggcatatcttgcgtacctgcctacc

SEQ ID NO: 19311 - protein, 246 aa, Zea mays subsp. mays
  peptide (1)..(246): Ceres Seq. ID no. 12390282
  misc_feature (87)..(196): Pfam Name: Glutathione peroxidase Pfam Description: Glutathione peroxidase
  misc_feature (81)..(243): Homolog of NCBI NO: 544437 NR Description: Probable phospholipid hydroperoxide glutathione
  misc_feature (79)..(244): Homolog of NCBI NO: 20138157 NR Description: Probable phospholipid hydroperoxide glutathione
  misc_feature (78)..(244): Homolog of NCBI NO: 30681827 NR Description: glutathione peroxidase, putative [Arabidopsis
  misc_feature (79)..(245): Homolog of NCBI NO: 38345591 NR Description: OSJNBb0012E24.9 [Oryza sativa (japonica
  misc_feature (79)..(245): Homolog of NCBI NO: 21360380 NR Description: glutathione peroxidase 1 [Oryza sativa]
  misc_feature (79)..(243): Homolog of NCBI NO: 6179604 NR Description: glutathione peroxidase-like protein GPX54Hv
  misc_feature (79)..(245): Homolog of NCBI NO: 34334012 NR Description: cytosolic glutathione peroxidase [Triticum
  misc_feature (80)..(245): Homolog of NCBI NO: 27544804 NR Description: phospholipid hydroperoxide glutathione
  misc_feature (79)..(246): Homolog of NCBI NO: 22268405 NR Description: putative glutathione peroxidase [Zea mays]
  misc_feature (1)..(245): Homolog of NCBI NO: 6179600 NR Description: GPX12Hv, glutathione peroxidase-like protein
MPPRPVPLFSRLRFRLPSCAAVSISTPPSSAAPLHYGHRTPLASPFPLSPPCPRILRAAVAVSSLDLRPITGGFALFSMAAASSATSVHDFTVKDASGKDVDLSTYKGKVLLIVNVASQCGLTNSNYTELSQLYEKYKDQGFEILAFPCNQFGGQEPGTNEEIVQFACTRFKAEYPIFDKVDVNGDNTAPIYKFLKSSKGSLFGDNIKWNFSKFLVDKEGHVVERYAPTTSPLSIEKDIKKLLGSY

SEQ ID NO: 19312 - protein, 168 aa, Zea mays subsp. mays
  peptide (1)..(168): Ceres Seq. ID no. 12390283
  misc_feature (9)..(118): Pfam Name: Glutathione peroxidase Pfam Description: Glutathione peroxidase
  misc_feature (3)..(165): Homolog of NCBI NO: 544437 NR Description: Probable phospholipid hydroperoxide glutathione
  misc_feature (1)..(166): Homolog of NCBI NO: 20138157 NR Description: Probable phospholipid hydroperoxide glutathione
  misc_feature (1)..(166): Homolog of NCBI NO: 30681827 NR Description: glutathione peroxidase, putative [Arabidopsis
  misc_feature (1)..(167): Homolog of NCBI NO: 38345591 NR Description: OSJNBb0012E24.9 [Oryza sativa (japonica
  misc_feature (1)..(167): Homolog of NCBI NO: 21360380 NR Description: glutathione peroxidase 1 [Oryza sativa]
  misc_feature (1)..(165): Homolog of NCBI NO: 6179604 NR Description: glutathione peroxidase-like protein GPX54Hv
  misc_feature (1)..(167): Homolog of NCBI NO: 34334012 NR Description: cytosolic glutathione peroxidase [Triticum
  misc_feature (2)..(167): Homolog of NCBI NO: 27544804 NR Description: phospholipid hydroperoxide glutathione
  misc_feature (1)..(168): Homolog of NCBI NO: 22268405 NR Description: putative glutathione peroxidase [Zea mays]
  misc_feature (1)..(167): Homolog of NCBI NO: 6179600 NR Description: GPX12Hv, glutathione peroxidase-like protein
MAAASSATSVHDFTVKDASGKDVDLSTYKGKVLLIVNVASQCGLTNSNYTELSQLYEKYKDQGFEILAFPCNQFGGQEPGTNEEIVQFACTRFKAEYPIFDKVDVNGDNTAPIYKFLKSSKGSLFGDNIKWNFSKFLVDKEGHVVERYAPTTSPLSIEKDIKKLLGSY

SEQ ID NO: 19313 - DNA, 993 bp, Zea mays subsp. mays
  misc_feature (1)..(993): Ceres Seq. ID no. 12362418
  misc_feature: MA Experiment ID: 108504 Result: Up-regulated in Transcription
  misc_feature: MA Experiment 108504 PARAMETER Experiment Name: Zm_Drought_P Parameter: Age (day) Value: 8
  misc_feature: MA Experiment 108504 PARAMETER Experiment Name: Zm_Drought_P Parameter: Organism Value: Zea mays
  misc_feature: MA Experiment 108504 PARAMETER Experiment Name: Zm_Drought_P Parameter: Plant Line Value: 35A19
  misc_feature: MA Experiment 108504 PARAMETER Experiment Name: Zm_Drought_P Parameter: Timepoint (hr) Value: 12
  misc_feature: MA Experiment 108504 PARAMETER Experiment Name: Zm_Drought_P Parameter: Tissue Value: Aerial
  misc_feature: MA Experiment 108504 PARAMETER Experiment Name: Zm_Drought_P Parameter: Treatment Value: Drought vs. No Drought
  misc_feature: MA Experiment ID: 108556 Result: Up-regulated in Transcription
  misc_feature: MA Experiment 108556 PARAMETER Experiment Name: Zm_Drought_P Parameter: Age (day) Value: 9
  misc_feature: MA Experiment 108556 PARAMETER Experiment Name: Zm_Drought_P Parameter: Organism Value: Zea mays
  misc_feature: MA Experiment 108556 PARAMETER Experiment Name: Zm_Drought_P Parameter: Plant Line Value: 35A19
  misc_feature: MA Experiment 108556 PARAMETER Experiment Name: Zm_Drought_P Parameter: Timepoint (hr) Value: 24
  misc_feature: MA Experiment 108556 PARAMETER Experiment Name: Zm_Drought_P Parameter: Tissue Value: Aerial
  misc_feature: MA Experiment 108556 PARAMETER Experiment Name: Zm_Drought_P Parameter: Treatment Value: Drought vs. No Drought
  misc_feature: MA Experiment ID: 108597 Result: Up-regulated in Transcription
  misc_feature: MA Experiment 108597 PARAMETER Experiment Name: Zm_100uM_ABA_P Parameter: Age (day) Value: 9
  misc_feature: MA Experiment 108597 PARAMETER Experiment Name: Zm_100uM_ABA_P Parameter: Organism Value: Zea mays
  misc_feature: MA Experiment 108597 PARAMETER Experiment Name: Zm_100uM_ABA_P Parameter: Plant Line Value: 35A19
  misc_feature: MA Experiment 108597 PARAMETER Experiment Name: Zm_100uM_ABA_P Parameter: Timepoint (hr) Value: 24
  misc_feature: MA Experiment 108597 PARAMETER Experiment Name: Zm_100uM_ABA_P Parameter: Tissue Value: Aerial
  misc_feature: MA Experiment 108597 PARAMETER Experiment Name: Zm_100uM_ABA_P Parameter: Treatment Value: 100uM ABA vs. No Treatment
  misc_feature: MA Experiment ID: 108689 Result: Up-regulated in Transcription
  misc_feature: MA Experiment 108689 PARAMETER Experiment Name: Zm_Drought_Roots_P Parameter: Age (day) Value: 9
  misc_feature: MA Experiment 108689 PARAMETER Experiment Name: Zm_Drought_Roots_P Parameter: Organism Value: Zea mays
  misc_feature: MA Experiment 108689 PARAMETER Experiment Name: Zm_Drought_Roots_P Parameter: Plant Line Value: 35A19
  misc_feature: MA Experiment 108689 PARAMETER Experiment Name: Zm_Drought_Roots_P Parameter: Timepoint (hr) Value: 24
  misc_feature: MA Experiment 108689 PARAMETER Experiment Name: Zm_Drought_Roots_P Parameter: Tissue Value: Roots
  misc_feature: MA Experiment 108689 PARAMETER Experiment Name: Zm_Drought_Roots_P Parameter: Treatment Value: Drought vs. No Drought
  misc_feature: MA Experiment ID: 20000478 Result: Up-regulated in Transcription
  misc_feature: MA Experiment 20000478 PARAMETER Experiment Name: Zm_5mM_SA_P Parameter: Age (day) Value: 11
  misc_feature: MA Experiment 20000478 PARAMETER Experiment Name: Zm_5mM_SA_P Parameter: Organism Value: Zea mays
  misc_feature: MA Experiment 20000478 PARAMETER Experiment Name: Zm_5mM_SA_P Parameter: Plant Line Value: 35A19
  misc_feature: MA Experiment 20000478 PARAMETER Experiment Name: Zm_5mM_SA_P Parameter: Timepoint (hr) Value: 72
  misc_feature: MA Experiment 20000478 PARAMETER Experiment Name: Zm_5mM_SA_P Parameter: Tissue Value: Aerial
  misc_feature: MA Experiment 20000478 PARAMETER Experiment Name: Zm_5mM_SA_P Parameter: Treatment Value: 5mM SA vs. No Treatment
  misc_feature: MA Experiment ID: 20000479 Result: Up-regulated in Transcription
  misc_feature: MA Experiment 20000479 PARAMETER Experiment Name: Zm_Drought_P Parameter: Age (day) Value: 10
  misc_feature: MA Experiment 20000479 PARAMETER Experiment Name: Zm_Drought_P Parameter: Organism Value: Zea mays
  misc_feature: MA Experiment 20000479 PARAMETER Experiment Name: Zm_Drought_P Parameter: Plant Line Value: 35A19
  misc_feature: MA Experiment 20000479 PARAMETER Experiment Name: Zm_Drought_P Parameter: Timepoint (hr) Value: 48
  misc_feature: MA Experiment 20000479 PARAMETER Experiment Name: Zm_Drought_P Parameter: Tissue Value: Aerial
  misc_feature: MA Experiment 20000479 PARAMETER Experiment Name: Zm_Drought_P Parameter: Treatment Value: Drought vs. No Drought
  misc_feature: MA Experiment ID: 20000480 Result: Up-regulated in Transcription
  misc_feature: MA Experiment 20000480 PARAMETER Experiment Name: Zm_Drought_P Parameter: Age (day) Value: 11
  misc_feature: MA Experiment 20000480 PARAMETER Experiment Name: Zm_Drought_P Parameter: Organism Value: Zea mays
  misc_feature: MA Experiment 20000480 PARAMETER Experiment Name: Zm_Drought_P Parameter: Plant Line Value: 35A19
  misc_feature: MA Experiment 20000480 PARAMETER Experiment Name: Zm_Drought_P Parameter: Timepoint (hr) Value: 72
  misc_feature: MA Experiment 20000480 PARAMETER Experiment Name: Zm_Drought_P Parameter: Tissue Value: Aerial
  misc_feature: MA Experiment 20000480 PARAMETER Experiment Name: Zm_Drought_P Parameter: Treatment Value: Drought vs. No Drought
  misc_feature: MA Experiment ID: 20000534 Result: Up-regulated in Transcription
  misc_feature: MA Experiment 20000534 PARAMETER Experiment Name: Zm_Hybrid_Pollen_P Parameter: Age (day) Value: 8
  misc_feature: MA Experiment 20000534 PARAMETER Experiment Name: Zm_Hybrid_Pollen_P Parameter: Organism Value: Zea mays
  misc_feature: MA Experiment 20000534 PARAMETER Experiment Name: Zm_Hybrid_Pollen_P Parameter: Plant Line Value: 35A19
  misc_feature: MA Experiment 20000534 PARAMETER Experiment Name: Zm_Hybrid_Pollen_P Parameter: Tissue Value: Pollen vs. Aerial
attgatttagaaccgctcgcgatacggctgaagaatttggggacgcttacgccgtgcgcgcacgcgtccaagtcgccgtcatgacgccattgcctgccgtgccgtggcccgagatgtttcctacggccgggatcacaggtgtcgcgcgcaggccggaaaagggcaggcccccaaggactctgcgccggcaccgcgccaacaaaccccgtggctctggcgtgcggacggccggccggacgtgccgtcgagtcgaagcggcagcgctcgtctcgacccgtcgtcgaccccccgtgccgcagccagatcggcctgatgagttggaaagggtagaatcagcaggtggcagggtcattaactggatggggtaccgtgtcctgggtgtgcttgcgacatcaaggtcaattggtgactattacatgaagccattcatatcagcggaaccagaggtgactgtcacagagcgcacgcacagggacgagttcatcatcctggcgagcgacgggctgtgggacgtcatgtccaacgaggtggcctgcagggtcgcgaagagctgtctgtgcgggcgcgcggcttccaagtgccctgacaccatccgcgggagctcggccagtgatgccgccgcggtgctggtggagttcgccatgtcgcggggcagcactgacaacatcagcgtcgtggtggtggagctgaaacgtctgaagaggtggaagggtggcagtagacagaacggtcggacgtagcctggccctgtaggagtctccggctcgtcgcgaaatatatgcatggcgacggagctctagggaagcagccgagcatatgacggaatggtgtaaaaagaagaagaagaagaagaagagagggttctgactcttgagagctatacctatgctgtgaccaggtgagtgtaggagctgctcgtagctttgccgttgtattgcgttggttacttggttctttagttcaatcaatactaacaaaatggcgttccgggcc

SEQ ID NO: 19314 - protein, 219 aa, Zea mays subsp. mays
  peptide (1)..(219): Ceres Seq. ID no. 12362419
  misc_feature (73)..(195): Pfam Name: Protein phosphatase 2C Pfam Description: Protein phosphatase 2C
  misc_feature (54)..(162): Homolog of NCBI NO: 16226419 NR Description: AT5g59220/mnc17_110 [Arabidopsis thaliana]
  misc_feature (54)..(162): Homolog of NCBI NO: 15237839 NR Description: protein phosphatase 2C (PP2C)
  misc_feature (171)..(208): Homolog of NCBI NO: 21537020 NR Description: protein phosphatase 2C, putative [Arabidopsis
  misc_feature (171)..(208): Homolog of NCBI NO: 15222398 NR Description: protein phosphatase 2C (PP2C), putative
  misc_feature (54)..(159): Homolog of NCBI NO: 21537020 NR Description: protein phosphatase 2C, putative [Arabidopsis
  misc_feature (54)..(159): Homolog of NCBI NO: 15222398 NR Description: protein phosphatase 2C (PP2C), putative
  misc_feature (73)..(213): Homolog of NCBI NO: 15229745 NR Description: protein phosphatase 2C (PP2C)
  misc_feature (175)..(205): Homolog of NCBI NO: 34908256 NR Description: putative protein phosphatase 2C
  misc_feature (73)..(158): Homolog of NCBI NO: 34908256 NR Description: putative protein phosphatase 2C
  misc_feature (73)..(204): Homolog of NCBI NO: 4336434 NR Description: nodule-enhanced protein phosphatase type 2C
MTPLPAVPWPEMFPTAGITGVARRPEKGRPPRTLRRHRANKPRGSGVRTAGRTCRRVEAAALVSTRRRPPVPQPDRPDELERVESAGGRVINWMGYRVLGVLATSRSIGDYYMKPFISAEPEVTVTERTHRDEFIILASDGLWDVMSNEVACRVAKSCLCGRAASKCPDTIRGSSASDAAAVLVEFAMSRGSTDNISVVVVELKRLKRWKGGSRQNGRT

SEQ ID NO: 19315 - protein, 208 aa, Zea mays subsp. mays
  peptide (1)..(208): Ceres Seq. ID no. 12362420
  misc_feature (62)..(184): Pfam Name: Protein phosphatase 2C Pfam Description: Protein phosphatase 2C
  misc_feature (43)..(151): Homolog of NCBI NO: 16226419 NR Description: AT5g59220/mnc17_110 [Arabidopsis thaliana]
  misc_feature (43)..(151): Homolog of NCBI NO: 15237839 NR Description: protein phosphatase 2C (PP2C)
  misc_feature (160)..(197): Homolog of NCBI NO: 21537020 NR Description: protein phosphatase 2C, putative [Arabidopsis
  misc_feature (160)..(197): Homolog of NCBI NO: 15222398 NR Description: protein phosphatase 2C (PP2C), putative
  misc_feature (43)..(148): Homolog of NCBI NO: 21537020 NR Description: protein phosphatase 2C, putative [Arabidopsis
  misc_feature (43)..(148): Homolog of NCBI NO: 15222398 NR Description: protein phosphatase 2C (PP2C), putative
  misc_feature (62)..(202): Homolog of NCBI NO: 15229745 NR Description: protein phosphatase 2C (PP2C)
  misc_feature (164)..(194): Homolog of NCBI NO: 34908256 NR Description: putative protein phosphatase 2C
  misc_feature (62)..(147): Homolog of NCBI NO: 34908256 NR Description: putative protein phosphatase 2C
  misc_feature (62)..(193): Homolog of NCBI NO: 4336434 NR Description: nodule-enhanced protein phosphatase type 2C
MFPTAGITGVARRPEKGRPPRTLRRHRANKPRGSGVRTAGRTCRRVEAAALVSTRRRPPVPQPDRPDELERVESAGGRVINWMGYRVLGVLATSRSIGDYYMKPFISAEPEVTVTERTHRDEFIILASDGLWDVMSNEVACRVAKSCLCGRAASKCPDTIRGSSASDAAAVLVEFAMSRGSTDNISVVVVELKRLKRWKGGSRQNGRT

SEQ ID NO: 19316 - protein, 126 aa, Zea mays subsp. mays
  peptide (1)..(126): Ceres Seq. ID no. 12362421
  misc_feature (1)..(102): Pfam Name: Protein phosphatase 2C Pfam Description: Protein phosphatase 2C
  misc_feature (1)..(69): Homolog of NCBI NO: 16226419 NR Description: AT5g59220/mnc17_110 [Arabidopsis thaliana]
  misc_feature (1)..(69): Homolog of NCBI NO: 15237839 NR Description: protein phosphatase 2C (PP2C)
  misc_feature (78)..(115): Homolog of NCBI NO: 21537020 NR Description: protein phosphatase 2C, putative [Arabidopsis
  misc_feature (78)..(115): Homolog of NCBI NO: 15222398 NR Description: protein phosphatase 2C (PP2C), putative
  misc_feature (1)..(66): Homolog of NCBI NO: 21537020 NR Description: protein phosphatase 2C, putative [Arabidopsis
  misc_feature (1)..(66): Homolog of NCBI NO: 15222398 NR Description: protein phosphatase 2C (PP2C), putative
  misc_feature (1)..(120): Homolog of NCBI NO: 15229745 NR Description: protein phosphatase 2C (PP2C)
  misc_feature (82)..(112): Homolog of NCBI NO: 34908256 NR Description: putative protein phosphatase 2C
  misc_feature (1)..(65): Homolog of NCBI NO: 34908256 NR Description: putative protein phosphatase 2C
  misc_feature (1)..(111): Homolog of NCBI NO: 4336434 NR Description: nodule-enhanced protein phosphatase type 2C
MGYRVLGVLATSRSIGDYYMKPFISAEPEVTVTERTHRDEFIILASDGLWDVMSNEVACRVAKSCLCGRAASKCPDTIRGSSASDAAAVLVEFAMSRGSTDNISVVVVELKRLKRWKGGSRQNGRT

SEQ ID NO: 19317 - DNA, 477 bp, Zea mays subsp. mays
  misc_feature (1)..(477): Ceres Seq. ID no. 1853217
  misc_feature: MA Experiment ID: 20000534 Result: Up-regulated in Transcription
  misc_feature: MA Experiment 20000534 PARAMETER Experiment Name: Zm_Hybrid_Pollen_P Parameter: Age (day) Value: 8
  misc_feature: MA Experiment 20000534 PARAMETER Experiment Name: Zm_Hybrid_Pollen_P Parameter: Organism Value: Zea mays
  misc_feature: MA Experiment 20000534 PARAMETER Experiment Name: Zm_Hybrid_Pollen_P Parameter: Plant Line Value: 35A19
  misc_feature: MA Experiment 20000534 PARAMETER Experiment Name: Zm_Hybrid_Pollen_P Parameter: Tissue Value: Pollen vs. Aerial
tcaccgtcccacaccagtgtcggcgagtccctcctgtgcctcgtcctccccctttcccctccgagtccagcccggcgccacccactcagccgcggatccgaggcgcagatccgatccggcgatggcgtccacggcggcgaggcggctgcgggagctgcaggcgcagacggggaacaagacctgcgtggactgcgcgcagcggaacccgcagtgggcgagcgtctcctatggggtgttcatgtgcctcgagtgctcgggcaagcaccggggcctcggcgtgcacatcagcttcgtgcgctcggtcaccatggactcctggaccgaggcgcagctccgcaagatggaggccggtggcaacgaccgactcaacgccttcctcacagctcgcggcgttcctaaggagacgccccacgtcgccaagtacaactccaacgccgcagccgcctaccgcgaccgcatcgccgcgctcgctgaggg

SEQ ID NO: 19318 - protein, 132 aa, Zea mays subsp. mays
  peptide (1)..(132): Ceres Seq. ID no. 1853218
SPSHTSVGESLLCLVLPLSPPSPARRHPLSRGSEAQIRSGDGVHGGEAAAGAAGADGEQDLRGLRAAEPAVGERLLWGVHVPRVLGQAPGPRRAHQLRALGHHGLLDRGAAPQDGGRWQRPTQRLPHSSRRS

SEQ ID NO: 19319 - protein, 158 aa, Zea mays subsp. mays
  peptide (1)..(158): Ceres Seq. ID no. 1853219
  misc_feature (46)..(157): Pfam Name: Putative GTPase activating protein for Arf Pfam Description: Putative GTPase activating protein for Arf
  misc_feature (41)..(157): Homolog of NCBI NO: 8922652 NR Description: ADP-ribosylation factor GTPase activating protein
  misc_feature (41)..(157): Homolog of NCBI NO: 31542139 NR Description: ADP-ribosylation factor GTPase activating protein
  misc_feature (41)..(157): Homolog of NCBI NO: 26326517 NR Description: unnamed protein product [Mus musculus]
  misc_feature (41)..(157): Homolog of NCBI NO: 21489979 NR Description: ADP-ribosylation factor 1 GTPase activating
  misc_feature (41)..(157): Homolog of NCBI NO: 24663283 NR Description: GTPase-activating protein 69C CG4237-PA
  misc_feature (41)..(157): Homolog of NCBI NO: 2286211 NR Description: putative ARF1 GTPase activating protein
  misc_feature (41)..(157): Homolog of NCBI NO: 31217790 NR Description: ENSANGP00000004294 [Anopheles gambiae]
  misc_feature (45)..(157): Homolog of NCBI NO: 15231865 NR Description: putative protein; protein id: At3g53710.1
  misc_feature (45)..(157): Homolog of NCBI NO: 10441356 NR Description: ARF GAP-like zinc finger-containing protein ZIGA2
  misc_feature (45)..(157): Homolog of NCBI NO: 15224315 NR Description: putative ADP ribosylation factor 1 GTPase
HRPTPVSASPSCASSSPFPLRVQPGATHSAADPRRRSDPAMASTAARRLRELQAQTGNKTCVDCAQRNPQWASVSYGVFMCLECSGKHRGLGVHISFVRSVTMDSWTEAQLRKMEAGGNDRLNAFLTARGVPKETPHVAKYNSNAAAAYRDRIAALAE

SEQ ID NO: 19320 - protein, 158 aa, Zea mays subsp. mays
  peptide (1)..(158): Ceres Seq. ID no. 1853220
  misc_feature (44)..(157): Pfam Name: Cupin Pfam Description: Cupin
TVPHQCRRVPPVPRPPPFPSESSPAPPTQPRIRGADPIRRWRPRRRGGCGSCRRRRGTRPAWTARSGTRSGRASPMGCSCASSARASTGASACTSASCARSPWTPGPRRSSARWRPVATTDSTPSSQLAAFLRRRPTSPSTTPTPQPPTATASPRSLR

SEQ ID NO: 19321 - protein, 118 aa, Zea mays subsp. mays
  peptide (1)..(118): Ceres Seq. ID no. 2059170
  misc_feature (6)..(117): Pfam Name: Putative GTPase activating protein for Arf Pfam Description: Putative GTPase activating protein for Arf
  misc_feature (1)..(117): Homolog of NCBI NO: 21489979 NR Description: ADP-ribosylation factor 1 GTPase activating
  misc_feature (1)..(117): Homolog of NCBI NO: 24663283 NR Description: GTPase-activating protein 69C CG4237-PA
  misc_feature (1)..(117): Homolog of NCBI NO: 2286211 NR Description: putative ARF1 GTPase activating protein
  misc_feature (1)..(117): Homolog of NCBI NO: 31217790 NR Description: ENSANGP00000004294 [Anopheles gambiae]
  misc_feature (1)..(117): Homolog of NCBI NO: 31542139 NR Description: ADP-ribosylation factor GTPase activating protein
  misc_feature (1)..(117): Homolog of NCBI NO: 26326517 NR Description: unnamed protein product [Mus musculus]
  misc_feature (1)..(117): Homolog of NCBI NO: 8922652 NR Description: ADP-ribosylation factor GTPase activating protein
  misc_feature (5)..(117): Homolog of NCBI NO: 15231865 NR Description: putative protein; protein id: At3g53710.1
  misc_feature (5)..(117): Homolog of NCBI NO: 10441356 NR Description: ARF GAP-like zinc finger-containing protein ZIGA2
  misc_feature (5)..(117): Homolog of NCBI NO: 15224315 NR Description: putative ADP ribosylation factor 1 GTPase
MASTAARRLRELQAQTGNKTCVDCAQRNPQWASVSYGVFMCLECSGKHRGLGVHISFVRSVTMDSWTEAQLRKMEAGGNDRLNAFLTARGVPKETPHVAKYNSNAAAAYRDRIAALAE

SEQ ID NO: 19322 - DNA, 1355 bp, Zea mays subsp. mays
  misc_feature (1)..(1355): Ceres Seq. ID no. 15180828
  misc_feature: MA Experiment ID: 108543 Result: Up-regulated in Transcription
gatagttacgcgaccaactggttcacaacattgcgcaaaacaaagcagagcatagcatcacagttcacagcagcgcgcggaggcaaggcgcacaacagcgtgcggtggcgcggcgtgcagagcagccgcgcgagcgaagctagtagcgccgcacggaatcgcagagaaggaagtggggagggttaccggcgtcgacgagcgagcaggctctaggtgcgatttactcgtgcagaagctccgacaactatttctgaattacctggactggtttgtgacgatatctctggagggcaagaaaacattccgattcctgccactaacttggttatgatccacctgttcctccatctggtttcacatacttgaagtctctaaaaattccaaaggacatcaagatcccatctagtattattggctgtgattgtgaaggagattgtgctagcaacaaaaattgttcatgtgctcagcgcaatggttctgatctgccttatgtatcatataagaacattggcaggttggtggagcccaaagcagttgtatttgaatgcggggctaactgcagctgcaaccatgattgtgtaaacagaacatctcaacagggttgcagtatcacttagaggtatttaagacagcttcaaaaggttggggagtcaggacttgggacactatcctccctggggctcccatctgtgagtacacgggggtgttgaggaggactgaagatctggatggttcacagaacaaccattgttttgacattgattgtcttcaaaccatgaaaggtttggatggaagggagaaaagagctggatctgaaatgcacctgcctaatctttatccagagaatgactcagatgcaccacctgcacctgagtactgcatagacggcagttccattggcaattttgcaagatttataaatcatagttgccaacctaaccttttcgtccagtgcgtcatgagctcacacaacgatgttaaactagcaaaagtgatgctttttgctgctgacacaatacttcctcttcaggagctatcctatgactacggttatcgcttggacagtgttgttgggcctgatggtaaaattgtgaagctgccatgccactgtggtgctccagattgccggaagcgcctctactagacctgcagtgtgtttccattttgattttgcaggaaacaacctatattgtaggaaagcattcatgttatttatgtagttggcatgctctgatatatagcgaaagaggagcaacttaatctccttttagagcattcttattttgtgataattggaggacatgctggtcatggtagcatattttgcaggaaatcaattaactgatatgtctggg

SEQ ID NO: 19323 - protein, 122 aa, Zea mays subsp. mays; identical to SEQ ID NO: 14686
  peptide (1)..(122): Ceres Seq. ID no. 15180829
  misc_feature (1)..(99): Pfam Name: SET domain Pfam Description: SET domain
  misc_feature (1)..(118): Homolog of NCBI NO: 13517747 NR Description: SUVH3 [Arabidopsis thaliana]
  misc_feature (1)..(118): Homolog of NCBI NO: 18410265 NR Description: SET-domain transcriptional regulator family
  misc_feature (1)..(122): Homolog of NCBI NO: 30681803 NR Description: SET-domain transcriptional regulator family
  misc_feature (1)..(122): Homolog of NCBI NO: 17529178 NR Description: putative mammalian MHC III region protein G9a
  misc_feature (1)..(122): Homolog of NCBI NO: 25412134 NR Description: similar to mammalian MHC III region protein G9a
  misc_feature (1)..(122): Homolog of NCBI NO: 13517749 NR Description: SUVH4 [Arabidopsis thaliana]
  misc_feature (1)..(122): Homolog of NCBI NO: 27502110 NR Description: SET domain histone methyltransferase SUVH4
  misc_feature (1)..(122): Homolog of NCBI NO: 15240758 NR Description: SET-domain transcriptional regulator family
  misc_feature (1)..(122): Homolog of NCBI NO: 34907056 NR Description: putative SUVH4 [Oryza sativa (japonica
  misc_feature (1)..(122): Homolog of NCBI NO: 22121716 NR Description: SET domain-containing protein SET118 [Zea mays]

SEQ ID NO: 19324 - protein, 108 aa, Zea mays subsp. mays
  peptide (1)..(108): Ceres Seq. ID no. 15180830
  misc_feature (1)..(85): Pfam Name: SET domain Pfam Description: SET domain
  misc_feature (1)..(104): Homolog of NCBI NO: 13517747 NR Description: SUVH3 [Arabidopsis thaliana]
  misc_feature (1)..(104): Homolog of NCBI NO: 18410265 NR Description: SET-domain transcriptional regulator family
  misc_feature (1)..(108): Homolog of NCBI NO: 30681803 NR Description: SET-domain transcriptional regulator family
  misc_feature (1)..(108): Homolog of NCBI NO: 17529178 NR Description: putative mammalian MHC III region protein G9a
  misc_feature (1)..(108): Homolog of NCBI NO: 25412134 NR Description: similar to mammalian MHC III region protein G9a
  misc_feature (1)..(108): Homolog of NCBI NO: 13517749 NR Description: SUVH4 [Arabidopsis thaliana]
  misc_feature (1)..(108): Homolog of NCBI NO: 27502110 NR Description: SET domain histone methyltransferase SUVH4
  misc_feature (1)..(108): Homolog of NCBI NO: 15240758 NR Description: SET-domain transcriptional regulator family
  misc_feature (1)..(108): Homolog of NCBI NO: 34907056 NR Description: putative SUVH4 [Oryza sativa (japonica
  misc_feature (1)..(108): Homolog of NCBI NO: 22121716 NR Description: SET domain-containing protein SET118 [Zea mays]
MHLPNLYPENDSDAPPAPEYCIDGSSIGNFARFINHSCQPNLFVQCVMSSHNDVKLAKVMLFAADTILPLQELSYDYGYRLDSVVGPDGKIVKLPCHCGAPDCRKRLY

SEQ ID NO: 19325 - protein, 70 aa, Zea mays subsp. mays
  peptide (1)..(70): Ceres Seq. ID no. 15180831
DSYATNWFTTLRKTKQSIASQFTAARGGKAHNSVRWRGVQSSRASEASSAARNRREGSGEGYRRRRASRL

SEQ ID NO: 19326 - DNA, 1824 bp, Zea mays subsp. mays
  misc_feature (1)..(1824): Ceres Seq. ID no. 12419130
  misc_feature: MA Experiment ID: 108528 Result: Up-regulated in Transcription
  misc_feature: MA Experiment 108528 PARAMETER Experiment Name: Zm_Imbibed_Seeds_P Parameter: Age (day) Value: 5 vs. 2
  misc_feature: MA Experiment 108528 PARAMETER Experiment Name: Zm_Imbibed_Seeds_P Parameter: Organism Value: Zea mays
  misc_feature: MA Experiment 108528 PARAMETER Experiment Name: Zm_Imbibed_Seeds_P Parameter: Plant Line Value: 35A19
  misc_feature: MA Experiment 108528 PARAMETER Experiment Name: Zm_Imbibed_Seeds_P Parameter: Tissue Value: Aerial vs. Embryo
  misc_feature: MA Experiment ID: 108530 Result: Up-regulated in Transcription
  misc_feature: MA Experiment 108530 PARAMETER Experiment Name: Zm_Imbibed_Seeds_P Parameter: Age (day) Value: 6 vs. 2
  misc_feature: MA Experiment 108530 PARAMETER Experiment Name: Zm_Imbibed_Seeds_P Parameter: Organism Value: Zea mays
  misc_feature: MA Experiment 108530 PARAMETER Experiment Name: Zm_Imbibed_Seeds_P Parameter: Plant Line Value: 35A19
  misc_feature: MA Experiment 108530 PARAMETER Experiment Name: Zm_Imbibed_Seeds_P Parameter: Tissue Value: Aerial vs. Embryo
  misc_feature: MA Experiment ID: 108547 Result: Up-regulated in Transcription
  misc_feature: MA Experiment 108547 PARAMETER Experiment Name: Zm_Imbibed_Seeds_P Parameter: Age (day) Value: 4 vs. 2
  misc_feature: MA Experiment 108547 PARAMETER Experiment Name: Zm_Imbibed_Seeds_P Parameter: Organism Value: Zea mays
  misc_feature: MA Experiment 108547 PARAMETER Experiment Name: Zm_Imbibed_Seeds_P Parameter: Plant Line Value: 35A19
  misc_feature: MA Experiment 108547 PARAMETER Experiment Name: Zm_Imbibed_Seeds_P Parameter: Tissue Value: Aerial vs. Embryo
  misc_feature: MA Experiment ID: 20000478 Result: Up-regulated in Transcription
  misc_feature: MA Experiment 20000478 PARAMETER Experiment Name: Zm_5mM_SA_P Parameter: Age (day) Value: 11
  misc_feature: MA Experiment 20000478 PARAMETER Experiment Name: Zm_5mM_SA_P Parameter: Organism Value: Zea mays
  misc_feature: MA Experiment 20000478 PARAMETER Experiment Name: Zm_5mM_SA_P Parameter: Plant Line Value: 35A19
  misc_feature: MA Experiment 20000478 PARAMETER Experiment Name: Zm_5mM_SA_P Parameter: Timepoint (hr) Value: 72
  misc_feature: MA Experiment 20000478 PARAMETER Experiment Name: Zm_5mM_SA_P Parameter: Tissue Value: Aerial
  misc_feature: MA Experiment 20000478 PARAMETER Experiment Name: Zm_5mM_SA_P Parameter: Treatment Value: 5mM SA vs. No Treatment
  misc_feature: MA Experiment ID: 20000479 Result: Up-regulated in Transcription
  misc_feature: MA Experiment 20000479 PARAMETER Experiment Name: Zm_Drought_P Parameter: Age (day) Value: 10
  misc_feature: MA Experiment 20000479 PARAMETER Experiment Name: Zm_Drought_P Parameter: Organism Value: Zea mays
  misc_feature: MA Experiment 20000479 PARAMETER Experiment Name: Zm_Drought_P Parameter: Plant Line Value: 35A19
  misc_feature: MA Experiment 20000479 PARAMETER Experiment Name: Zm_Drought_P Parameter: Timepoint (hr) Value: 48
  misc_feature: MA Experiment 20000479 PARAMETER Experiment Name: Zm_Drought_P Parameter: Tissue Value: Aerial
  misc_feature: MA Experiment 20000479 PARAMETER Experiment Name: Zm_Drought_P Parameter: Treatment Value: Drought vs. No Drought
  misc_feature: MA Experiment ID: 20000534 Result: Down-regulated in Transcription
  misc_feature: MA Experiment 20000534 PARAMETER Experiment Name: Zm_Hybrid_Pollen_P Parameter: Age (day) Value: 8
  misc_feature: MA Experiment 20000534 PARAMETER Experiment Name: Zm_Hybrid_Pollen_P Parameter: Organism Value: Zea mays
  misc_feature: MA Experiment 20000534 PARAMETER Experiment Name: Zm_Hybrid_Pollen_P Parameter: Plant Line Value: 35A19
  misc_feature: MA Experiment 20000534 PARAMETER Experiment Name: Zm_Hybrid_Pollen_P Parameter: Tissue Value: Pollen vs. Aerial
  misc_feature: MA Experiment ID: 20000535 Result: Down-regulated in Transcription
  misc_feature: MA Experiment 20000535 PARAMETER Experiment Name: Zm_Hybrid_Seed_Dev_P Parameter: DAP Value: 30 vs. 12
  misc_feature: MA Experiment 20000535 PARAMETER Experiment Name: Zm_Hybrid_Seed_Dev_P Parameter: Organism Value: Zea mays
  misc_feature: MA Experiment 20000535 PARAMETER Experiment Name: Zm_Hybrid_Seed_Dev_P Parameter: Plant Line Value: 35A19
  misc_feature: MA Experiment 20000535 PARAMETER Experiment Name: Zm_Hybrid_Seed_Dev_P Parameter: Tissue Value: Embryo vs. Unfert Floret
aggccgccccgcctgccttgctctcccagcgcgctcgtgtagtcgtcgccatcttcgcttctcttctccacatttctgcgctatcccggcgtacggctgcgatccatacacgcccaatccaaaccctacctaaaactccgcctcgtgcctccgggctcacactcgtaggcacggagtgccgttccgtggtgggtggaatcaccaaaaatgccctccgtccaccaccacctcctcctcctgacgctcgccgccttggccgtggcggcagccaccgctagcgccggcggggacccgccggcaatcgaggcgcagttcgacgcctggtgcgcggagcacgggaaggcctacgccacgcccgaggagcgcgccgcgcggctggccgtgttcgcggacaacgccgccttcgtcgccgcgcacaacgcccgtgcaggcgccaacgccgctggcggcggcggcggcggcgccgcgcccccgtcctacacgctcgcgctcaacgccttcgcggacctcacgcacgaggagttccgcgccgcgcgcctcggccgcatcgcgccgggggcggcgctccggagccgcgccgcgcccgtgtactggggcctcggcggcggtgccgcggtgcctgatgcgctggactggaggaagagcggggccgtcaccaaggtcaaggaccaaggcagctgcggagcttgttggagtttttccgcaacaggtgctatggaaggaataaacaaaataaagacaggctctctggtcagtctttctgaacaggaactaattgactgtgacagatcttataatagtggctgtggtggtggcctcatggattatgcttataagtttgtgataaaaaatggtggaattgacacagaggaggactacccctatcgtgaagcagatgggacatgtaacaagaacaagctgaaaaagcgagttgtgactattgatggttacactgatgtaccttccaacaaagaagatttgttacttcaggctgttgcccagcaacctgttagtgtaggaatatgtggtagcgctagagcatttcagttatactaccagggtatctttgatggtccatgtccgacatctcttgatcatgctgtgttaatcgttggctatggttctgaaggtggcaaggattactggattgtgaaaaactcttggggtgaaagttggggaatgaagggctatatgcatatgcatcgaaacactggtgattccaagggtgtctgcggtataaacatgatggcatcatttcctaccaaaacaagcccgaatcctcctccttcaccaggcccaggtcctaccaaatgcagtctgctcacatactgtcctgagggatccacctgttgttgctcatggcgtgtcttgggcttttgcctttcctggagctgttgcgaactggacaatgcagtttgctgcaaggataaccggtactgctgccctcatgactatcctgtttgtgatacaggtcgcgggcagtgtctcaaggccagcggcaacttctctgctatagaaggaatcaggaggaaacagtctttctctaaagctccctcgtggactggctggctggagttgatggaccaatgagcgtataatcagacatggatagtagcttcatgcaagttgtgcgatccgtaggtcggtcattggccttgttccagtgccctgccacattcctgtacgcctactgcccgctgcgttgcaccgagatgcccttattttctctttattattgaaccctatggtgtaaagtttcacgattgtacatgtatgtcacacttgtattggcctatgcattagacgtctccattagtttacctt

SEQ ID NO: 19327 - protein, 460 aa, Zea mays subsp. mays
  peptide (1)..(460): Ceres Seq. ID no. 12419131
  misc_feature (137)..(351): Pfam Name: Papain family cysteine protease Pfam Description: Papain family cysteine protease
  misc_feature (32)..(441): Homolog of NCBI NO: 30141019 NR Description: cysteine protease-1 [Helianthus annuus]
  misc_feature (23)..(452): Homolog of NCBI NO: 18401614 NR Description: cysteine proteinase RD21A
  misc_feature (23)..(452): Homolog of NCBI NO: 14517542 NR Description: F2G19.31/F2G19.31 [Arabidopsis thaliana]
  misc_feature (8)..(451): Homolog of NCBI NO: 6682829 NR Description: cysteine protease component of protease-inhibitor
  misc_feature (38)..(441): Homolog of NCBI NO: 1361974 NR Description: cysteine proteinase (EC 3.4.22.-) - clove pink
  misc_feature (22)..(112): Homolog of NCBI NO: 18141285 NR Description: senescence-associated cysteine protease [Brassica
  misc_feature (90)..(443): Homolog of NCBI NO: 18141285 NR Description: senescence-associated cysteine protease [Brassica
  misc_feature (11)..(428): Homolog of NCBI NO: 25289988 NR Description: cysteine proteinase (EC 3.4.22.-)
  misc_feature (24)..(455): Homolog of NCBI NO: 18391078 NR Description: cysteine protease XBCP3
  misc_feature (24)..(455): Homolog of NCBI NO: 14600257 NR Description: papain-like cysteine peptidase XBCP3 [Arabidopsis
MPSVHHHLLLLTLAALAVAAATASAGGDPPAIEAQFDAWCAEHGKAYATPEERAARLAVFADNAAFVAAHNARAGANAAGGGGGGAAPPSYTLALNAFADLTHEEFRAARLGRIAPGAALRSRAAPVYWGLGGGAAVPDALDWRKSGAVTKVKDQGSCGACWSFSATGAMEGINKIKTGSLVSLSEQELIDCDRSYNSGCGGGLMDYAYKFVIKNGGIDTEEDYPYREADGTCNKNKLKKRVVTIDGYTDVPSNKEDLLLQAVAQQPVSVGICGSARAFQLYYQGIFDGPCPTSLDHAVLIVGYGSEGGKDYWIVKNSWGESWGMKGYMHMHRNTGDSKGVCGINMMASFPTKTSPNPPPSPGPGPTKCSLLTYCPEGSTCCCSWRVLGFCLSWSCCELDNAVCCKDNRYCCPHDYPVCDTGRGQCLKASGNFSAIEGIRRKQSFSKAPSWTGWLELMDQ

SEQ ID NO: 19328 - protein, 291 aa, Zea mays subsp. mays
  peptide (1)..(291): Ceres Seq. ID no. 12419132
  misc_feature (1)..(182): Pfam Name: Papain family cysteine protease Pfam Description: Papain family cysteine protease
  misc_feature (1)..(281): Homolog of NCBI NO: 18402225 NR Description: cysteine proteinase
  misc_feature (1)..(272): Homolog of NCBI NO: 30141019 NR Description: cysteine protease-1 [Helianthus annuus]
  misc_feature (1)..(283): Homolog of NCBI NO: 18401614 NR Description: cysteine proteinase RD21A
  misc_feature (1)..(283): Homolog of NCBI NO: 14517542 NR Description: F2G19.31/F2G19.31 [Arabidopsis thaliana]
  misc_feature (1)..(282): Homolog of NCBI NO: 6682829 NR Description: cysteine protease component of protease-inhibitor
  misc_feature (1)..(272): Homolog of NCBI NO: 1361974 NR Description: cysteine proteinase (EC 3.4.22.-) - clove pink
  misc_feature (1)..(274): Homolog of NCBI NO: 18141285 NR Description: senescence-associated cysteine protease [Brassica
  misc_feature (1)..(259): Homolog of NCBI NO: 25289988 NR Description: cysteine proteinase (EC 3.4.22.-)
  misc_feature (1)..(286): Homolog of NCBI NO: 18391078 NR Description: cysteine protease XBCP3
  misc_feature (1)..(286): Homolog of NCBI NO: 14600257 NR Description: papain-like cysteine peptidase XBCP3 [Arabidopsis
MEGINKIKTGSLVSLSEQELIDCDRSYNSGCGGGLMDYAYKFVIKNGGIDTEEDYPYREADGTCNKNKLKKRVVTIDGYTDVPSNKEDLLLQAVAQQPVSVGICGSARAFQLYYQGIFDGPCPTSLDHAVLIVGYGSEGGKDYWIVKNSWGESWGMKGYMHMHRNTGDSKGVCGINMMASFPTKTSPNPPPSPGPGPTKCSLLTYCPEGSTCCCSWRVLGFCLSWSCCELDNAVCCKDNRYCCPHDYPVCDTGRGQCLKASGNFSAIEGIRRKQSFSKAPSWTGWLELMDQ

SEQ ID NO: 19329 - protein, 256 aa, Zea mays subsp. mays
  peptide (1)..(256): Ceres Seq. ID no. 12419133
  misc_feature (1)..(147): Pfam Name: Papain family cysteine protease Pfam Description: Papain family cysteine protease
  misc_feature (1)..(246): Homolog of NCBI NO: 18402225 NR Description: cysteine proteinase
  misc_feature (1)..(237): Homolog of NCBI NO: 30141019 NR Description: cysteine protease-1 [Helianthus annuus]
  misc_feature (1)..(248): Homolog of NCBI NO: 18401614 NR Description: cysteine proteinase RD21A
  misc_feature (1)..(248): Homolog of NCBI NO: 14517542 NR Description: F2G19.31/F2G19.31 [Arabidopsis thaliana]
  misc_feature (1)..(247): Homolog of NCBI NO: 6682829 NR Description: cysteine protease component of protease-inhibitor
  misc_feature (1)..(237): Homolog of NCBI NO: 1361974 NR Description: cysteine proteinase (EC 3.4.22.-) - clove pink
  misc_feature (1)..(239): Homolog of NCBI NO: 18141285 NR Description: senescence-associated cysteine protease [Brassica
  misc_feature (1)..(224): Homolog of NCBI NO: 25289988 NR Description: cysteine proteinase (EC 3.4.22.-)
  misc_feature (1)..(251): Homolog of NCBI NO: 18391078 NR Description: cysteine protease XBCP3
  misc_feature (1)..(251): Homolog of NCBI NO: 14600257 NR Description: papain-like cysteine peptidase XBCP3 [Arabidopsis
MDYAYKFVIKNGGIDTEEDYPYREADGTCNKNKLKKRVVTIDGYTDVPSNKEDLLLQAVAQQPVSVGICGSARAFQLYYQGIFDGPCPTSLDHAVLIVGYGSEGGKDYWIVKNSWGESWGMKGYMHMHRNTGDSKGVCGINMMASFPTKTSPNPPPSPGPGPTKCSLLTYCPEGSTCCCSWRVLGFCLSWSCCELDNAVCCKDNRYCCPHDYPVCDTGRGQCLKASGNFSAIEGIRRKQSFSKAPSWTGWLELMDQ

SEQ ID NO: 19330 - DNA, 955 bp, Zea mays subsp. mays
  misc_feature (1)..(955): Ceres Seq. ID no. 12420073
  misc_feature: MA Experiment ID: 108522 Result: Up-regulated in Transcription
  misc_feature: MA Experiment 108522 PARAMETER Experiment Name: Zm_42deg_Heat_P Parameter: Age (day) Value: 8
  misc_feature: MA Experiment 108522 PARAMETER Experiment Name: Zm_42deg_Heat_P Parameter: Organism Value: Zea mays
  misc_feature: MA Experiment 108522 PARAMETER Experiment Name: Zm_42deg_Heat_P Parameter: Plant Line Value: 35A19
  misc_feature: MA Experiment 108522 PARAMETER Experiment Name: Zm_42deg_Heat_P Parameter: Temperature (deg C) Value: 42 vs. 22
  misc_feature: MA Experiment 108522 PARAMETER Experiment Name: Zm_42deg_Heat_P Parameter: Timepoint (hr) Value: 1
  misc_feature: MA Experiment 108522 PARAMETER Experiment Name: Zm_42deg_Heat_P Parameter: Tissue Value: Aerial
  misc_feature: MA Experiment ID: 108536 Result: Up-regulated in Transcription
  misc_feature: MA Experiment 108536 PARAMETER Experiment Name: Zm_Meristem_P Parameter: Age (day) Value: 8
  misc_feature: MA Experiment 108536 PARAMETER Experiment Name: Zm_Meristem_P Parameter: Organism Value: Zea mays
  misc_feature: MA Experiment 108536 PARAMETER Experiment Name: Zm_Meristem_P Parameter: Plant Line Value: 35A19
  misc_feature: MA Experiment 108536 PARAMETER Experiment Name: Zm_Meristem_P Parameter: Tissue Value: Shoot Meristem vs. Above Shoot Meristem
  misc_feature: MA Experiment ID: 108689 Result: Up-regulated in Transcription
  misc_feature: MA Experiment 108689 PARAMETER Experiment Name: Zm_Drought_Roots_P Parameter: Age (day) Value: 9
  misc_feature: MA Experiment 108689 PARAMETER Experiment Name: Zm_Drought_Roots_P Parameter: Organism Value: Zea mays
  misc_feature: MA Experiment 108689 PARAMETER Experiment Name: Zm_Drought_Roots_P Parameter: Plant Line Value: 35A19
  misc_feature: MA Experiment 108689 PARAMETER Experiment Name: Zm_Drought_Roots_P Parameter: Timepoint (hr) Value: 24
  misc_feature: MA Experiment 108689 PARAMETER Experiment Name: Zm_Drought_Roots_P Parameter: Tissue Value: Roots
  misc_feature: MA Experiment 108689 PARAMETER Experiment Name: Zm_Drought_Roots_P Parameter: Treatment Value: Drought vs. No Drought
  misc_feature: MA Experiment ID: 20000492 Result: Up-regulated in Transcription
  misc_feature: MA Experiment 20000492 PARAMETER Experiment Name: Zm_Hybrid_Seed_Dev_P Parameter: DAP Value: 12
  misc_feature: MA Experiment 20000492 PARAMETER Experiment Name: Zm_Hybrid_Seed_Dev_P Parameter: Organism Value: Zea mays
  misc_feature: MA Experiment 20000492 PARAMETER Experiment Name: Zm_Hybrid_Seed_Dev_P Parameter: Plant Line Value: 35A19
  misc_feature: MA Experiment 20000492 PARAMETER Experiment Name: Zm_Hybrid_Seed_Dev_P Parameter: Tissue Value: Fert Kernel vs. Unfert Floret
agccttcttctagtagctacggagtaccattcatcatcagagctagcaagctcaaagaaaactgagctcgtgtgtagtgagcagcgagtgagtgactggtgagtggtgaccatttcaagaacagcgccgcagcagggagctaattcgttcgttcatcgtcgcatcatcagtttgatccttcgaccccatagcttcctgcatcttcgagctcgtcactaaacaaccatgggaggaggcacgctggagtacctgtcggatctgctgggcggcggcggccggcgccggtacaagaagaggaagcagttccagacggtggagctcaaggtgcgcatggactgcgacggctgcgagatgaaagtcaggaacgcgctctccagcatgaaaggggtgcactccgtggagatcaaccgcaagcagtacaaggtgacggtgcaggggtacgtggagccgcacaaggtggtcaagcgggtgcaggccacggggaagaaggccgagatctggccctacgtgccctacagcctcgtcgcgcacccttacgccgcgccggcctacgacaagaaggcgccgccgggctacgtgcgcagggtcgacgccgtcatgcccgtctcctccacctacggcgggcccacggcggcggccggcccgccgcaggaggagcggctcgccaccatgttcagcgacgacaaccccaacgcgtgctctgtcatgtagattagaattactttttcttttcccctacacaccaccgtgggtgcatggcgcagctctcttcgaccacagaaaatgtaaaccgtacgtggatgcatgtcaaaaccatagatgatcgcctcggttggatgtctatgtccatcacatgtgcatgtacgtacgtagctgtatgttgttgtatgctttgtatattattgtttgatggaaccaaaagagagcatgcatgcgtggcagagagattttcccc

SEQ ID NO: 19331 - protein, 161 aa, Zea mays subsp. mays
  peptide (1)..(161): Ceres Seq. ID no. 12420074
  misc_feature (32)..(91): Pfam Name: Heavy-metal-associated domain Pfam Description: Heavy-metal-associated domain
  misc_feature (22)..(161): Homolog of NCBI NO: 21397273 NR Description: Putative atfp6-like protein
  misc_feature (4)..(161): Homolog of NCBI NO: 21536547 NR Description: farnesylated protein (ATFP6) [Arabidopsis
  misc_feature (18)..(161): Homolog of NCBI NO: 23304411 NR Description: farnesylated protein 1 [Hordeum vulgare subsp.
  misc_feature (4)..(161): Homolog of NCBI NO: 15233937 NR Description: copper chaperone (CCH)-related
  misc_feature (18)..(161): Homolog of NCBI NO: 38346843 NR Description: OSJNBa0091C12.3 [Oryza sativa (japonica
  misc_feature (4)..(161): Homolog of NCBI NO: 15219990 NR Description: copper chaperone (CCH)-related
  misc_feature (7)..(161): Homolog of NCBI NO: 15223925 NR Description: copper chaperone (CCH)-related
  misc_feature (1)..(161): Homolog of NCBI NO: 15235984 NR Description: copper chaperone (CCH)-related; protein id:
  misc_feature (3)..(161): Homolog of NCBI NO: 37573003 NR Description: putative farnesylated protein
MGGGTLEYLSDLLGGGGRRRYKKRKQFQTVELKVRMDCDGCEMKVRNALSSMKGVHSVEINRKQYKVTVQGYVEPHKVVKRVQATGKKAEIWPYVPYSLVAHPYAAPAYDKKAPPGYVRRVDAVMPVSSTYGGPTAAAGPPQEERLATMFSDDNPNACSVM

SEQ ID NO: 19332 - protein, 126 aa, Zea mays subsp. mays
  peptide (1)..(126): Ceres Seq. ID no. 12420075
  misc_feature (1)..(56): Pfam Name: Heavy-metal-associated domain Pfam Description: Heavy-metal-associated domain
  misc_feature (1)..(126): Homolog of NCBI NO: 21397273 NR Description: Putative atfp6-like protein
  misc_feature (1)..(126): Homolog of NCBI NO: 21536547 NR Description: farnesylated protein (ATFP6) [Arabidopsis
  misc_feature (1)..(126): Homolog of NCBI NO: 23304411 NR Description: farnesylated protein 1 [Hordeum vulgare subsp.
  misc_feature (1)..(126): Homolog of NCBI NO: 15233937 NR Description: copper chaperone (CCH)-related
  misc_feature (1)..(126): Homolog of NCBI NO: 38346843 NR Description: OSJNBa0091C12.3 [Oryza sativa (japonica
  misc_feature (1)..(126): Homolog of NCBI NO: 15219990 NR Description: copper chaperone (CCH)-related
  misc_feature (1)..(126): Homolog of NCBI NO: 15223925 NR Description: copper chaperone (CCH)-related
  misc_feature (1)..(126): Homolog of NCBI NO: 15235984 NR Description: copper chaperone (CCH)-related; protein id:
  misc_feature (1)..(126): Homolog of NCBI NO: 37573003 NR Description: putative farnesylated protein
MDCDGCEMKVRNALSSMKGVHSVEINRKQYKVTVQGYVEPHKVVKRVQATGKKAEIWPYVPYSLVAHPYAAPAYDKKAPPGYVRRVDAVMPVSSTYGGPTAAAGPPQEERLATMFSDDNPNACSVM

SEQ ID NO: 19333 - protein, 119 aa, Zea mays subsp. mays
  peptide (1)..(119): Ceres Seq. ID no. 12420076
  misc_feature (1)..(49): Pfam Name: Heavy-metal-associated domain Pfam Description: Heavy-metal-associated domain
  misc_feature (1)..(119): Homolog of NCBI NO: 21397273 NR Description: Putative atfp6-like protein
  misc_feature (1)..(119): Homolog of NCBI NO: 21536547 NR Description: farnesylated protein (ATFP6) [Arabidopsis
  misc_feature (1)..(119): Homolog of NCBI NO: 23304411 NR Description: farnesylated protein 1 [Hordeum vulgare subsp.
  misc_feature (1)..(119): Homolog of NCBI NO: 15233937 NR Description: copper chaperone (CCH)-related
  misc_feature (1)..(119): Homolog of NCBI NO: 38346843 NR Description: OSJNBa0091C12.3 [Oryza sativa (japonica
  misc_feature (1)..(119): Homolog of NCBI NO: 15219990 NR Description: copper chaperone (CCH)-related
  misc_feature (1)..(119): Homolog of NCBI NO: 15223925 NR Description: copper chaperone (CCH)-related
  misc_feature (1)..(119): Homolog of NCBI NO: 15235984 NR Description: copper chaperone (CCH)-related; protein id:
  misc_feature (1)..(119): Homolog of NCBI NO: 37573003 NR Description: putative farnesylated protein
MKVRNALSSMKGVHSVEINRKQYKVTVQGYVEPHKVVKRVQATGKKAEIWPYVPYSLVAHPYAAPAYDKKAPPGYVRRVDAVMPVSSTYGGPTAAAGPPQEERLATMFSDDNPNACSVM

SEQ ID NO: 19334 - DNA, 1379 bp, Zea mays subsp. mays
  misc_feature (1)..(1379): Ceres Seq. ID no. 12359162
  misc_feature: MA Experiment ID: 108522 Result: Up-regulated in Transcription
  misc_feature: MA Experiment 108522 PARAMETER Experiment Name: Zm_42deg_Heat_P Parameter: Age (day) Value: 8
  misc_feature: MA Experiment 108522 PARAMETER Experiment Name: Zm_42deg_Heat_P Parameter: Organism Value: Zea mays
  misc_feature: MA Experiment 108522 PARAMETER Experiment Name: Zm_42deg_Heat_P Parameter: Plant Line Value: 35A19
  misc_feature: MA Experiment 108522 PARAMETER Experiment Name: Zm_42deg_Heat_P Parameter: Temperature (deg C) Value: 42 vs. 22
  misc_feature: MA Experiment 108522 PARAMETER Experiment Name: Zm_42deg_Heat_P Parameter: Timepoint (hr) Value: 1
  misc_feature: MA Experiment 108522 PARAMETER Experiment Name: Zm_42deg_Heat_P Parameter: Tissue Value: Aerial
  misc_feature: MA Experiment ID: 108535 Result: Down-regulated in Transcription
  misc_feature: MA Experiment 108535 PARAMETER Experiment Name: Zm_Meristem_P Parameter: Age (day) Value: 8
  misc_feature: MA Experiment 108535 PARAMETER Experiment Name: Zm_Meristem_P Parameter: Organism Value: Zea mays
  misc_feature: MA Experiment 108535 PARAMETER Experiment Name: Zm_Meristem_P Parameter: Plant Line Value: 35A19
  misc_feature: MA Experiment 108535 PARAMETER Experiment Name: Zm_Meristem_P Parameter: Tissue Value: Root Meristem vs. Above Root Meristem
  misc_feature: MA Experiment ID: 20000492 Result: Down-regulated in Transcription
  misc_feature: MA Experiment 20000492 PARAMETER Experiment Name: Zm_Hybrid_Seed_Dev_P Parameter: DAP Value: 12
  misc_feature: MA Experiment 20000492 PARAMETER Experiment Name: Zm_Hybrid_Seed_Dev_P Parameter: Organism Value: Zea mays
  misc_feature: MA Experiment 20000492 PARAMETER Experiment Name: Zm_Hybrid_Seed_Dev_P Parameter: Plant Line Value: 35A19
  misc_feature: MA Experiment 20000492 PARAMETER Experiment Name: Zm_Hybrid_Seed_Dev_P Parameter: Tissue Value: Fert Kernel vs. Unfert Floret
acaacactcgcctgccctgccctctcatctcgcttcgcttccattccatcgcgccagtcgccagactcaccagggagacagggagagtagggggaaatatcaattagaaacaacgaggaactagcaaagaaagaaggataactcccataagaaaaatcgccaaatacgccattcatcttctccgcccgggtttcagaacgtgcggcagtttagccaggatggtggcgatcgagaaccagaaccagagccaggccgcttcccgaacggccgcgtcgaggagttcatccacgcaaggacattgtcagctgccgaccttcgcgatcctgaaatttcagctctggtggcttccaagctgagggagttccacaaccttgacatgcctggtcccaaatctgtgctcatttgggacagacttaggaactggctcagaactgccaagagcttgtgtccacctgaagaagccaaggaatttcggttggacagtctggagaaccagattactgcattggagaacgagtgttcaggtgattaccagtggattggtttctgtcacaatgatcttcagtatggcaatatcatgattgatgaagagaccaacgtgctgaccatcattgattatgagtatgcaagcttcaacccagttgcatatgacattgctaaccatttctgtgagatggcagcagactatcattcatcaaagcctcatatactggactacagcagatatccagatgttgatgagcagaagcgttttgttaagacctacctgaacatttctggtgaggaacctgatgcggaagttgtggagaacctgctccaaagcattgagaagcacacgctcgccagccatctagtatggggcctctggggaataatttcggatcatgttaacgacattgacttcgactacaaggagtatgcgaggcagagattcgagcagtactggcacaagtctgcgatcttaacatcttgaacatgtgtataaacacccgtacgtggtctcaggaactccctgagggcctgtggctgcacacacgaaattgtgcagtgccactgacacatagataagctgtgaaagaagaaatactgacgacgacgacgaataatcccgttttgggctcgggaggttatttctccgcaactcgatgagcttcaggcttcagcttcaggaaggaaggaaggagctatggggatttggctgcccgcttatgctgtaccaatgcaattaaaagataaagatccggtccggtgttgcgtgtgctatgtttagttttggctagcaccgccgagagccgtggtcctgttgtggtgtttctagtttctgtatgcttgatgttgttagtgtgctggataatttggttttgtgcttggggagtcct

SEQ ID NO: 19335 - protein, 198 aa, Zea mays subsp. mays
  peptide (1)..(198): Ceres Seq. ID no. 12359163
  misc_feature (1)..(180): Pfam Name: Choline/ethanolamine kinase Pfam Description: Choline/ethanolamine kinase
  misc_feature (1)..(196): Homolog of NCBI NO: 7488654 NR Description: choline kinase (EC 2.7.1.32) CK3 - soybean
  misc_feature (1)..(180): Homolog of NCBI NO: 34910612 NR Description: putative choline kinase [Oryza sativa (japonica
  misc_feature (1)..(198): Homolog of NCBI NO: 21594823 NR Description: choline kinase GmCK2p-like protein [Arabidopsis
  misc_feature (1)..(196): Homolog of NCBI NO: 12311795 NR Description: choline kinase [Pisum sativum]
  misc_feature (1)..(190): Homolog of NCBI NO: 25348157 NR Description: protein choline kinase F1O17.1 [imported] -
  misc_feature (1)..(190): Homolog of NCBI NO: 22330627 NR Description: putative choline kinase
  misc_feature (1)..(198): Homolog of NCBI NO: 7488653 NR Description: choline kinase (EC 2.7.1.32) CK2 - soybean
  misc_feature (1)..(198): Homolog of NCBI NO: 15234032 NR Description: choline kinase GmCK2p -like protein
  misc_feature (1)..(198): Homolog of NCBI NO: 21537276 NR Description: choline kinase GmCK2p-like protein [Arabidopsis
  misc_feature (1)..(198): Homolog of NCBI NO: 33149685 NR Description: choline kinase [Oryza sativa (indica
MPGPKSVLIWDRLRNWLRTAKSLCPPEEAKEFRLDSLENQITALENECSGDYQWIGFCHNDLQYGNIMIDEETNVLTIIDYEYASFNPVAYDIANHFCEMAADYHSSKPHILDYSRYPDVDEQKRFVKTYLNISGEEPDAEVVENLLQSIEKHTLASHLVWGLWGIISDHVNDIDFDYKEYARQRFEQYWHKSAILTS

SEQ ID NO: 19336 - protein, 131 aa, Zea mays subsp. mays
  peptide (1)..(131): Ceres Seq. ID no. 12359164
  misc_feature (1)..(113): Pfam Name: Choline/ethanolamine kinase Pfam Description: Choline/ethanolamine kinase
  misc_feature (1)..(131): Homolog of NCBI NO: 21537276 NR Description: choline kinase GmCK2p-like protein [Arabidopsis
  misc_feature (1)..(131): Homolog of NCBI NO: 21594823 NR Description: choline kinase GmCK2p-like protein [Arabidopsis
  misc_feature (1)..(131): Homolog of NCBI NO: 15234032 NR Description: choline kinase GmCK2p -like protein
  misc_feature (1)..(129): Homolog of NCBI NO: 12311795 NR Description: choline kinase [Pisum sativum]
  misc_feature (1)..(131): Homolog of NCBI NO: 7488653 NR Description: choline kinase (EC 2.7.1.32) CK2 - soybean
  misc_feature (1)..(123): Homolog of NCBI NO: 25348157 NR Description: protein choline kinase F1O17.1 [imported] -
  misc_feature (1)..(123): Homolog of NCBI NO: 22330627 NR Description: putative choline kinase
  misc_feature (1)..(129): Homolog of NCBI NO: 7488654 NR Description: choline kinase (EC 2.7.1.32) CK3 - soybean
  misc_feature (1)..(113): Homolog of NCBI NO: 34910612 NR Description: putative choline kinase [Oryza sativa (japonica
  misc_feature (1)..(131): Homolog of NCBI NO: 33149685 NR Description: choline kinase [Oryza sativa (indica
MIDEETNVLTIIDYEYASFNPVAYDIANHFCEMAADYHSSKPHILDYSRYPDVDEQKRFVKTYLNISGEEPDAEVVENLLQSIEKHTLASHLVWGLWGIISDHVNDIDFDYKEYARQRFEQYWHKSAILTS

SEQ ID NO: 19337 - protein, 99 aa, Zea mays subsp. mays
  peptide (1)..(99): Ceres Seq. ID no. 12359165
  misc_feature (1)..(81): Pfam Name: Choline/ethanolamine kinase Pfam Description: Choline/ethanolamine kinase
  misc_feature (1)..(99): Homolog of NCBI NO: 21537276 NR Description: choline kinase GmCK2p-like protein [Arabidopsis
  misc_feature (1)..(99): Homolog of NCBI NO: 21594823 NR Description: choline kinase GmCK2p-like protein [Arabidopsis
  misc_feature (1)..(99): Homolog of NCBI NO: 15234032 NR Description: choline kinase GmCK2p -like protein
  misc_feature (1)..(97): Homolog of NCBI NO: 12311795 NR Description: choline kinase [Pisum sativum]
  misc_feature (1)..(99): Homolog of NCBI NO: 7488653 NR Description: choline kinase (EC 2.7.1.32) CK2 - soybean
  misc_feature (1)..(91): Homolog of NCBI NO: 25348157 NR Description: protein choline kinase F1O17.1 [imported] -
  misc_feature (1)..(91): Homolog of NCBI NO: 22330627 NR Description: putative choline kinase
  misc_feature (1)..(97): Homolog of NCBI NO: 7488654 NR Description: choline kinase (EC 2.7.1.32) CK3 - soybean
  misc_feature (1)..(81): Homolog of NCBI NO: 34910612 NR Description: putative choline kinase [Oryza sativa (japonica
  misc_feature (1)..(99): Homolog of NCBI NO: 33149685 NR Description: choline kinase [Oryza sativa (indica
MAADYHSSKPHILDYSRYPDVDEQKRFVKTYLNISGEEPDAEVVENLLQSIEKHTLASHLVWGLWGIISDHVNDIDFDYKEYARQRFEQYWHKSAILTS

SEQ ID NO: 19338 - DNA, 665 bp, Zea mays subsp. mays
  misc_feature (1)..(665): Ceres Seq. ID no. 13568486
  misc_feature: MA Experiment ID: 108523 Result: Down-regulated in Transcription
  misc_feature: MA Experiment 108523 PARAMETER Experiment Name: Zm_42deg_Heat_P Parameter: Age (day) Value: 8
  misc_feature: MA Experiment 108523 PARAMETER Experiment Name: Zm_42deg_Heat_P Parameter: Organism Value: Zea mays
  misc_feature: MA Experiment 108523 PARAMETER Experiment Name: Zm_42deg_Heat_P Parameter: Plant Line Value: 35A19
  misc_feature: MA Experiment 108523 PARAMETER Experiment Name: Zm_42deg_Heat_P Parameter: Temperature (deg C) Value: 42 vs. 22
  misc_feature: MA Experiment 108523 PARAMETER Experiment Name: Zm_42deg_Heat_P Parameter: Timepoint (hr) Value: 6
  misc_feature: MA Experiment 108523 PARAMETER Experiment Name: Zm_42deg_Heat_P Parameter: Tissue Value: Aerial
  misc_feature: MA Experiment ID: 108528 Result: Up-regulated in Transcription
  misc_feature: MA Experiment 108528 PARAMETER Experiment Name: Zm_Imbibed_Seeds_P Parameter: Age (day) Value: 5 vs. 2
  misc_feature: MA Experiment 108528 PARAMETER Experiment Name: Zm_Imbibed_Seeds_P Parameter: Organism Value: Zea mays
  misc_feature: MA Experiment 108528 PARAMETER Experiment Name: Zm_Imbibed_Seeds_P Parameter: Plant Line Value: 35A19
  misc_feature: MA Experiment 108528 PARAMETER Experiment Name: Zm_Imbibed_Seeds_P Parameter: Tissue Value: Aerial vs. Embryo
  misc_feature: MA Experiment ID: 108530 Result: Up-regulated in Transcription
  misc_feature: MA Experiment 108530 PARAMETER Experiment Name: Zm_Imbibed_Seeds_P Parameter: Age (day) Value: 6 vs. 2
  misc_feature: MA Experiment 108530 PARAMETER Experiment Name: Zm_Imbibed_Seeds_P Parameter: Organism Value: Zea mays
  misc_feature: MA Experiment 108530 PARAMETER Experiment Name: Zm_Imbibed_Seeds_P Parameter: Plant Line Value: 35A19
  misc_feature: MA Experiment 108530 PARAMETER Experiment Name: Zm_Imbibed_Seeds_P Parameter: Tissue Value: Aerial vs. Embryo
  misc_feature: MA Experiment ID: 108536 Result: Down-regulated in Transcription
  misc_feature: MA Experiment 108536 PARAMETER Experiment Name: Zm_Meristem_P Parameter: Age (day) Value: 8
  misc_feature: MA Experiment 108536 PARAMETER Experiment Name: Zm_Meristem_P Parameter: Organism Value: Zea mays
  misc_feature: MA Experiment 108536 PARAMETER Experiment Name: Zm_Meristem_P Parameter: Plant Line Value: 35A19
  misc_feature: MA Experiment 108536 PARAMETER Experiment Name: Zm_Meristem_P Parameter: Tissue Value: Shoot Meristem vs. Above Shoot Meristem
  misc_feature: MA Experiment ID: 108544 Result: Up-regulated in Transcription
  misc_feature: MA Experiment ID: 108545 Result: Up-regulated in Transcription
  misc_feature: MA Experiment 108545 PARAMETER Experiment Name: Zm_Imbibed_Seeds_P Parameter: Age (day) Value: 3 vs. 2
  misc_feature: MA Experiment 108545 PARAMETER Experiment Name: Zm_Imbibed_Seeds_P Parameter: Organism Value: Zea mays
  misc_feature: MA Experiment 108545 PARAMETER Experiment Name: Zm_Imbibed_Seeds_P Parameter: Plant Line Value: 35A19
  misc_feature: MA Experiment 108545 PARAMETER Experiment Name: Zm_Imbibed_Seeds_P Parameter: Tissue Value: Aerial vs. Embryo
  misc_feature: MA Experiment ID: 108547 Result: Up-regulated in Transcription
  misc_feature: MA Experiment 108547 PARAMETER Experiment Name: Zm_Imbibed_Seeds_P Parameter: Age (day) Value: 4 vs. 2
  misc_feature: MA Experiment 108547 PARAMETER Experiment Name: Zm_Imbibed_Seeds_P Parameter: Organism Value: Zea mays
  misc_feature: MA Experiment 108547 PARAMETER Experiment Name: Zm_Imbibed_Seeds_P Parameter: Plant Line Value: 35A19
  misc_feature: MA Experiment 108547 PARAMETER Experiment Name: Zm_Imbibed_Seeds_P Parameter: Tissue Value: Aerial vs. Embryo
  misc_feature: MA Experiment ID: 108559 Result: Down-regulated in Transcription
  misc_feature: MA Experiment 108559 PARAMETER Experiment Name: Zm_5mM_NO_P Parameter: Age (day) Value: 8
  misc_feature: MA Experiment 108559 PARAMETER Experiment Name: Zm_5mM_NO_P Parameter: Organism Value: Zea mays
  misc_feature: MA Experiment 108559 PARAMETER Experiment Name: Zm_5mM_NO_P Parameter: Plant Line Value: 35A19
  misc_feature: MA Experiment 108559 PARAMETER Experiment Name: Zm_5mM_NO_P Parameter: Timepoint (hr) Value: 12
  misc_feature: MA Experiment 108559 PARAMETER Experiment Name: Zm_5mM_NO_P Parameter: Tissue Value: Aerial
  misc_feature: MA Experiment 108559 PARAMETER Experiment Name: Zm_5mM_NO_P Parameter: Treatment Value: 5mM NO vs. No Treatment
  misc_feature: MA Experiment ID: 108687 Result: Down-regulated in Transcription
  misc_feature: MA Experiment 108687 PARAMETER Experiment Name: Zm_Embryos-Flowers__P Parameter: Tissue Value: Embryo vs. Aerial+
  misc_feature: MA Experiment ID: 108688 Result: Down-regulated in Transcription
  misc_feature: MA Experiment 108688 PARAMETER Experiment Name: Zm_Embryos-Flowers__P Parameter: Tissue Value: Immature Flowers vs. Aerial+
  misc_feature: MA Experiment ID: 108689 Result: Up-regulated in Transcription
  misc_feature: MA Experiment 108689 PARAMETER Experiment Name: Zm_Drought_Roots_P Parameter: Age (day) Value: 9
  misc_feature: MA Experiment 108689 PARAMETER Experiment Name: Zm_Drought_Roots_P Parameter: Organism Value: Zea mays
  misc_feature: MA Experiment 108689 PARAMETER Experiment Name: Zm_Drought_Roots_P Parameter: Plant Line Value: 35A19
  misc_feature: MA Experiment 108689 PARAMETER Experiment Name: Zm_Drought_Roots_P Parameter: Timepoint (hr) Value: 24
  misc_feature: MA Experiment 108689 PARAMETER Experiment Name: Zm_Drought_Roots_P Parameter: Tissue Value: Roots
  misc_feature: MA Experiment 108689 PARAMETER Experiment Name: Zm_Drought_Roots_P Parameter: Treatment Value: Drought vs. No Drought
  misc_feature: MA Experiment ID: 20000477 Result: Down-regulated in Transcription
  misc_feature: MA Experiment 20000477 PARAMETER Experiment Name: Zm_5mM_SA_P Parameter: Age (day) Value: 10
  misc_feature: MA Experiment 20000477 PARAMETER Experiment Name: Zm_5mM_SA_P Parameter: Organism Value: Zea mays
  misc_feature: MA Experiment 20000477 PARAMETER Experiment Name: Zm_5mM_SA_P Parameter: Plant Line Value: 35A19
  misc_feature: MA Experiment 20000477 PARAMETER Experiment Name: Zm_5mM_SA_P Parameter: Timepoint (hr) Value: 48
  misc_feature: MA Experiment 20000477 PARAMETER Experiment Name: Zm_5mM_SA_P Parameter: Tissue Value: Aerial
  misc_feature: MA Experiment 20000477 PARAMETER Experiment Name: Zm_5mM_SA_P Parameter: Treatment Value: 5mM SA vs. No Treatment
gcttgctcccaagatcaagcgcctcccgcctccagcactctaactcaggggacacgatcgccatggccgccacatcgaccgccgccgccgtgctgtccccgccgtccgtggccgggctccgcctggcgccgtctcccggccgggcgcgcgtgtcgttccgcgcggcgccgggcgccggcgcggcggtccgtggcggcgcgcgcggagctgagctcggcgctggtgatcagcctgagcacgggcgtgtcgctcttcctgggccgcttcgtcttcttcaacttccagcgggagaacgtggcgaagcaggtgcccgcgcagaacggcaagacgcacttcgacgccggcgacgagcgcgccaaggagttcgcggccctgctcaagtccaacgaccccgtgggcttcaacctcgtcgacgtcctccgcctggggctcgctcggccacatcgtcgcctactacatcctcgccacctccagcaacggatacgaccccaacttcttntgagcggtcgtcgaggatgtattctacagacanccgtgtgcgtgcgtgtgtgcttgtcatgtatccgatcaaagtttggttaatttggacaagtagtgcaactgcagaataattggtatttgtatagtgcaccatgccaacatgaatttgatctgtctctgtcttc

SEQ ID NO: 19339 - protein, 202 aa, Zea mays subsp. mays
  peptide (1)..(202): Ceres Seq. ID no. 13568487
  misc_feature (23)..(69): Homolog of NCBI NO: 131192 NR Description: Photosystem I reaction center subunit V,
  misc_feature (166)..(166): Xaa is any aa, unknown or other
  misc_feature (177)..(177): Xaa is any aa, unknown or other
LLPRSSASRLQHSNSGDTIAMAATSTAAAVLSPPSVAGLRLAPSPGRARVSFRAAPGAGAAVRGGARGAELGAGDQPEHGRVALPGPLRLLQLPAGERGEAGARAERQDALRRRRRARQGVRGPAQVQRPRGLQPRRRPPPGARSATSSPTTSSPPPATDTTPTSXERSSRMYSTDXRVRACVLVMYPIKVWLIWTSSATAE

SEQ ID NO: 19340 - protein, 193 aa, Zea mays subsp. mays
  peptide (1)..(193): Ceres Seq. ID no. 13568488
  misc_feature (70)..(143): Pfam Name: Photosystem I psaG / psaK Pfam Description: Photosystem I psaG / psaK
  misc_feature (51)..(152): Homolog of NCBI NO: 12831160 NR Description: PsaG-like protein [Dunaliella salina]
  misc_feature (69)..(106): Homolog of NCBI NO: 131193 NR Description: Photosystem I reaction center subunit V (PSI-G)
  misc_feature (46)..(143): Homolog of NCBI NO: 131191 NR Description: Photosystem I reaction center subunit V, precursor (PSI-G) (Light-harvesting complex I 10 kDa protein)
  misc_feature (63)..(143): Homolog of NCBI NO: 15222757 NR Description: photosystem I subunit V precursor -related
  misc_feature (53)..(143): Homolog of NCBI NO: 131194 NR Description: Photosystem I reaction center subunit V,
  misc_feature (38)..(143): Homolog of NCBI NO: 131192 NR Description: Photosystem I reaction center subunit V,
  misc_feature (167)..(167): Xaa is any aa, unknown or other
  misc_feature (178)..(178): Xaa is any aa, unknown or other
ACSQDQAPPASSTLTQGTRSPWPPHRPPPPCCPRRPWPGSAWRRLPAGRACRSARRRAPARRSVAARAELSSALVISLSTGVSLFLGRFVFFNFQRENVAKQVPAQNGKTHFDAGDERAKEFAALLKSNDPVGFNLVDVLRLGLARPHRRLLHPRHLQQRIRPQLLXSGRRGCILQTXVCVRVCLSCIRSKFG

SEQ ID NO: 19341 - protein, 182 aa, Zea mays subsp. mays
  peptide (1)..(182): Ceres Seq. ID no. 13568489
  misc_feature (3)..(49): Homolog of NCBI NO: 131192 NR Description: Photosystem I reaction center subunit V,
  misc_feature (146)..(146): Xaa is any aa, unknown or other
  misc_feature (157)..(157): Xaa is any aa, unknown or other
MAATSTAAAVLSPPSVAGLRLAPSPGRARVSFRAAPGAGAAVRGGARGAELGAGDQPEHGRVALPGPLRLLQLPAGERGEAGARAERQDALRRRRRARQGVRGPAQVQRPRGLQPRRRPPPGARSATSSPTTSSPPPATDTTPTSXERSSRMYSTDXRVRACVLVMYPIKVWLIWTSSATAE

SEQ ID NO: 19342 - DNA, 1172 bp, Zea mays subsp. mays
  misc_feature (1)..(1172): Ceres Seq. ID no. 12375730
  misc_feature: MA Experiment ID: 108689 Result: Down-regulated in Transcription
  misc_feature: MA Experiment 108689 PARAMETER Experiment Name: Zm_Drought_Roots_P Parameter: Age (day) Value: 9
  misc_feature: MA Experiment 108689 PARAMETER Experiment Name: Zm_Drought_Roots_P Parameter: Organism Value: Zea mays
  misc_feature: MA Experiment 108689 PARAMETER Experiment Name: Zm_Drought_Roots_P Parameter: Plant Line Value: 35A19
  misc_feature: MA Experiment 108689 PARAMETER Experiment Name: Zm_Drought_Roots_P Parameter: Timepoint (hr) Value: 24
  misc_feature: MA Experiment 108689 PARAMETER Experiment Name: Zm_Drought_Roots_P Parameter: Tissue Value: Roots
  misc_feature: MA Experiment 108689 PARAMETER Experiment Name: Zm_Drought_Roots_P Parameter: Treatment Value: Drought vs. No Drought
gcacgagaccattacctagaacatcctaatcgaaaaatcgacagcctccgccgcacgttcacacacacagcaagcagaatccagctagctcagctctcactcgctcgctcactccagtgtccagtctcccttcacttcaggacgtcctcgattcgccgccgtctgtcaaccgagatggacgcgctgtggaatggttcgtcgtgcgattggccggcgccgacggtgatcatcagcgacgacgacgcggcggcagcggagctgcggcgggggccgtggacagtggacgaggacgcgctcctggcggcccacgtggccgcgcacggcgaggggcggtggaacgagctggcgcgcgacgcggggctacggcgcaccggcaagagctgccgcctccgctggctcaactacctccgccccggcgtgcgccgcgggggcttcaccccgcgggagcagctgctcatcctcgacctccactcgcgctggggcaaccgctggtccaagatcgcggcgcacctgccgggccgcacggacaacgaggtcaagaactactggaggacgcgggtgcagaagcacgccaagcagctgcactgcgacgtcggcagccgcaggttccacgacgccatgaggaacctctggatgccgcgcctgatcgagaggatccacgccgacgactcagccgccgtcgccgctaatgccaccggcgacgtctcccacttctactccgcgagcccatcgcatgagctgtcgtcgtcctcccagccggcgccggcgtaccgaaacgctgcgcccaacggcagctgcgcgcgtgcgccgtccccggacgcctcctgcgtcaccgggccgtcgtcgtggtcacgggaggcgtcgcccgcgtcgcagttccaatcgagcggctcgaccattgccggaccgtctacttccaccgagctgtgccagaacggatgctccagcgcgacgagcgttgacatgttcgacgagagctggtcggagcttcttgcgcgcgccaaccatgacgacacggatttcggattgggagaaactggagacaactggtggggtctggaggatatctgggaacaaccgctttaaactgatcgctccctacttttgtactactacatactacgtatgctgcccgagacgaaatgacagaattgttgtttctagtgttattg

SEQ ID NO: 19343 - protein, 361 aa, Zea mays subsp. mays
  peptide (1)..(361): Ceres Seq. ID no. 12375731
  misc_feature (142)..(187): Pfam Name: Myb-like DNA-binding domain Pfam Description: Myb-like DNA-binding domain
  misc_feature (86)..(357): Homolog of NCBI NO: 14249019 NR Description: recombinant myb-like transcription factor Myb 5
  misc_feature (86)..(357): Homolog of NCBI NO: 23476307 NR Description: myb-like transcription factor 5 [Gossypioides
  misc_feature (79)..(228): Homolog of NCBI NO: 7446184 NR Description: myb-related protein Cpm5 - Craterostigma
  misc_feature (76)..(249): Homolog of NCBI NO: 7446185 NR Description: dehydration-induced myb-related protein Cpm7 -
  misc_feature (79)..(348): Homolog of NCBI NO: 7446183 NR Description: ABA-induced myb-related protein Cpm10 -
  misc_feature (82)..(231): Homolog of NCBI NO: 19073334 NR Description: typical P-type R2R3 Myb protein [Sorghum bicolor]
  misc_feature (76)..(272): Homolog of NCBI NO: 34898110 NR Description: putative typical P-type R2R3 Myb protein
  misc_feature (84)..(232): Homolog of NCBI NO: 19073328 NR Description: typical P-type R2R3 Myb protein [Sorghum bicolor]
  misc_feature (81)..(251): Homolog of NCBI NO: 13177578 NR Description: Myb transcription factor JAMyb [Oryza sativa]
  misc_feature (68)..(359): Homolog of NCBI NO: 34894466 NR Description: putative dehydration-induced myb-related protein
ARDHYLEHPNRKIDSLRRTFTHTASRIQLAQLSLARSLQCPVSLHFRTSSIRRRLSTEMDALWNGSSCDWPAPTVIISDDDAAAAELRRGPWTVDEDALLAAHVAAHGEGRWNELARDAGLRRTGKSCRLRWLNYLRPGVRRGGFTPREQLLILDLHSRWGNRWSKIAAHLPGRTDNEVKNYWRTRVQKHAKQLHCDVGSRRFHDAMRNLWMPRLIERIHADDSAAVAANATGDVSHFYSASPSHELSSSSQPAPAYRNAAPNGSCARAPSPDASCVTGPSSWSREASPASQFQSSGSTIAGPSTSTELCQNGCSSATSVDMFDESWSELLARANHDDTDFGLGETGDNWWGLEDIWEQPL

SEQ ID NO: 19344 - protein, 303 aa, Zea mays subsp. mays
  peptide (1)..(303): Ceres Seq. ID no. 12375732
  misc_feature (84)..(129): Pfam Name: Myb-like DNA-binding domain Pfam Description: Myb-like DNA-binding domain
  misc_feature (28)..(299): Homolog of NCBI NO: 14249019 NR Description: recombinant myb-like transcription factor Myb 5
  misc_feature (28)..(299): Homolog of NCBI NO: 23476307 NR Description: myb-like transcription factor 5 [Gossypioides
  misc_feature (21)..(170): Homolog of NCBI NO: 7446184 NR Description: myb-related protein Cpm5 - Craterostigma
  misc_feature (18)..(191): Homolog of NCBI NO: 7446185 NR Description: dehydration-induced myb-related protein Cpm7 -
  misc_feature (21)..(290): Homolog of NCBI NO: 7446183 NR Description: ABA-induced myb-related protein Cpm10 -
  misc_feature (24)..(173): Homolog of NCBI NO: 19073334 NR Description: typical P-type R2R3 Myb protein [Sorghum bicolor]
  misc_feature (18)..(214): Homolog of NCBI NO: 34898110 NR Description: putative typical P-type R2R3 Myb protein
  misc_feature (26)..(174): Homolog of NCBI NO: 19073328 NR Description: typical P-type R2R3 Myb protein [Sorghum bicolor]
  misc_feature (23)..(193): Homolog of NCBI NO: 13177578 NR Description: Myb transcription factor JAMyb [Oryza sativa]
  misc_feature (10)..(301): Homolog of NCBI NO: 34894466 NR Description: putative dehydration-induced myb-related protein
MDALWNGSSCDWPAPTVIISDDDAAAAELRRGPWTVDEDALLAAHVAAHGEGRWNELARDAGLRRTGKSCRLRWLNYLRPGVRRGGFTPREQLLILDLHSRWGNRWSKIAAHLPGRTDNEVKNYWRTRVQKHAKQLHCDVGSRRFHDAMRNLWMPRLIERIHADDSAAVAANATGDVSHFYSASPSHELSSSSQPAPAYRNAAPNGSCARAPSPDASCVTGPSSWSREASPASQFQSSGSTIAGPSTSTELCQNGCSSATSVDMFDESWSELLARANHDDTDFGLGETGDNWWGLEDIWEQPL

SEQ ID NO: 19345 - DNA, 1137 bp, Zea mays subsp. mays
  misc_feature (1)..(1137): Ceres Seq. ID no. 12359166
  misc_feature: MA Experiment ID: 108504 Result: Up-regulated in Transcription
  misc_feature: MA Experiment 108504 PARAMETER Experiment Name: Zm_Drought_P Parameter: Age (day) Value: 8
  misc_feature: MA Experiment 108504 PARAMETER Experiment Name: Zm_Drought_P Parameter: Organism Value: Zea mays
  misc_feature: MA Experiment 108504 PARAMETER Experiment Name: Zm_Drought_P Parameter: Plant Line Value: 35A19
  misc_feature: MA Experiment 108504 PARAMETER Experiment Name: Zm_Drought_P Parameter: Timepoint (hr) Value: 12
  misc_feature: MA Experiment 108504 PARAMETER Experiment Name: Zm_Drought_P Parameter: Tissue Value: Aerial
  misc_feature: MA Experiment 108504 PARAMETER Experiment Name: Zm_Drought_P Parameter: Treatment Value: Drought vs. No Drought
  misc_feature: MA Experiment ID: 108523 Result: Up-regulated in Transcription
  misc_feature: MA Experiment 108523 PARAMETER Experiment Name: Zm_42deg_Heat_P Parameter: Age (day) Value: 8
  misc_feature: MA Experiment 108523 PARAMETER Experiment Name: Zm_42deg_Heat_P Parameter: Organism Value: Zea mays
  misc_feature: MA Experiment 108523 PARAMETER Experiment Name: Zm_42deg_Heat_P Parameter: Plant Line Value: 35A19
  misc_feature: MA Experiment 108523 PARAMETER Experiment Name: Zm_42deg_Heat_P Parameter: Temperature (deg C) Value: 42 vs. 22
  misc_feature: MA Experiment 108523 PARAMETER Experiment Name: Zm_42deg_Heat_P Parameter: Timepoint (hr) Value: 6
  misc_feature: MA Experiment 108523 PARAMETER Experiment Name: Zm_42deg_Heat_P Parameter: Tissue Value: Aerial
  misc_feature: MA Experiment ID: 108534 Result: Up-regulated in Transcription
  misc_feature: MA Experiment 108534 PARAMETER Experiment Name: Zm_4deg_Cold_P Parameter: Age (hr) Value: 8
  misc_feature: MA Experiment 108534 PARAMETER Experiment Name: Zm_4deg_Cold_P Parameter: Organism Value: Zea mays
  misc_feature: MA Experiment 108534 PARAMETER Experiment Name: Zm_4deg_Cold_P Parameter: Plant Line Value: 35A19
  misc_feature: MA Experiment 108534 PARAMETER Experiment Name: Zm_4deg_Cold_P Parameter: Temperature (deg C) Value: 4 vs. 22
  misc_feature: MA Experiment 108534 PARAMETER Experiment Name: Zm_4deg_Cold_P Parameter: Timepoint (hr) Value: 6
  misc_feature: MA Experiment 108534 PARAMETER Experiment Name: Zm_4deg_Cold_P Parameter: Tissue Value: Aerial
  misc_feature: MA Experiment ID: 108540 Result: Up-regulated in Transcription
  misc_feature: MA Experiment 108540 PARAMETER Experiment Name: Zm_20percent_PEG_P Parameter: Age (day) Value: 8
  misc_feature: MA Experiment 108540 PARAMETER Experiment Name: Zm_20percent_PEG_P Parameter: Organism Value: Zea mays
  misc_feature: MA Experiment 108540 PARAMETER Experiment Name: Zm_20percent_PEG_P Parameter: Plant Line Value: 35A19
  misc_feature: MA Experiment 108540 PARAMETER Experiment Name: Zm_20percent_PEG_P Parameter: Timepoint (hr) Value: 6
  misc_feature: MA Experiment 108540 PARAMETER Experiment Name: Zm_20percent_PEG_P Parameter: Tissue Value: Aerial
  misc_feature: MA Experiment 108540 PARAMETER Experiment Name: Zm_20percent_PEG_P Parameter: Treatment Value: 20percent PEG vs. No Treatment
  misc_feature: MA Experiment ID: 108542 Result: Up-regulated in Transcription
  misc_feature: MA Experiment 108542 PARAMETER Experiment Name: Zm_150mM_NaCl_P Parameter: Age (day) Value: 8
  misc_feature: MA Experiment 108542 PARAMETER Experiment Name: Zm_150mM_NaCl_P Parameter: Organism Value: Zea mays
  misc_feature: MA Experiment 108542 PARAMETER Experiment Name: Zm_150mM_NaCl_P Parameter: Plant Line Value: 35A19
  misc_feature: MA Experiment 108542 PARAMETER Experiment Name: Zm_150mM_NaCl_P Parameter: Timepoint (hr) Value: 6
  misc_feature: MA Experiment 108542 PARAMETER Experiment Name: Zm_150mM_NaCl_P Parameter: Tissue Value: Aerial
  misc_feature: MA Experiment 108542 PARAMETER Experiment Name: Zm_150mM_NaCl_P Parameter: Treatment Value: 150mM NaCl vs. No Treatment
  misc_feature: MA Experiment ID: 108543 Result: Up-regulated in Transcription
  misc_feature: MA Experiment ID: 108556 Result: Up-regulated in Transcription
  misc_feature: MA Experiment 108556 PARAMETER Experiment Name: Zm_Drought_P Parameter: Age (day) Value: 9
  misc_feature: MA Experiment 108556 PARAMETER Experiment Name: Zm_Drought_P Parameter: Organism Value: Zea mays
  misc_feature: MA Experiment 108556 PARAMETER Experiment Name: Zm_Drought_P Parameter: Plant Line Value: 35A19
  misc_feature: MA Experiment 108556 PARAMETER Experiment Name: Zm_Drought_P Parameter: Timepoint (hr) Value: 24
  misc_feature: MA Experiment 108556 PARAMETER Experiment Name: Zm_Drought_P Parameter: Tissue Value: Aerial
  misc_feature: MA Experiment 108556 PARAMETER Experiment Name: Zm_Drought_P Parameter: Treatment Value: Drought vs. No Drought
  misc_feature: MA Experiment ID: 20000479 Result: Up-regulated in Transcription
  misc_feature: MA Experiment 20000479 PARAMETER Experiment Name: Zm_Drought_P Parameter: Age (day) Value: 10
  misc_feature: MA Experiment 20000479 PARAMETER Experiment Name: Zm_Drought_P Parameter: Organism Value: Zea mays
  misc_feature: MA Experiment 20000479 PARAMETER Experiment Name: Zm_Drought_P Parameter: Plant Line Value: 35A19
  misc_feature: MA Experiment 20000479 PARAMETER Experiment Name: Zm_Drought_P Parameter: Timepoint (hr) Value: 48
  misc_feature: MA Experiment 20000479 PARAMETER Experiment Name: Zm_Drought_P Parameter: Tissue Value: Aerial
  misc_feature: MA Experiment 20000479 PARAMETER Experiment Name: Zm_Drought_P Parameter: Treatment Value: Drought vs. No Drought
  misc_feature: MA Experiment ID: 20000480 Result: Up-regulated in Transcription
  misc_feature: MA Experiment 20000480 PARAMETER Experiment Name: Zm_Drought_P Parameter: Age (day) Value: 11
  misc_feature: MA Experiment 20000480 PARAMETER Experiment Name: Zm_Drought_P Parameter: Organism Value: Zea mays
  misc_feature: MA Experiment 20000480 PARAMETER Experiment Name: Zm_Drought_P Parameter: Plant Line Value: 35A19
  misc_feature: MA Experiment 20000480 PARAMETER Experiment Name: Zm_Drought_P Parameter: Timepoint (hr) Value: 72
  misc_feature: MA Experiment 20000480 PARAMETER Experiment Name: Zm_Drought_P Parameter: Tissue Value: Aerial
  misc_feature: MA Experiment 20000480 PARAMETER Experiment Name: Zm_Drought_P Parameter: Treatment Value: Drought vs. No Drought
  misc_feature: MA Experiment ID: 20000534 Result: Down-regulated in Transcription
  misc_feature: MA Experiment 20000534 PARAMETER Experiment Name: Zm_Hybrid_Pollen_P Parameter: Age (day) Value: 8
  misc_feature: MA Experiment 20000534 PARAMETER Experiment Name: Zm_Hybrid_Pollen_P Parameter: Organism Value: Zea mays
  misc_feature: MA Experiment 20000534 PARAMETER Experiment Name: Zm_Hybrid_Pollen_P Parameter: Plant Line Value: 35A19
  misc_feature: MA Experiment 20000534 PARAMETER Experiment Name: Zm_Hybrid_Pollen_P Parameter: Tissue Value: Pollen vs. Aerial
  misc_feature: MA Experiment ID: 20000626 Result: Down-regulated in Transcription
  misc_feature: MA Experiment 20000626 PARAMETER Experiment Name: Zm_Herbicide-Treatments_P Parameter: Timepoint (hr) Value: 12
  misc_feature: MA Experiment 20000626 PARAMETER Experiment Name: Zm_Herbicide-Treatments_P Parameter: Tissue Value: Aerial
  misc_feature: MA Experiment 20000626 PARAMETER Experiment Name: Zm_Herbicide-Treatments_P Parameter: Treatment Value: Roundup vs. No Treatment
  misc_feature: MA Experiment ID: 20000629 Result: Down-regulated in Transcription
  misc_feature: MA Experiment 20000629 PARAMETER Experiment Name: Zm_Herbicide-Treatments_P Parameter: Timepoint (hr) Value: 12
  misc_feature: MA Experiment 20000629 PARAMETER Experiment Name: Zm_Herbicide-Treatments_P Parameter: Tissue Value: Aerial
  misc_feature: MA Experiment 20000629 PARAMETER Experiment Name: Zm_Herbicide-Treatments_P Parameter: Treatment Value: Trimec vs. No Treatment
accgcactccagcgttcagcattagacacgagagctcctagtagccagaccactagtcccgcgaccctgtcgagagaaacagacagagcaacatggcgcctgcattgtcattcccgatcatcgacatggggctgctcgccggggaggagaggccggcggcgatggagcggctgcaagatgcgtgcgagaactggggcttcttcgagattctgaaccacggcatctcgacggagctgatggacgaggtagagaagctgaccaaggagcactacaagcgggtgcgcgagcagaggttcctcgagttcgctagcaagacgctcggggacggccgcgtcaagatcccgatccagaaggacggcgagatccccatcccttacaagcccgacgtcgacgtggagaagatcaagttccaccacttctccttcgaggagaccaccgccacgctccacctcaagctcgagaacaagaacgacttcgacctcggcctcaacctgctcgagtacgagatgtggctcggcgacgacagcatcgcctccgccgagctcacgcagaccgccaagatcgagaagcaggggatcaccaggatgcaggtgccctttagcttcaggcccaaggacttcggatccgctgtctgggacatgatcagggggaggggcacgggatacaccatcaagggaaagatcgatgtcgacactcccttcggcaacatgaagctgcccataagcaaagagggtggaaccacccacctcaagaaggaggacgacgatgatgacgatgatgacaactgaaatgaggactgctggggggcgctgctgttacctttcacgaaacgcagtgaagcagaggatgcgggatcgtcgtcgtttgatctgatacccatacccttagcgctggttaatctcttgcctttagcttatggtgctctgttgttttgcattgtctgaacatcctctcacttcctgagtgtacgttcagtttgaggtttcctgtgttgtccgtctgaattccttcaaactttgcggttggaactggatgaagaataaaattccaacccgtcctggttcttttgtgggtctgtttggaatagatgctgcctgccaatggtcctgaaataagatttagtgaaaggctttattc

SEQ ID NO: 19346 - protein, 231 aa, Zea mays subsp. mays
  peptide (1)..(231): Ceres Seq. ID no. 12359167
  misc_feature (86)..(214): Pfam Name: Late embryogenesis abundant protein Pfam Description: Late embryogenesis abundant protein
  misc_feature (6)..(124): Homolog of NCBI NO: 398996 NR Description: 1-aminocyclopropane-1-carboxylate oxidase 1 (ACC
  misc_feature (6)..(76): Homolog of NCBI NO: 25452785 NR Description: 1-aminocyclopropane-1-carboxylate oxidase 2 (ACC
  misc_feature (6)..(79): Homolog of NCBI NO: 1771345 NR Description: 1-aminocyclopropane-1-carboxylate oxidase [Musa
  misc_feature (12)..(79): Homolog of NCBI NO: 2952326 NR Description: 1-aminocyclopropane-1-carboxylate oxidase [Oryza
  misc_feature (1)..(79): Homolog of NCBI NO: 12862572 NR Description: 1-aminocyclopropane-1-carboxylate oxidase
  misc_feature (1)..(79): Homolog of NCBI NO: 2492612 NR Description: 1-aminocyclopropane-1-carboxylate oxidase 1 (ACC
  misc_feature (79)..(229): Homolog of NCBI NO: 21592483 NR Description: similar to late embryogenesis abundant proteins
  misc_feature (79)..(230): Homolog of NCBI NO: 15224810 NR Description: similar to late embryogenesis abundant proteins
  misc_feature (79)..(231): Homolog of NCBI NO: 3264769 NR Description: late embryogenesis-like protein [Prunus armeniaca]
  misc_feature (79)..(230): Homolog of NCBI NO: 34394536 NR Description: late embryogenesis abundant proteins-like
MAPALSFPIIDMGLLAGEERPAAMERLQDACENWGFFEILNHGISTELMDEVEKLTKEHYKRVREQRFLEFASKTLGDGRVKIPIQKDGEIPIPYKPDVDVEKIKFHHFSFEETTATLHLKLENKNDFDLGLNLLEYEMWLGDDSIASAELTQTAKIEKQGITRMQVPFSFRPKDFGSAVWDMIRGRGTGYTIKGKIDVDTPFGNMKLPISKEGGTTHLKKEDDDDDDDDN

SEQ ID NO: 19347 - protein, 220 aa, Zea mays subsp. mays
  peptide (1)..(220): Ceres Seq. ID no. 12359168
  misc_feature (75)..(203): Pfam Name: Late embryogenesis abundant protein Pfam Description: Late embryogenesis abundant protein
  misc_feature (1)..(113): Homolog of NCBI NO: 398996 NR Description: 1-aminocyclopropane-1-carboxylate oxidase 1 (ACC
  misc_feature (1)..(65): Homolog of NCBI NO: 25452785 NR Description: 1-aminocyclopropane-1-carboxylate oxidase 2 (ACC
  misc_feature (1)..(68): Homolog of NCBI NO: 1771345 NR Description: 1-aminocyclopropane-1-carboxylate oxidase [Musa
  misc_feature (1)..(68): Homolog of NCBI NO: 2952326 NR Description: 1-aminocyclopropane-1-carboxylate oxidase [Oryza
  misc_feature (1)..(68): Homolog of NCBI NO: 12862572 NR Description: 1-aminocyclopropane-1-carboxylate oxidase
  misc_feature (1)..(68): Homolog of NCBI NO: 2492612 NR Description: 1-aminocyclopropane-1-carboxylate oxidase 1 (ACC
  misc_feature (68)..(218): Homolog of NCBI NO: 21592483 NR Description: similar to late embryogenesis abundant proteins
  misc_feature (68)..(219): Homolog of NCBI NO: 15224810 NR Description: similar to late embryogenesis abundant proteins
  misc_feature (68)..(220): Homolog of NCBI NO: 3264769 NR Description: late embryogenesis-like protein [Prunus armeniaca]
  misc_feature (68)..(219): Homolog of NCBI NO: 34394536 NR Description: late embryogenesis abundant proteins-like
MGLLAGEERPAAMERLQDACENWGFFEILNHGISTELMDEVEKLTKEHYKRVREQRFLEFASKTLGDGRVKIPIQKDGEIPIPYKPDVDVEKIKFHHFSFEETTATLHLKLENKNDFDLGLNLLEYEMWLGDDSIASAELTQTAKIEKQGITRMQVPFSFRPKDFGSAVWDMIRGRGTGYTIKGKIDVDTPFGNMKLPISKEGGTTHLKKEDDDDDDDDN

SEQ ID NO: 19348 - protein, 208 aa, Zea mays subsp. mays
  peptide (1)..(208): Ceres Seq. ID no. 12359169
  misc_feature (63)..(191): Pfam Name: Late embryogenesis abundant protein Pfam Description: Late embryogenesis abundant protein
  misc_feature (1)..(101): Homolog of NCBI NO: 398996 NR Description: 1-aminocyclopropane-1-carboxylate oxidase 1 (ACC
  misc_feature (1)..(53): Homolog of NCBI NO: 25452785 NR Description: 1-aminocyclopropane-1-carboxylate oxidase 2 (ACC
  misc_feature (1)..(56): Homolog of NCBI NO: 1771345 NR Description: 1-aminocyclopropane-1-carboxylate oxidase [Musa
  misc_feature (1)..(56): Homolog of NCBI NO: 2952326 NR Description: 1-aminocyclopropane-1-carboxylate oxidase [Oryza
  misc_feature (1)..(56): Homolog of NCBI NO: 12862572 NR Description: 1-aminocyclopropane-1-carboxylate oxidase
  misc_feature (1)..(56): Homolog of NCBI NO: 2492612 NR Description: 1-aminocyclopropane-1-carboxylate oxidase 1 (ACC
  misc_feature (56)..(206): Homolog of NCBI NO: 21592483 NR Description: similar to late embryogenesis abundant proteins
  misc_feature (56)..(207): Homolog of NCBI NO: 15224810 NR Description: similar to late embryogenesis abundant proteins
  misc_feature (56)..(208): Homolog of NCBI NO: 3264769 NR Description: late embryogenesis-like protein [Prunus armeniaca]
  misc_feature (56)..(207): Homolog of NCBI NO: 34394536 NR Description: late embryogenesis abundant proteins-like
MERLQDACENWGFFEILNHGISTELMDEVEKLTKEHYKRVREQRFLEFASKTLGDGRVKIPIQKDGEIPIPYKPDVDVEKIKFHHFSFEETTATLHLKLENKNDFDLGLNLLEYEMWLGDDSIASAELTQTAKIEKQGITRMQVPFSFRPKDFGSAVWDMIRGRGTGYTIKGKIDVDTPFGNMKLPISKEGGTTHLKKEDDDDDDDDN

SEQ ID NO: 19349 - DNA, 1467 bp, Zea mays subsp. mays; identical to SEQ ID NO: 13564
  misc_feature (1)..(1467): Ceres Seq. ID no. 12368243
  misc_feature: MA Experiment ID: 20000492 Result: Down-regulated in Transcription
  misc_feature: MA Experiment 20000492 PARAMETER Experiment Name: Zm_Hybrid_Seed_Dev_P Parameter: DAP Value: 12
  misc_feature: MA Experiment 20000492 PARAMETER Experiment Name: Zm_Hybrid_Seed_Dev_P Parameter: Organism Value: Zea mays
  misc_feature: MA Experiment 20000492 PARAMETER Experiment Name: Zm_Hybrid_Seed_Dev_P Parameter: Plant Line Value: 35A19
  misc_feature: MA Experiment 20000492 PARAMETER Experiment Name: Zm_Hybrid_Seed_Dev_P Parameter: Tissue Value: Fert Kernel vs. Unfert Floret

SEQ ID NO: 19350 - protein, 242 aa, Zea mays subsp. mays; identical to SEQ ID NO: 13565
  peptide (1)..(242): Ceres Seq. ID no. 12368244
  misc_feature (1)..(242): Pfam Name: Class-II DAHP synthetase family Pfam Description: Class-II DAHP synthetase family
  misc_feature (1)..(242): Homolog of NCBI NO: 34906844 NR Description: putative phospho-2-dehydro-3-deoxyheptonate
  misc_feature (1)..(242): Homolog of NCBI NO: 2398679 NR Description: 3-deoxy-D-arabino-heptulosonate 7-phosphate
  misc_feature (1)..(242): Homolog of NCBI NO: 2546988 NR Description: 2-dehydro-3-deoxyphosphoheptonate aldolase;
  misc_feature (1)..(242): Homolog of NCBI NO: 15219878 NR Description: 3-deoxy-D-arabino-heptulosonate 7-phosphate, protein id: At1g22410.1 [Arabidopsis thaliana]
  misc_feature (1)..(242): Homolog of NCBI NO: 7488957 NR Description: probable 2-dehydro-3-deoxy-phosphoheptonate
  misc_feature (1)..(242): Homolog of NCBI NO: 584777 NR Description: Phospho-2-dehydro-3-deoxyheptonate aldolase 1,
  misc_feature (1)..(242): Homolog of NCBI NO: 24745903 NR Description: 3-deoxy-D-arabino-heptulosonate 7-phosphate
  misc_feature (1)..(242): Homolog of NCBI NO: 2398681 NR Description: 3-deoxy-D-arabino-heptulosonate 7-phosphate
  misc_feature (1)..(242): Homolog of NCBI NO: 584778 NR Description: Phospho-2-dehydro-3-deoxyheptonate aldolase 2,
  misc_feature (1)..(242): Homolog of NCBI NO: 114193 NR Description: Phospho-2-dehydro-3-deoxyheptonate aldolase 1,

SEQ ID NO: 19351 - protein, 217 aa, Zea mays subsp. mays; identical to SEQ ID NO: 13566
  peptide (1)..(217): Ceres Seq. ID no. 12368245
  misc_feature (1)..(217): Pfam Name: Class-II DAHP synthetase family Pfam Description: Class-II DAHP synthetase family
  misc_feature (1)..(217): Homolog of NCBI NO: 34906844 NR Description: putative phospho-2-dehydro-3-deoxyheptonate
  misc_feature (1)..(217): Homolog of NCBI NO: 2398679 NR Description: 3-deoxy-D-arabino-heptulosonate 7-phosphate
  misc_feature (1)..(217): Homolog of NCBI NO: 2546988 NR Description: 2-dehydro-3-deoxyphosphoheptonate aldolase;
  misc_feature (1)..(217): Homolog of NCBI NO: 15219878 NR Description: 3-deoxy-D-arabino-heptulosonate 7-phosphate, protein id: At1g22410.1 [Arabidopsis thaliana]
  misc_feature (1)..(217): Homolog of NCBI NO: 7488957 NR Description: probable 2-dehydro-3-deoxy-phosphoheptonate
  misc_feature (1)..(217): Homolog of NCBI NO: 584777 NR Description: Phospho-2-dehydro-3-deoxyheptonate aldolase 1,
  misc_feature (1)..(217): Homolog of NCBI NO: 24745903 NR Description: 3-deoxy-D-arabino-heptulosonate 7-phosphate
  misc_feature (1)..(217): Homolog of NCBI NO: 2398681 NR Description: 3-deoxy-D-arabino-heptulosonate 7-phosphate
  misc_feature (1)..(217): Homolog of NCBI NO: 584778 NR Description: Phospho-2-dehydro-3-deoxyheptonate aldolase 2,
  misc_feature (1)..(217): Homolog of NCBI NO: 114193 NR Description: Phospho-2-dehydro-3-deoxyheptonate aldolase 1,

SEQ ID NO: 19352 - protein, 206 aa, Zea mays subsp. mays; identical to SEQ ID NO: 13567
  peptide (1)..(206): Ceres Seq. ID no. 12368246
  misc_feature (1)..(206): Pfam Name: Class-II DAHP synthetase family Pfam Description: Class-II DAHP synthetase family
  misc_feature (1)..(206): Homolog of NCBI NO: 34906844 NR Description: putative phospho-2-dehydro-3-deoxyheptonate
  misc_feature (1)..(206): Homolog of NCBI NO: 2398679 NR Description: 3-deoxy-D-arabino-heptulosonate 7-phosphate
  misc_feature (1)..(206): Homolog of NCBI NO: 2546988 NR Description: 2-dehydro-3-deoxyphosphoheptonate aldolase;
  misc_feature (1)..(206): Homolog of NCBI NO: 15219878 NR Description: 3-deoxy-D-arabino-heptulosonate 7-phosphate, protein id: At1g22410.1 [Arabidopsis thaliana]
  misc_feature (1)..(206): Homolog of NCBI NO: 7488957 NR Description: probable 2-dehydro-3-deoxy-phosphoheptonate
  misc_feature (1)..(206): Homolog of NCBI NO: 584777 NR Description: Phospho-2-dehydro-3-deoxyheptonate aldolase 1,
  misc_feature (1)..(206): Homolog of NCBI NO: 24745903 NR Description: 3-deoxy-D-arabino-heptulosonate 7-phosphate
  misc_feature (1)..(206): Homolog of NCBI NO: 2398681 NR Description: 3-deoxy-D-arabino-heptulosonate 7-phosphate
  misc_feature (1)..(206): Homolog of NCBI NO: 584778 NR Description: Phospho-2-dehydro-3-deoxyheptonate aldolase 2,
  misc_feature (1)..(206): Homolog of NCBI NO: 114193 NR Description: Phospho-2-dehydro-3-deoxyheptonate aldolase 1,

SEQ ID NO: 19353 - DNA, 993 bp, Zea mays subsp. mays
  misc_feature (1)..(993): Ceres Seq. ID no. 12364374
  misc_feature: MA Experiment ID: 108522 Result: Up-regulated in Transcription
  misc_feature: MA Experiment 108522 PARAMETER Experiment Name: Zm_42deg_Heat_P Parameter: Age (day) Value: 8
  misc_feature: MA Experiment 108522 PARAMETER Experiment Name: Zm_42deg_Heat_P Parameter: Organism Value: Zea mays
  misc_feature: MA Experiment 108522 PARAMETER Experiment Name: Zm_42deg_Heat_P Parameter: Plant Line Value: 35A19
  misc_feature: MA Experiment 108522 PARAMETER Experiment Name: Zm_42deg_Heat_P Parameter: Temperature (deg C) Value: 42 vs. 22
  misc_feature: MA Experiment 108522 PARAMETER Experiment Name: Zm_42deg_Heat_P Parameter: Timepoint (hr) Value: 1
  misc_feature: MA Experiment 108522 PARAMETER Experiment Name: Zm_42deg_Heat_P Parameter: Tissue Value: Aerial
  misc_feature: MA Experiment ID: 108543 Result: Up-regulated in Transcription
gcacgagaccattacctagaacatcctaatcaaaaaacaggagctagataatctagcgaggttgccagagctccagtacctcacgctatatggtctcagctggcctccaaggtatactgttggcccagacgacttcaggaatctgaggttctgcgaagtgggcacaacgttcgagtttcgtaagggcgccatgccaaggcttgaagtgctgcaatttggagtttatgcagggtactggagttgggtatgcaatggtatgccgttcgagcagttcccaacgaaggatgtgatcgaagatcttgacttggacctggataacgtccttttacttcagcaagtaatagtcaaagtcaactgctcaggtgctactgccgcacaagtggatgaggtggaggccgtggtcatgcgtgccgtggaaaatcatgccaaccgtccaaccataaaaatggatcgagaatatgaagaaaatatcttatctgatgaaaagtgggagactctgcttcggcgacacattgaaaaggattgctgcgtgcgcatgatgaaggataaatctgatgctttcttcctcagccagctgcggtcgtatcgatatcttcaggaagccattattttcatcgactgttcgggtgccagcatgtgtgaggtgcagaaagtggaagcagcttatagacatgcagccgaggttcatcctaaccatccaagtattgaacttatcagaacaaacaccgacggaatggcctcctcctcatccgaccatcccaacacagagcccaggaattgatgactcggtttgttagatccttccaacccagcagcaggtaaatgtgagttgcttaagtaccaaagagagaggtcctgttcagctagatgattagaagcattggcatggcttgttaattacattcgtggttcttagtctaaaatcacattgaagagggagacggacccaagtgatgcagttcatgtgttatctgtatcaatctctatttttat

SEQ ID NO: 19354 - protein, 196 aa, Zea mays subsp. mays
  peptide (1)..(196): Ceres Seq. ID no. 12364375
  misc_feature (1)..(182): Homolog of NCBI NO: 40253772 NR Description: putative RGH1A [Oryza sativa (japonica
MPRLEVLQFGVYAGYWSWVCNGMPFEQFPTKDVIEDLDLDLDNVLLLQQVIVKVNCSGATAAQVDEVEAVVMRAVENHANRPTIKMDREYEENILSDEKWETLLRRHIEKDCCVRMMKDKSDAFFLSQLRSYRYLQEAIIFIDCSGASMCEVQKVEAAYRHAAEVHPNHPSIELIRTNTDGMASSSSDHPNTEPRN

SEQ ID NO: 19355 - protein, 174 aa, Zea mays subsp. mays
  peptide (1)..(174): Ceres Seq. ID no. 12364376
  misc_feature (1)..(160): Homolog of NCBI NO: 40253772 NR Description: putative RGH1A [Oryza sativa (japonica
MPFEQFPTKDVIEDLDLDLDNVLLLQQVIVKVNCSGATAAQVDEVEAVVMRAVENHANRPTIKMDREYEENILSDEKWETLLRRHIEKDCCVRMMKDKSDAFFLSQLRSYRYLQEAIIFIDCSGASMCEVQKVEAAYRHAAEVHPNHPSIELIRTNTDGMASSSSDHPNTEPRN

SEQ ID NO: 19356 - protein, 125 aa, Zea mays subsp. mays
  peptide (1)..(125): Ceres Seq. ID no. 12364377
  misc_feature (1)..(111): Homolog of NCBI NO: 40253772 NR Description: putative RGH1A [Oryza sativa (japonica
MRAVENHANRPTIKMDREYEENILSDEKWETLLRRHIEKDCCVRMMKDKSDAFFLSQLRSYRYLQEAIIFIDCSGASMCEVQKVEAAYRHAAEVHPNHPSIELIRTNTDGMASSSSDHPNTEPRN

SEQ ID NO: 19357 - DNA, 1375 bp, Zea mays subsp. mays
  misc_feature (1)..(1375): Ceres Seq. ID no. 12375696
  misc_feature: MA Experiment ID: 108504 Result: Up-regulated in Transcription
  misc_feature: MA Experiment 108504 PARAMETER Experiment Name: Zm_Drought_P Parameter: Age (day) Value: 8
  misc_feature: MA Experiment 108504 PARAMETER Experiment Name: Zm_Drought_P Parameter: Organism Value: Zea mays
  misc_feature: MA Experiment 108504 PARAMETER Experiment Name: Zm_Drought_P Parameter: Plant Line Value: 35A19
  misc_feature: MA Experiment 108504 PARAMETER Experiment Name: Zm_Drought_P Parameter: Timepoint (hr) Value: 12
  misc_feature: MA Experiment 108504 PARAMETER Experiment Name: Zm_Drought_P Parameter: Tissue Value: Aerial
  misc_feature: MA Experiment 108504 PARAMETER Experiment Name: Zm_Drought_P Parameter: Treatment Value: Drought vs. No Drought
  misc_feature: MA Experiment ID: 108515 Result: Up-regulated in Transcription
  misc_feature: MA Experiment 108515 PARAMETER Experiment Name: Zm_2mM_SA_P Parameter: Age (day) Value: 8
  misc_feature: MA Experiment 108515 PARAMETER Experiment Name: Zm_2mM_SA_P Parameter: Organism Value: Zea mays
  misc_feature: MA Experiment 108515 PARAMETER Experiment Name: Zm_2mM_SA_P Parameter: Plant Line Value: 35A19
  misc_feature: MA Experiment 108515 PARAMETER Experiment Name: Zm_2mM_SA_P Parameter: Timepoint (hr) Value: 12
  misc_feature: MA Experiment 108515 PARAMETER Experiment Name: Zm_2mM_SA_P Parameter: Tissue Value: Aerial
  misc_feature: MA Experiment 108515 PARAMETER Experiment Name: Zm_2mM_SA_P Parameter: Treatment Value: 2mM SA vs. No Treatment
  misc_feature: MA Experiment ID: 108522 Result: Up-regulated in Transcription
  misc_feature: MA Experiment 108522 PARAMETER Experiment Name: Zm_42deg_Heat_P Parameter: Age (day) Value: 8
  misc_feature: MA Experiment 108522 PARAMETER Experiment Name: Zm_42deg_Heat_P Parameter: Organism Value: Zea mays
  misc_feature: MA Experiment 108522 PARAMETER Experiment Name: Zm_42deg_Heat_P Parameter: Plant Line Value: 35A19
  misc_feature: MA Experiment 108522 PARAMETER Experiment Name: Zm_42deg_Heat_P Parameter: Temperature (deg C) Value: 42 vs. 22
  misc_feature: MA Experiment 108522 PARAMETER Experiment Name: Zm_42deg_Heat_P Parameter: Timepoint (hr) Value: 1
  misc_feature: MA Experiment 108522 PARAMETER Experiment Name: Zm_42deg_Heat_P Parameter: Tissue Value: Aerial
  misc_feature: MA Experiment ID: 108523 Result: Up-regulated in Transcription
  misc_feature: MA Experiment 108523 PARAMETER Experiment Name: Zm_42deg_Heat_P Parameter: Age (day) Value: 8
  misc_feature: MA Experiment 108523 PARAMETER Experiment Name: Zm_42deg_Heat_P Parameter: Organism Value: Zea mays
  misc_feature: MA Experiment 108523 PARAMETER Experiment Name: Zm_42deg_Heat_P Parameter: Plant Line Value: 35A19
  misc_feature: MA Experiment 108523 PARAMETER Experiment Name: Zm_42deg_Heat_P Parameter: Temperature (deg C) Value: 42 vs. 22
  misc_feature: MA Experiment 108523 PARAMETER Experiment Name: Zm_42deg_Heat_P Parameter: Timepoint (hr) Value: 6
  misc_feature: MA Experiment 108523 PARAMETER Experiment Name: Zm_42deg_Heat_P Parameter: Tissue Value: Aerial
  misc_feature: MA Experiment ID: 108526 Result: Up-regulated in Transcription
  misc_feature: MA Experiment 108526 PARAMETER Experiment Name: Zm_5mM_NO_P Parameter: Age (day) Value: 8
  misc_feature: MA Experiment 108526 PARAMETER Experiment Name: Zm_5mM_NO_P Parameter: Organism Value: Zea mays
  misc_feature: MA Experiment 108526 PARAMETER Experiment Name: Zm_5mM_NO_P Parameter: Plant Line Value: 35A19
  misc_feature: MA Experiment 108526 PARAMETER Experiment Name: Zm_5mM_NO_P Parameter: Timepoint (hr) Value: 1
  misc_feature: MA Experiment 108526 PARAMETER Experiment Name: Zm_5mM_NO_P Parameter: Tissue Value: Aerial
  misc_feature: MA Experiment 108526 PARAMETER Experiment Name: Zm_5mM_NO_P Parameter: Treatment Value: 5mM NO vs. No Treatment
  misc_feature: MA Experiment ID: 108527 Result: Up-regulated in Transcription
  misc_feature: MA Experiment 108527 PARAMETER Experiment Name: Zm_5mM_NO_P Parameter: Age (day) Value: 8
  misc_feature: MA Experiment 108527 PARAMETER Experiment Name: Zm_5mM_NO_P Parameter: Organism Value: Zea mays
  misc_feature: MA Experiment 108527 PARAMETER Experiment Name: Zm_5mM_NO_P Parameter: Plant Line Value: 35A19
  misc_feature: MA Experiment 108527 PARAMETER Experiment Name: Zm_5mM_NO_P Parameter: Timepoint (hr) Value: 6
  misc_feature: MA Experiment 108527 PARAMETER Experiment Name: Zm_5mM_NO_P Parameter: Tissue Value: Aerial
  misc_feature: MA Experiment 108527 PARAMETER Experiment Name: Zm_5mM_NO_P Parameter: Treatment Value: 5mM NO vs. No Treatment
  misc_feature: MA Experiment ID: 108529 Result: Up-regulated in Transcription
  misc_feature: MA Experiment 108529 PARAMETER Experiment Name: Zm_Imbibed_Seeds_P Parameter: Age (day) Value: 5 vs. 2
  misc_feature: MA Experiment 108529 PARAMETER Experiment Name: Zm_Imbibed_Seeds_P Parameter: Organism Value: Zea mays
  misc_feature: MA Experiment 108529 PARAMETER Experiment Name: Zm_Imbibed_Seeds_P Parameter: Plant Line Value: 35A19
  misc_feature: MA Experiment 108529 PARAMETER Experiment Name: Zm_Imbibed_Seeds_P Parameter: Tissue Value: Roots vs. Embryo
  misc_feature: MA Experiment ID: 108530 Result: Up-regulated in Transcription
  misc_feature: MA Experiment 108530 PARAMETER Experiment Name: Zm_Imbibed_Seeds_P Parameter: Age (day) Value: 6 vs. 2
  misc_feature: MA Experiment 108530 PARAMETER Experiment Name: Zm_Imbibed_Seeds_P Parameter: Organism Value: Zea mays
  misc_feature: MA Experiment 108530 PARAMETER Experiment Name: Zm_Imbibed_Seeds_P Parameter: Plant Line Value: 35A19
  misc_feature: MA Experiment 108530 PARAMETER Experiment Name: Zm_Imbibed_Seeds_P Parameter: Tissue Value: Aerial vs. Embryo
  misc_feature: MA Experiment ID: 108534 Result: Up-regulated in Transcription
  misc_feature: MA Experiment 108534 PARAMETER Experiment Name: Zm_4deg_Cold_P Parameter: Age (hr) Value: 8
  misc_feature: MA Experiment 108534 PARAMETER Experiment Name: Zm_4deg_Cold_P Parameter: Organism Value: Zea mays
  misc_feature: MA Experiment 108534 PARAMETER Experiment Name: Zm_4deg_Cold_P Parameter: Plant Line Value: 35A19
  misc_feature: MA Experiment 108534 PARAMETER Experiment Name: Zm_4deg_Cold_P Parameter: Temperature (deg C) Value: 4 vs. 22
  misc_feature: MA Experiment 108534 PARAMETER Experiment Name: Zm_4deg_Cold_P Parameter: Timepoint (hr) Value: 6
  misc_feature: MA Experiment 108534 PARAMETER Experiment Name: Zm_4deg_Cold_P Parameter: Tissue Value: Aerial
  misc_feature: MA Experiment ID: 108559 Result: Up-regulated in Transcription
  misc_feature: MA Experiment 108559 PARAMETER Experiment Name: Zm_5mM_NO_P Parameter: Age (day) Value: 8
  misc_feature: MA Experiment 108559 PARAMETER Experiment Name: Zm_5mM_NO_P Parameter: Organism Value: Zea mays
  misc_feature: MA Experiment 108559 PARAMETER Experiment Name: Zm_5mM_NO_P Parameter: Plant Line Value: 35A19
  misc_feature: MA Experiment 108559 PARAMETER Experiment Name: Zm_5mM_NO_P Parameter: Timepoint (hr) Value: 12
  misc_feature: MA Experiment 108559 PARAMETER Experiment Name: Zm_5mM_NO_P Parameter: Tissue Value: Aerial
  misc_feature: MA Experiment 108559 PARAMETER Experiment Name: Zm_5mM_NO_P Parameter: Treatment Value: 5mM NO vs. No Treatment
  misc_feature: MA Experiment ID: 108688 Result: Down-regulated in Transcription
  misc_feature: MA Experiment 108688 PARAMETER Experiment Name: Zm_Embryos-Flowers__P Parameter: Tissue Value: Immature Flowers vs. Aerial+
  misc_feature: MA Experiment ID: 20000108 Result: Down-regulated in Transcription
  misc_feature: MA Experiment 20000108 PARAMETER Experiment Name: Zm_Root-Tips_P Parameter: Age (day) Value: 12
  misc_feature: MA Experiment 20000108 PARAMETER Experiment Name: Zm_Root-Tips_P Parameter: Organism Value: Zea mays
  misc_feature: MA Experiment 20000108 PARAMETER Experiment Name: Zm_Root-Tips_P Parameter: Tissue Value: Root tips vs. Root mid region    35
  misc_feature: MA Experiment 20000108 PARAMETER Experiment Name: Zm_Root-Tips_P Parameter: Tissue Value: Root tips vs. Root mid region   Sequence Listing-Misc Features (4)
  misc_feature: MA Experiment ID: 20000478 Result: Up-regulated in Transcription
  misc_feature: MA Experiment 20000478 PARAMETER Experiment Name: Zm_5mM_SA_P Parameter: Age (day) Value: 11
  misc_feature: MA Experiment 20000478 PARAMETER Experiment Name: Zm_5mM_SA_P Parameter: Organism Value: Zea mays
  misc_feature: MA Experiment 20000478 PARAMETER Experiment Name: Zm_5mM_SA_P Parameter: Plant Line Value: 35A19
  misc_feature: MA Experiment 20000478 PARAMETER Experiment Name: Zm_5mM_SA_P Parameter: Timepoint (hr) Value: 72
  misc_feature: MA Experiment 20000478 PARAMETER Experiment Name: Zm_5mM_SA_P Parameter: Tissue Value: Aerial
  misc_feature: MA Experiment 20000478 PARAMETER Experiment Name: Zm_5mM_SA_P Parameter: Treatment Value: 5mM SA vs. No Treatment
  misc_feature: MA Experiment ID: 20000532 Result: Up-regulated in Transcription
  misc_feature: MA Experiment 20000532 PARAMETER Experiment Name: Zm_0.001percent_MeJA_P Parameter: Age (day) Value: 10
  misc_feature: MA Experiment 20000532 PARAMETER Experiment Name: Zm_0.001percent_MeJA_P Parameter: Organism Value: Zea mays
  misc_feature: MA Experiment 20000532 PARAMETER Experiment Name: Zm_0.001percent_MeJA_P Parameter: Plant Line Value: 35A19
  misc_feature: MA Experiment 20000532 PARAMETER Experiment Name: Zm_0.001percent_MeJA_P Parameter: Timepoint (hr) Value: 48
  misc_feature: MA Experiment 20000532 PARAMETER Experiment Name: Zm_0.001percent_MeJA_P Parameter: Tissue Value: Aerial
  misc_feature: MA Experiment 20000532 PARAMETER Experiment Name: Zm_0.001percent_MeJA_P Parameter: Treatment Value: 0.001percent MeJA vs. No Treatment
  misc_feature: MA Experiment ID: 20000533 Result: Up-regulated in Transcription
  misc_feature: MA Experiment 20000533 PARAMETER Experiment Name: Zm_0.001percent_MeJA_P Parameter: Age (day) Value: 11
  misc_feature: MA Experiment 20000533 PARAMETER Experiment Name: Zm_0.001percent_MeJA_P Parameter: Organism Value: Zea mays
  misc_feature: MA Experiment 20000533 PARAMETER Experiment Name: Zm_0.001percent_MeJA_P Parameter: Plant Line Value: 35A19
  misc_feature: MA Experiment 20000533 PARAMETER Experiment Name: Zm_0.001percent_MeJA_P Parameter: Timepoint (hr) Value: 72
  misc_feature: MA Experiment 20000533 PARAMETER Experiment Name: Zm_0.001percent_MeJA_P Parameter: Tissue Value: Aerial
  misc_feature: MA Experiment 20000533 PARAMETER Experiment Name: Zm_0.001percent_MeJA_P Parameter: Treatment Value: 0.001percent MeJA vs. No Treatment
  misc_feature: MA Experiment ID: 20000535 Result: Down-regulated in Transcription
  misc_feature: MA Experiment 20000535 PARAMETER Experiment Name: Zm_Hybrid_Seed_Dev_P Parameter: DAP Value: 30 vs. 12
  misc_feature: MA Experiment 20000535 PARAMETER Experiment Name: Zm_Hybrid_Seed_Dev_P Parameter: Organism Value: Zea mays
  misc_feature: MA Experiment 20000535 PARAMETER Experiment Name: Zm_Hybrid_Seed_Dev_P Parameter: Plant Line Value: 35A19
  misc_feature: MA Experiment 20000535 PARAMETER Experiment Name: Zm_Hybrid_Seed_Dev_P Parameter: Tissue Value: Embryo vs. Unfert Floret
  misc_feature: MA Experiment ID: 20001608 Result: Down-regulated in Transcription
  misc_feature: MA Experiment 20001608 PARAMETER Experiment Name: Zm_50ppm_KNO3_L-to-H_P Parameter: Age (day) Value: 21
  misc_feature: MA Experiment 20001608 PARAMETER Experiment Name: Zm_50ppm_KNO3_L-to-H_P Parameter: Organism Value: Zea mays
  misc_feature: MA Experiment 20001608 PARAMETER Experiment Name: Zm_50ppm_KNO3_L-to-H_P Parameter: Plant Line Value: 35A19
  misc_feature: MA Experiment 20001608 PARAMETER Experiment Name: Zm_50ppm_KNO3_L-to-H_P Parameter: Timepoint (hr) Value: 48
  misc_feature: MA Experiment 20001608 PARAMETER Experiment Name: Zm_50ppm_KNO3_L-to-H_P Parameter: Tissue Value: Shoots
  misc_feature: MA Experiment 20001608 PARAMETER Experiment Name: Zm_50ppm_KNO3_L-to-H_P Parameter: Treatment Value: 50ppm KNO3 vs. 50ppm KCl
gcacgagaccattacctagaacatcctaatcgaaaagccgttcaactcgatcacttctttcccttccacacaggcacacaggcacacagcacacagctcactcaactcccctcccgcttcgtcagctcaccatcataaaccaaacagagagctctctccctctcggtcgttccattccaggatgctgcttaacccggcgtccatgctggacaccatccggcagcacctcctggaggagccaccagcggcggccgacgagagcttcgggatcctggtggcggaccagtggagcgactcgctcccgttccgcaccgacgacgccgacgacatggtggtgttcggggcgctgcaggacgccttcgcctacggctggctacccgacggctccttcgcgcacgtgaagcccgagccggtgcggtcccccgactcctcctactactcctacgacggctcctgcttcggcggcctcccgtacccggagcagccactgacgcccggcagcgagggcgaggcggccgccacgcccagccccaggagggaggaggccgcggcggccgtggccaggggcaagcactacaggggcgtcaggcagcgcccgtggggcaagttcgcggcggagatcagggacccggccaagaacggcgcgcgcgtctggctcggcacctacgacaccgccgaggacgccgcgctcgcctacgaccgcgccgcctaccgcatgcgcggctcgcgcgcgctcctcaacttcccgctccgcatcgcctccgagatcgccgccgcggccgccggcgacaagcggccgttggcgttgcccgagcccgccacctcctcggactcgtnctccaccggcggctcgcccaagaggcggaagcgaggcgaagccgccgccgccaacatggccatggcgctggtgcccccgccttcccagcttagccggccggcccagccatggttccctgccgccgcgccggtcgagcaggcggcgatgccgccgcgcgtggagcagctcgtcatctagctagccccgcgcgttaaaccggactcgcggcgagacaatgaggcgtgcaagtgcaacgacgggtgagccggcggaaggcggaggaaaacaggacgaggcccttgcgcgaatgcgacggcgcgcggaatgcgataagctcgggagcaattgggggtccggatgccgctgttgctccgtgcaactcgcgcaagtggaaagaagctgtctgtgtgtagattcatccaagtgtcttgtctgcaaacggattttcggtatatgcgtccttgtcacctgtcagggtggtgtggtgtgagggcttgggcttgtgctgctgataagtttggagatctgtacaaagaaaaaacgtagggagaagatgag

SEQ ID NO: 19358 - protein, 277 aa, Zea mays subsp. mays
  peptide (1)..(277): Ceres Seq. ID no. 12375697
  misc_feature (129)..(194): Pfam Name: AP2 domain Pfam Description: AP2 domain
  misc_feature (20)..(84): Homolog of NCBI NO: 7489077 NR Description: transcription factor Pti4 - tomato (fragment)
  misc_feature (108)..(230): Homolog of NCBI NO: 7489077 NR Description: transcription factor Pti4 - tomato (fragment)
  misc_feature (18)..(77): Homolog of NCBI NO: 28274828 NR Description: ethylene response factor 1 [Lycopersicon
  misc_feature (100)..(234): Homolog of NCBI NO: 28274828 NR Description: ethylene response factor 1 [Lycopersicon
  misc_feature (32)..(77): Homolog of NCBI NO: 8809571 NR Description: ethylene-responsive element binding factor
  misc_feature (99)..(234): Homolog of NCBI NO: 8809571 NR Description: ethylene-responsive element binding factor
  misc_feature (14)..(77): Homolog of NCBI NO: 7489113 NR Description: DNA binding protein EREBP-2 - common tobacco
  misc_feature (99)..(234): Homolog of NCBI NO: 7489113 NR Description: DNA binding protein EREBP-2 - common tobacco
  misc_feature (9)..(276): Homolog of NCBI NO: 14140141 NR Description: putative AP2-related transcription factor [Oryza
  misc_feature (1)..(224): Homolog of NCBI NO: 38346167 NR Description: OSJNBa0079A21.14 [Oryza sativa (japonica
  misc_feature (219)..(219): Xaa is any aa, unknown or other
MLLNPASMLDTIRQHLLEEPPAAADESFGILVADQWSDSLPFRTDDADDMVVFGALQDAFAYGWLPDGSFAHVKPEPVRSPDSSYYSYDGSCFGGLPYPEQPLTPGSEGEAAATPSPRREEAAAAVARGKHYRGVRQRPWGKFAAEIRDPAKNGARVWLGTYDTAEDAALAYDRAAYRMRGSRALLNFPLRIASEIAAAAAGDKRPLALPEPATSSDSXSTGGSPKRRKRGEAAAANMAMALVPPPSQLSRPAQPWFPAAAPVEQAAMPPRVEQLVI

SEQ ID NO: 19359 - protein, 270 aa, Zea mays subsp. mays
  peptide (1)..(270): Ceres Seq. ID no. 12375698
  misc_feature (122)..(187): Pfam Name: AP2 domain Pfam Description: AP2 domain
  misc_feature (13)..(77): Homolog of NCBI NO: 7489077 NR Description: transcription factor Pti4 - tomato (fragment)
  misc_feature (101)..(223): Homolog of NCBI NO: 7489077 NR Description: transcription factor Pti4 - tomato (fragment)
  misc_feature (11)..(70): Homolog of NCBI NO: 28274828 NR Description: ethylene response factor 1 [Lycopersicon
  misc_feature (93)..(227): Homolog of NCBI NO: 28274828 NR Description: ethylene response factor 1 [Lycopersicon
  misc_feature (25)..(70): Homolog of NCBI NO: 8809571 NR Description: ethylene-responsive element binding factor
  misc_feature (92)..(227): Homolog of NCBI NO: 8809571 NR Description: ethylene-responsive element binding factor
  misc_feature (7)..(70): Homolog of NCBI NO: 7489113 NR Description: DNA binding protein EREBP-2 - common tobacco
  misc_feature (92)..(227): Homolog of NCBI NO: 7489113 NR Description: DNA binding protein EREBP-2 - common tobacco
  misc_feature (2)..(269): Homolog of NCBI NO: 14140141 NR Description: putative AP2-related transcription factor [Oryza
  misc_feature (1)..(217): Homolog of NCBI NO: 38346167 NR Description: OSJNBa0079A21.14 [Oryza sativa (japonica
  misc_feature (212)..(212): Xaa is any aa, unknown or other
MLDTIRQHLLEEPPAAADESFGILVADQWSDSLPFRTDDADDMVVFGALQDAFAYGWLPDGSFAHVKPEPVRSPDSSYYSYDGSCFGGLPYPEQPLTPGSEGEAAATPSPRREEAAAAVARGKHYRGVRQRPWGKFAAEIRDPAKNGARVWLGTYDTAEDAALAYDRAAYRMRGSRALLNFPLRIASEIAAAAAGDKRPLALPEPATSSDSXSTGGSPKRRKRGEAAAANMAMALVPPPSQLSRPAQPWFPAAAPVEQAAMPPRVEQLVI

SEQ ID NO: 19360 - protein, 228 aa, Zea mays subsp. mays
  peptide (1)..(228): Ceres Seq. ID no. 12375699
  misc_feature (80)..(145): Pfam Name: AP2 domain Pfam Description: AP2 domain
  misc_feature (1)..(35): Homolog of NCBI NO: 7489077 NR Description: transcription factor Pti4 - tomato (fragment)
  misc_feature (59)..(181): Homolog of NCBI NO: 7489077 NR Description: transcription factor Pti4 - tomato (fragment)
  misc_feature (1)..(28): Homolog of NCBI NO: 28274828 NR Description: ethylene response factor 1 [Lycopersicon
  misc_feature (51)..(185): Homolog of NCBI NO: 28274828 NR Description: ethylene response factor 1 [Lycopersicon
  misc_feature (1)..(28): Homolog of NCBI NO: 8809571 NR Description: ethylene-responsive element binding factor
  misc_feature (50)..(185): Homolog of NCBI NO: 8809571 NR Description: ethylene-responsive element binding factor
  misc_feature (1)..(28): Homolog of NCBI NO: 7489113 NR Description: DNA binding protein EREBP-2 - common tobacco
  misc_feature (50)..(185): Homolog of NCBI NO: 7489113 NR Description: DNA binding protein EREBP-2 - common tobacco
  misc_feature (1)..(227): Homolog of NCBI NO: 14140141 NR Description: putative AP2-related transcription factor [Oryza
  misc_feature (1)..(175): Homolog of NCBI NO: 38346167 NR Description: OSJNBa0079A21.14 [Oryza sativa (japonica
  misc_feature (170)..(170): Xaa is any aa, unknown or other
MVVFGALQDAFAYGWLPDGSFAHVKPEPVRSPDSSYYSYDGSCFGGLPYPEQPLTPGSEGEAAATPSPRREEAAAAVARGKHYRGVRQRPWGKFAAEIRDPAKNGARVWLGTYDTAEDAALAYDRAAYRMRGSRALLNFPLRIASEIAAAAAGDKRPLALPEPATSSDSXSTGGSPKRRKRGEAAAANMAMALVPPPSQLSRPAQPWFPAAAPVEQAAMPPRVEQLVI

SEQ ID NO: 19361 - DNA, 1892 bp, Zea mays subsp. mays
  misc_feature (1)..(1892): Ceres Seq. ID no. 12364555
  misc_feature: MA Experiment ID: 108515 Result: Up-regulated in Transcription
  misc_feature: MA Experiment 108515 PARAMETER Experiment Name: Zm_2mM_SA_P Parameter: Age (day) Value: 8
  misc_feature: MA Experiment 108515 PARAMETER Experiment Name: Zm_2mM_SA_P Parameter: Organism Value: Zea mays
  misc_feature: MA Experiment 108515 PARAMETER Experiment Name: Zm_2mM_SA_P Parameter: Plant Line Value: 35A19
  misc_feature: MA Experiment 108515 PARAMETER Experiment Name: Zm_2mM_SA_P Parameter: Timepoint (hr) Value: 12
  misc_feature: MA Experiment 108515 PARAMETER Experiment Name: Zm_2mM_SA_P Parameter: Tissue Value: Aerial
  misc_feature: MA Experiment 108515 PARAMETER Experiment Name: Zm_2mM_SA_P Parameter: Treatment Value: 2mM SA vs. No Treatment
  misc_feature: MA Experiment ID: 108523 Result: Down-regulated in Transcription
  misc_feature: MA Experiment 108523 PARAMETER Experiment Name: Zm_42deg_Heat_P Parameter: Age (day) Value: 8
  misc_feature: MA Experiment 108523 PARAMETER Experiment Name: Zm_42deg_Heat_P Parameter: Organism Value: Zea mays
  misc_feature: MA Experiment 108523 PARAMETER Experiment Name: Zm_42deg_Heat_P Parameter: Plant Line Value: 35A19
  misc_feature: MA Experiment 108523 PARAMETER Experiment Name: Zm_42deg_Heat_P Parameter: Temperature (deg C) Value: 42 vs. 22
  misc_feature: MA Experiment 108523 PARAMETER Experiment Name: Zm_42deg_Heat_P Parameter: Timepoint (hr) Value: 6
  misc_feature: MA Experiment 108523 PARAMETER Experiment Name: Zm_42deg_Heat_P Parameter: Tissue Value: Aerial
  misc_feature: MA Experiment ID: 108526 Result: Up-regulated in Transcription
  misc_feature: MA Experiment 108526 PARAMETER Experiment Name: Zm_5mM_NO_P Parameter: Age (day) Value: 8
  misc_feature: MA Experiment 108526 PARAMETER Experiment Name: Zm_5mM_NO_P Parameter: Organism Value: Zea mays
  misc_feature: MA Experiment 108526 PARAMETER Experiment Name: Zm_5mM_NO_P Parameter: Plant Line Value: 35A19
  misc_feature: MA Experiment 108526 PARAMETER Experiment Name: Zm_5mM_NO_P Parameter: Timepoint (hr) Value: 1
  misc_feature: MA Experiment 108526 PARAMETER Experiment Name: Zm_5mM_NO_P Parameter: Tissue Value: Aerial
  misc_feature: MA Experiment 108526 PARAMETER Experiment Name: Zm_5mM_NO_P Parameter: Treatment Value: 5mM NO vs. No Treatment
  misc_feature: MA Experiment ID: 108527 Result: Up-regulated in Transcription
  misc_feature: MA Experiment 108527 PARAMETER Experiment Name: Zm_5mM_NO_P Parameter: Age (day) Value: 8
  misc_feature: MA Experiment 108527 PARAMETER Experiment Name: Zm_5mM_NO_P Parameter: Organism Value: Zea mays
  misc_feature: MA Experiment 108527 PARAMETER Experiment Name: Zm_5mM_NO_P Parameter: Plant Line Value: 35A19
  misc_feature: MA Experiment 108527 PARAMETER Experiment Name: Zm_5mM_NO_P Parameter: Timepoint (hr) Value: 6
  misc_feature: MA Experiment 108527 PARAMETER Experiment Name: Zm_5mM_NO_P Parameter: Tissue Value: Aerial
  misc_feature: MA Experiment 108527 PARAMETER Experiment Name: Zm_5mM_NO_P Parameter: Treatment Value: 5mM NO vs. No Treatment
  misc_feature: MA Experiment ID: 108529 Result: Up-regulated in Transcription
  misc_feature: MA Experiment 108529 PARAMETER Experiment Name: Zm_Imbibed_Seeds_P Parameter: Age (day) Value: 5 vs. 2
  misc_feature: MA Experiment 108529 PARAMETER Experiment Name: Zm_Imbibed_Seeds_P Parameter: Organism Value: Zea mays
  misc_feature: MA Experiment 108529 PARAMETER Experiment Name: Zm_Imbibed_Seeds_P Parameter: Plant Line Value: 35A19
  misc_feature: MA Experiment 108529 PARAMETER Experiment Name: Zm_Imbibed_Seeds_P Parameter: Tissue Value: Roots vs. Embryo
  misc_feature: MA Experiment ID: 108535 Result: Down-regulated in Transcription
  misc_feature: MA Experiment 108535 PARAMETER Experiment Name: Zm_Meristem_P Parameter: Age (day) Value: 8
  misc_feature: MA Experiment 108535 PARAMETER Experiment Name: Zm_Meristem_P Parameter: Organism Value: Zea mays
  misc_feature: MA Experiment 108535 PARAMETER Experiment Name: Zm_Meristem_P Parameter: Plant Line Value: 35A19
  misc_feature: MA Experiment 108535 PARAMETER Experiment Name: Zm_Meristem_P Parameter: Tissue Value: Root Meristem vs. Above Root Meristem
  misc_feature: MA Experiment ID: 108546 Result: Up-regulated in Transcription
  misc_feature: MA Experiment 108546 PARAMETER Experiment Name: Zm_Imbibed_Seeds_P Parameter: Age (day) Value: 3 vs. 2
  misc_feature: MA Experiment 108546 PARAMETER Experiment Name: Zm_Imbibed_Seeds_P Parameter: Organism Value: Zea mays
  misc_feature: MA Experiment 108546 PARAMETER Experiment Name: Zm_Imbibed_Seeds_P Parameter: Plant Line Value: 35A19
  misc_feature: MA Experiment 108546 PARAMETER Experiment Name: Zm_Imbibed_Seeds_P Parameter: Tissue Value: Roots vs. Embryo
  misc_feature: MA Experiment ID: 20000108 Result: Down-regulated in Transcription
  misc_feature: MA Experiment 20000108 PARAMETER Experiment Name: Zm_Root-Tips_P Parameter: Age (day) Value: 12
  misc_feature: MA Experiment 20000108 PARAMETER Experiment Name: Zm_Root-Tips_P Parameter: Organism Value: Zea mays
  misc_feature: MA Experiment 20000108 PARAMETER Experiment Name: Zm_Root-Tips_P Parameter: Tissue Value: Root tips vs. Root mid region    35
  misc_feature: MA Experiment 20000108 PARAMETER Experiment Name: Zm_Root-Tips_P Parameter: Tissue Value: Root tips vs. Root mid region   Sequence Listing-Misc Features (4)
  misc_feature: MA Experiment ID: 20000477 Result: Up-regulated in Transcription
  misc_feature: MA Experiment 20000477 PARAMETER Experiment Name: Zm_5mM_SA_P Parameter: Age (day) Value: 10
  misc_feature: MA Experiment 20000477 PARAMETER Experiment Name: Zm_5mM_SA_P Parameter: Organism Value: Zea mays
  misc_feature: MA Experiment 20000477 PARAMETER Experiment Name: Zm_5mM_SA_P Parameter: Plant Line Value: 35A19
  misc_feature: MA Experiment 20000477 PARAMETER Experiment Name: Zm_5mM_SA_P Parameter: Timepoint (hr) Value: 48
  misc_feature: MA Experiment 20000477 PARAMETER Experiment Name: Zm_5mM_SA_P Parameter: Tissue Value: Aerial
  misc_feature: MA Experiment 20000477 PARAMETER Experiment Name: Zm_5mM_SA_P Parameter: Treatment Value: 5mM SA vs. No Treatment
  misc_feature: MA Experiment ID: 20000487 Result: Down-regulated in Transcription
  misc_feature: MA Experiment 20000487 PARAMETER Experiment Name: Zm_50mM_NH4NO3_L_to_H_P Parameter: Organism Value: Zea mays
  misc_feature: MA Experiment 20000487 PARAMETER Experiment Name: Zm_50mM_NH4NO3_L_to_H_P Parameter: Timepoint (hr) Value: 4
  misc_feature: MA Experiment 20000487 PARAMETER Experiment Name: Zm_50mM_NH4NO3_L_to_H_P Parameter: Tissue Value: Leaves
  misc_feature: MA Experiment 20000487 PARAMETER Experiment Name: Zm_50mM_NH4NO3_L_to_H_P Parameter: Treatment Value: 50mM NH4NO3 vs. 100mM Mannitol
  misc_feature: MA Experiment ID: 20000488 Result: Down-regulated in Transcription
  misc_feature: MA Experiment 20000488 PARAMETER Experiment Name: Zm_50mM_NH4NO3_L_to_H_P Parameter: Organism Value: Zea mays
  misc_feature: MA Experiment 20000488 PARAMETER Experiment Name: Zm_50mM_NH4NO3_L_to_H_P Parameter: Timepoint (hr) Value: 8
  misc_feature: MA Experiment 20000488 PARAMETER Experiment Name: Zm_50mM_NH4NO3_L_to_H_P Parameter: Tissue Value: Leaves
  misc_feature: MA Experiment 20000488 PARAMETER Experiment Name: Zm_50mM_NH4NO3_L_to_H_P Parameter: Treatment Value: 50mM NH4NO3 vs. 100mM Mannitol
  misc_feature: MA Experiment ID: 20000532 Result: Up-regulated in Transcription
  misc_feature: MA Experiment 20000532 PARAMETER Experiment Name: Zm_0.001percent_MeJA_P Parameter: Age (day) Value: 10
  misc_feature: MA Experiment 20000532 PARAMETER Experiment Name: Zm_0.001percent_MeJA_P Parameter: Organism Value: Zea mays
  misc_feature: MA Experiment 20000532 PARAMETER Experiment Name: Zm_0.001percent_MeJA_P Parameter: Plant Line Value: 35A19
  misc_feature: MA Experiment 20000532 PARAMETER Experiment Name: Zm_0.001percent_MeJA_P Parameter: Timepoint (hr) Value: 48
  misc_feature: MA Experiment 20000532 PARAMETER Experiment Name: Zm_0.001percent_MeJA_P Parameter: Tissue Value: Aerial
  misc_feature: MA Experiment 20000532 PARAMETER Experiment Name: Zm_0.001percent_MeJA_P Parameter: Treatment Value: 0.001percent MeJA vs. No Treatment
  misc_feature: MA Experiment ID: 20000534 Result: Down-regulated in Transcription
  misc_feature: MA Experiment 20000534 PARAMETER Experiment Name: Zm_Hybrid_Pollen_P Parameter: Age (day) Value: 8
  misc_feature: MA Experiment 20000534 PARAMETER Experiment Name: Zm_Hybrid_Pollen_P Parameter: Organism Value: Zea mays
  misc_feature: MA Experiment 20000534 PARAMETER Experiment Name: Zm_Hybrid_Pollen_P Parameter: Plant Line Value: 35A19
  misc_feature: MA Experiment 20000534 PARAMETER Experiment Name: Zm_Hybrid_Pollen_P Parameter: Tissue Value: Pollen vs. Aerial
  misc_feature: MA Experiment ID: 20000535 Result: Up-regulated in Transcription
  misc_feature: MA Experiment 20000535 PARAMETER Experiment Name: Zm_Hybrid_Seed_Dev_P Parameter: DAP Value: 30 vs. 12
  misc_feature: MA Experiment 20000535 PARAMETER Experiment Name: Zm_Hybrid_Seed_Dev_P Parameter: Organism Value: Zea mays
  misc_feature: MA Experiment 20000535 PARAMETER Experiment Name: Zm_Hybrid_Seed_Dev_P Parameter: Plant Line Value: 35A19
  misc_feature: MA Experiment 20000535 PARAMETER Experiment Name: Zm_Hybrid_Seed_Dev_P Parameter: Tissue Value: Embryo vs. Unfert Floret
  misc_feature: MA Experiment ID: 20000626 Result: Up-regulated in Transcription
  misc_feature: MA Experiment 20000626 PARAMETER Experiment Name: Zm_Herbicide-Treatments_P Parameter: Timepoint (hr) Value: 12
  misc_feature: MA Experiment 20000626 PARAMETER Experiment Name: Zm_Herbicide-Treatments_P Parameter: Tissue Value: Aerial
  misc_feature: MA Experiment 20000626 PARAMETER Experiment Name: Zm_Herbicide-Treatments_P Parameter: Treatment Value: Roundup vs. No Treatment
  misc_feature: MA Experiment ID: 20000629 Result: Up-regulated in Transcription
  misc_feature: MA Experiment 20000629 PARAMETER Experiment Name: Zm_Herbicide-Treatments_P Parameter: Timepoint (hr) Value: 12
  misc_feature: MA Experiment 20000629 PARAMETER Experiment Name: Zm_Herbicide-Treatments_P Parameter: Tissue Value: Aerial
  misc_feature: MA Experiment 20000629 PARAMETER Experiment Name: Zm_Herbicide-Treatments_P Parameter: Treatment Value: Trimec vs. No Treatment
  misc_feature: MA Experiment ID: 20001608 Result: Down-regulated in Transcription
  misc_feature: MA Experiment 20001608 PARAMETER Experiment Name: Zm_50ppm_KNO3_L-to-H_P Parameter: Age (day) Value: 21
  misc_feature: MA Experiment 20001608 PARAMETER Experiment Name: Zm_50ppm_KNO3_L-to-H_P Parameter: Organism Value: Zea mays
  misc_feature: MA Experiment 20001608 PARAMETER Experiment Name: Zm_50ppm_KNO3_L-to-H_P Parameter: Plant Line Value: 35A19
  misc_feature: MA Experiment 20001608 PARAMETER Experiment Name: Zm_50ppm_KNO3_L-to-H_P Parameter: Timepoint (hr) Value: 48
  misc_feature: MA Experiment 20001608 PARAMETER Experiment Name: Zm_50ppm_KNO3_L-to-H_P Parameter: Tissue Value: Shoots
  misc_feature: MA Experiment 20001608 PARAMETER Experiment Name: Zm_50ppm_KNO3_L-to-H_P Parameter: Treatment Value: 50ppm KNO3 vs. 50ppm KCl
  misc_feature: MA Experiment ID: 20001610 Result: Down-regulated in Transcription
  misc_feature: MA Experiment 20001610 PARAMETER Experiment Name: Zm_50ppm_KNO3_L-to-H_P Parameter: Age (day) Value: 19
  misc_feature: MA Experiment 20001610 PARAMETER Experiment Name: Zm_50ppm_KNO3_L-to-H_P Parameter: Organism Value: Zea mays
  misc_feature: MA Experiment 20001610 PARAMETER Experiment Name: Zm_50ppm_KNO3_L-to-H_P Parameter: Plant Line Value: 35A19
  misc_feature: MA Experiment 20001610 PARAMETER Experiment Name: Zm_50ppm_KNO3_L-to-H_P Parameter: Timepoint (hr) Value: 2
  misc_feature: MA Experiment 20001610 PARAMETER Experiment Name: Zm_50ppm_KNO3_L-to-H_P Parameter: Tissue Value: Roots
  misc_feature: MA Experiment 20001610 PARAMETER Experiment Name: Zm_50ppm_KNO3_L-to-H_P Parameter: Treatment Value: 50ppm KNO3 vs. 50ppm KCl
gcacgagaccattacctagaacatcctaatcgaaaaactcgttagtcgttactcccaacaccgggaatccatggagccggcctatgtcgtcaccctctccttcctcttcctcttcttgctccaccatctcctcggccgccaccgccgcaggaccaacggcaagaacaagagaacgcagctgccaccgagccctcccgccatcccggtcttgggtcacctccacctcttacggaagcctatccacgcggcgctcgctcgcctcgcggagcgctacgggccggtgttcttcctccggctcggctcgcggcaagccgtggtggtgtcgtccgcggcttgcgccacggagtgcttcaccgagaatgacgtctgcttcgcgaaccgcccgcggttccccacgctcctgctggtttccttcggcggcgccacgctcccaatgtgccgctacggcccgtactggcgcaacctccgccgcgtcgccacggtgcagctcctgtccgcgcaccgcgtcagctgcatgctccccgtcatatccgccgaggtgcgcgcaatggcgcggaggatgtaccaatccgccgccgccgcccccgccggcgccgcgagggtcgagctgaagcggaggctgttcgagctctcccacagcgccctgatggagaccatcgcgcgaaccaagacgtcccgtgccgtggcggacgacgacacggacatgtctccggaggcccaggaattcatgaaggcgctggacgtgttccttccgcttctcagcggggccaacgcgtgggactacctgccggtgctacggtggctcgacgtgttcggcgtgaggaacaagatcctgcgcgcggtgagcgcaagggacgcgttcctacggcggctcatcgacgcggagcggcggaggctggaggagggcggcgagaacaacgataagaagagcatgattggcgttctgctctcactgcagaagtcagaaccggaggtgtacacggataccatgatcatggctctgtgctcgagcatgttcgctgggggttctgaaacaacagcgacgacggcggaatgggcgatgtcgctgctgctaagccaccccgatgttctgaagaaagcgcaggcggagattgacgcgtccgtggggcactcccggctgctcggcgccgacgacctgccgcgcctcggctacctccactgcatcgtcagcgagaccctgcggctgtacccggtcgtgccgacgctggtcccgcacgagtccaccgccgactgcacggtcggcggccaccgtgtgccgagcgggacgatgctcctcgtcaacgtgtacgccatccacagggaccccgcgatatgggcggacccagccgcgttcaggccggagcggttcgaggacggccgtgccgacgggctgttcgtgatgccgttcgggatgggaaggcggaaatgccccggagaggccctcgcgctgcggacgctggggctggtcctggggacgttgatccagtgcttcgactgggacacggtcggcggcgccgaggtcgatatggccgaagggggcggaatcacgctcccgagggctgtccctctggaggccatctgcaagccgcgccatgctatgcttggcgtcctcaagggactgtgagcgccatgctatgccttgatacataagtaagctttttttctttagtaaagcagtcatcttgcgtctcaagcagttgcttgctttattgcttgaaactcactttcttcctggagtgtagccgccgcagtgtaagcgcgcggggttcaaatgttatttcattcacagccatcagccatgtatatgttgaactagcaatgtgaatgtgacccacgtaaaatcgcatgggtttactagttttttttttcagttatagcatttgtgttttttt

SEQ ID NO: 19362 - protein, 517 aa, Zea mays subsp. mays
  peptide (1)..(517): Ceres Seq. ID no. 12364556
  misc_feature (1)..(517): Homolog of NCBI NO: 38344454 NR Description: OSJNBa0017P10.2 [Oryza sativa (japonica
  misc_feature (10)..(517): Homolog of NCBI NO: 3059131 NR Description: cytochrome P450 [Helianthus tuberosus]
  misc_feature (1)..(517): Homolog of NCBI NO: 7430635 NR Description: cytochrome P450 (EC 1.14.-.-) 81B1c - Jerusalem
  misc_feature (1)..(517): Homolog of NCBI NO: 14488373 NR Description: putative cytochrome P450 [Oryza sativa (japonica
  misc_feature (1)..(515): Homolog of NCBI NO: 14488358 NR Description: putative cytochrome P450 [Oryza sativa (japonica
  misc_feature (1)..(517): Homolog of NCBI NO: 14488355 NR Description: putative cytochrome P450 [Oryza sativa (japonica
  misc_feature (1)..(517): Homolog of NCBI NO: 14488353 NR Description: putative cytochrome P450 [Oryza sativa (japonica
  misc_feature (1)..(517): Homolog of NCBI NO: 13661744 NR Description: putative cytochrome P450 [Lolium rigidum]
  misc_feature (1)..(517): Homolog of NCBI NO: 13661748 NR Description: putative cytochrome P450 [Lolium rigidum]
  misc_feature (1)..(517): Homolog of NCBI NO: 13661746 NR Description: putative cytochrome P450 [Lolium rigidum]
MEPAYVVTLSFLFLFLLHHLLGRHRRRTNGKNKRTQLPPSPPAIPVLGHLHLLRKPIHAALARLAERYGPVFFLRLGSRQAVVVSSAACATECFTENDVCFANRPRFPTLLLVSFGGATLPMCRYGPYWRNLRRVATVQLLSAHRVSCMLPVISAEVRAMARRMYQSAAAAPAGAARVELKRRLFELSHSALMETIARTKTSRAVADDDTDMSPEAQEFMKALDVFLPLLSGANAWDYLPVLRWLDVFGVRNKILRAVSARDAFLRRLIDAERRRLEEGGENNDKKSMIGVLLSLQKSEPEVYTDTMIMALCSSMFAGGSETTATTAEWAMSLLLSHPDVLKKAQAEIDASVGHSRLLGADDLPRLGYLHCIVSETLRLYPVVPTLVPHESTADCTVGGHRVPSGTMLLVNVYAIHRDPAIWADPAAFRPERFEDGRADGLFVMPFGMGRRKCPGEALALRTLGLVLGTLIQCFDWDTVGGAEVDMAEGGGITLPRAVPLEAICKPRHAMLGVLKGL

SEQ ID NO: 19363 - protein, 396 aa, Zea mays subsp. mays
  peptide (1)..(396): Ceres Seq. ID no. 12364557
  misc_feature (1)..(396): Homolog of NCBI NO: 38344454 NR Description: OSJNBa0017P10.2 [Oryza sativa (japonica
  misc_feature (1)..(396): Homolog of NCBI NO: 3059131 NR Description: cytochrome P450 [Helianthus tuberosus]
  misc_feature (1)..(396): Homolog of NCBI NO: 7430635 NR Description: cytochrome P450 (EC 1.14.-.-) 81B1c - Jerusalem
  misc_feature (1)..(396): Homolog of NCBI NO: 14488373 NR Description: putative cytochrome P450 [Oryza sativa (japonica
  misc_feature (1)..(394): Homolog of NCBI NO: 14488358 NR Description: putative cytochrome P450 [Oryza sativa (japonica
  misc_feature (1)..(396): Homolog of NCBI NO: 14488355 NR Description: putative cytochrome P450 [Oryza sativa (japonica
  misc_feature (1)..(396): Homolog of NCBI NO: 14488353 NR Description: putative cytochrome P450 [Oryza sativa (japonica
  misc_feature (1)..(396): Homolog of NCBI NO: 13661744 NR Description: putative cytochrome P450 [Lolium rigidum]
  misc_feature (1)..(396): Homolog of NCBI NO: 13661748 NR Description: putative cytochrome P450 [Lolium rigidum]
  misc_feature (1)..(396): Homolog of NCBI NO: 13661746 NR Description: putative cytochrome P450 [Lolium rigidum]
MCRYGPYWRNLRRVATVQLLSAHRVSCMLPVISAEVRAMARRMYQSAAAAPAGAARVELKRRLFELSHSALMETIARTKTSRAVADDDTDMSPEAQEFMKALDVFLPLLSGANAWDYLPVLRWLDVFGVRNKILRAVSARDAFLRRLIDAERRRLEEGGENNDKKSMIGVLLSLQKSEPEVYTDTMIMALCSSMFAGGSETTATTAEWAMSLLLSHPDVLKKAQAEIDASVGHSRLLGADDLPRLGYLHCIVSETLRLYPVVPTLVPHESTADCTVGGHRVPSGTMLLVNVYAIHRDPAIWADPAAFRPERFEDGRADGLFVMPFGMGRRKCPGEALALRTLGLVLGTLIQCFDWDTVGGAEVDMAEGGGITLPRAVPLEAICKPRHAMLGVLKGL

SEQ ID NO: 19364 - protein, 369 aa, Zea mays subsp. mays
  peptide (1)..(369): Ceres Seq. ID no. 12364558
  misc_feature (1)..(369): Homolog of NCBI NO: 38344454 NR Description: OSJNBa0017P10.2 [Oryza sativa (japonica
  misc_feature (1)..(369): Homolog of NCBI NO: 3059131 NR Description: cytochrome P450 [Helianthus tuberosus]
  misc_feature (1)..(369): Homolog of NCBI NO: 7430635 NR Description: cytochrome P450 (EC 1.14.-.-) 81B1c - Jerusalem
  misc_feature (1)..(369): Homolog of NCBI NO: 14488373 NR Description: putative cytochrome P450 [Oryza sativa (japonica
  misc_feature (1)..(367): Homolog of NCBI NO: 14488358 NR Description: putative cytochrome P450 [Oryza sativa (japonica
  misc_feature (1)..(369): Homolog of NCBI NO: 14488355 NR Description: putative cytochrome P450 [Oryza sativa (japonica
  misc_feature (1)..(369): Homolog of NCBI NO: 14488353 NR Description: putative cytochrome P450 [Oryza sativa (japonica
  misc_feature (1)..(369): Homolog of NCBI NO: 13661744 NR Description: putative cytochrome P450 [Lolium rigidum]
  misc_feature (1)..(369): Homolog of NCBI NO: 13661748 NR Description: putative cytochrome P450 [Lolium rigidum]
  misc_feature (1)..(369): Homolog of NCBI NO: 13661746 NR Description: putative cytochrome P450 [Lolium rigidum]
MLPVISAEVRAMARRMYQSAAAAPAGAARVELKRRLFELSHSALMETIARTKTSRAVADDDTDMSPEAQEFMKALDVFLPLLSGANAWDYLPVLRWLDVFGVRNKILRAVSARDAFLRRLIDAERRRLEEGGENNDKKSMIGVLLSLQKSEPEVYTDTMIMALCSSMFAGGSETTATTAEWAMSLLLSHPDVLKKAQAEIDASVGHSRLLGADDLPRLGYLHCIVSETLRLYPVVPTLVPHESTADCTVGGHRVPSGTMLLVNVYAIHRDPAIWADPAAFRPERFEDGRADGLFVMPFGMGRRKCPGEALALRTLGLVLGTLIQCFDWDTVGGAEVDMAEGGGITLPRAVPLEAICKPRHAMLGVLKGL

SEQ ID NO: 19365 - DNA, 1108 bp, Zea mays subsp. mays
  misc_feature (1)..(1108): Ceres Seq. ID no. 13577820
  misc_feature: MA Experiment ID: 108504 Result: Down-regulated in Transcription
  misc_feature: MA Experiment 108504 PARAMETER Experiment Name: Zm_Drought_P Parameter: Age (day) Value: 8
  misc_feature: MA Experiment 108504 PARAMETER Experiment Name: Zm_Drought_P Parameter: Organism Value: Zea mays
  misc_feature: MA Experiment 108504 PARAMETER Experiment Name: Zm_Drought_P Parameter: Plant Line Value: 35A19
  misc_feature: MA Experiment 108504 PARAMETER Experiment Name: Zm_Drought_P Parameter: Timepoint (hr) Value: 12
  misc_feature: MA Experiment 108504 PARAMETER Experiment Name: Zm_Drought_P Parameter: Tissue Value: Aerial
  misc_feature: MA Experiment 108504 PARAMETER Experiment Name: Zm_Drought_P Parameter: Treatment Value: Drought vs. No Drought
  misc_feature: MA Experiment ID: 108556 Result: Down-regulated in Transcription
  misc_feature: MA Experiment 108556 PARAMETER Experiment Name: Zm_Drought_P Parameter: Age (day) Value: 9
  misc_feature: MA Experiment 108556 PARAMETER Experiment Name: Zm_Drought_P Parameter: Organism Value: Zea mays
  misc_feature: MA Experiment 108556 PARAMETER Experiment Name: Zm_Drought_P Parameter: Plant Line Value: 35A19
  misc_feature: MA Experiment 108556 PARAMETER Experiment Name: Zm_Drought_P Parameter: Timepoint (hr) Value: 24
  misc_feature: MA Experiment 108556 PARAMETER Experiment Name: Zm_Drought_P Parameter: Tissue Value: Aerial
  misc_feature: MA Experiment 108556 PARAMETER Experiment Name: Zm_Drought_P Parameter: Treatment Value: Drought vs. No Drought
  misc_feature: MA Experiment ID: 108689 Result: Down-regulated in Transcription
  misc_feature: MA Experiment 108689 PARAMETER Experiment Name: Zm_Drought_Roots_P Parameter: Age (day) Value: 9
  misc_feature: MA Experiment 108689 PARAMETER Experiment Name: Zm_Drought_Roots_P Parameter: Organism Value: Zea mays
  misc_feature: MA Experiment 108689 PARAMETER Experiment Name: Zm_Drought_Roots_P Parameter: Plant Line Value: 35A19
  misc_feature: MA Experiment 108689 PARAMETER Experiment Name: Zm_Drought_Roots_P Parameter: Timepoint (hr) Value: 24
  misc_feature: MA Experiment 108689 PARAMETER Experiment Name: Zm_Drought_Roots_P Parameter: Tissue Value: Roots
  misc_feature: MA Experiment 108689 PARAMETER Experiment Name: Zm_Drought_Roots_P Parameter: Treatment Value: Drought vs. No Drought
  misc_feature: MA Experiment ID: 20000477 Result: Down-regulated in Transcription
  misc_feature: MA Experiment 20000477 PARAMETER Experiment Name: Zm_5mM_SA_P Parameter: Age (day) Value: 10
  misc_feature: MA Experiment 20000477 PARAMETER Experiment Name: Zm_5mM_SA_P Parameter: Organism Value: Zea mays
  misc_feature: MA Experiment 20000477 PARAMETER Experiment Name: Zm_5mM_SA_P Parameter: Plant Line Value: 35A19
  misc_feature: MA Experiment 20000477 PARAMETER Experiment Name: Zm_5mM_SA_P Parameter: Timepoint (hr) Value: 48
  misc_feature: MA Experiment 20000477 PARAMETER Experiment Name: Zm_5mM_SA_P Parameter: Tissue Value: Aerial
  misc_feature: MA Experiment 20000477 PARAMETER Experiment Name: Zm_5mM_SA_P Parameter: Treatment Value: 5mM SA vs. No Treatment
  misc_feature: MA Experiment ID: 20000479 Result: Down-regulated in Transcription
  misc_feature: MA Experiment 20000479 PARAMETER Experiment Name: Zm_Drought_P Parameter: Age (day) Value: 10
  misc_feature: MA Experiment 20000479 PARAMETER Experiment Name: Zm_Drought_P Parameter: Organism Value: Zea mays
  misc_feature: MA Experiment 20000479 PARAMETER Experiment Name: Zm_Drought_P Parameter: Plant Line Value: 35A19
  misc_feature: MA Experiment 20000479 PARAMETER Experiment Name: Zm_Drought_P Parameter: Timepoint (hr) Value: 48
  misc_feature: MA Experiment 20000479 PARAMETER Experiment Name: Zm_Drought_P Parameter: Tissue Value: Aerial
  misc_feature: MA Experiment 20000479 PARAMETER Experiment Name: Zm_Drought_P Parameter: Treatment Value: Drought vs. No Drought
  misc_feature: MA Experiment ID: 20000480 Result: Down-regulated in Transcription
  misc_feature: MA Experiment 20000480 PARAMETER Experiment Name: Zm_Drought_P Parameter: Age (day) Value: 11
  misc_feature: MA Experiment 20000480 PARAMETER Experiment Name: Zm_Drought_P Parameter: Organism Value: Zea mays
  misc_feature: MA Experiment 20000480 PARAMETER Experiment Name: Zm_Drought_P Parameter: Plant Line Value: 35A19
  misc_feature: MA Experiment 20000480 PARAMETER Experiment Name: Zm_Drought_P Parameter: Timepoint (hr) Value: 72
  misc_feature: MA Experiment 20000480 PARAMETER Experiment Name: Zm_Drought_P Parameter: Tissue Value: Aerial
  misc_feature: MA Experiment 20000480 PARAMETER Experiment Name: Zm_Drought_P Parameter: Treatment Value: Drought vs. No Drought
attaatcccccacgttccccttccctttctctcccgccgccgcacgcccctctcaaacctccgcgctcccgcccagctagggtttccccgatctcccctccttctcaaccgccgccgtcgccgagagcgccgccacgatgttggagctgcggcttgtgcaggggagctcggggaaaccctagctgggcgggcgctgaaggcgttgcgggggctggtgaagctgcaggcgctggtccggggcaacatcgtgcggcggcggcggcggaaaccaccaccaccagcaccaccagtcgccgtgctcgacgacgatgggctccgagcagaacagccggagctacgcgaccatgccggagtcgccgtccaaggactcgacgaccgcgcagcagtcggtgccgagcccgccgtcggtgggcatggccgaggaggaggccctgagcccgctgcgcgtgcccgtgcccgcggacgtggccgagctctgcgacagcccccagttcttctcggccacgtcgtcgcggcccgggagctcgaggcggggcccgttcacgccgacggncaagagcgagtgctcgcgcagcctcttcggcggctactcccgactacccgaaactacatggccaacacggagtcgttccgcgccaaggcgcggtcgcagagcgcgccgaagcagaggccgcagtacgagcggtccagctccctacgcagggcgtcggcggcgcagaggtcggcggcggcggcggcctcctccctgcacgccaagttcaccaacaaggcgtacccgggctctggcaggctggatcggcttggcttgccggccaggtactgatactgagcctgcctaattcgcgtcaggatgatgtgctgccgctgtgtctcgagcgaggaggacgacgacgaagaagtgcaatcgactagtggtagttaggttcccccgtgccttggttgtgctattaccatcaacagttttttctgtttcttgctttgtgtagctagccatgtctaaagttgctggtagctgtaatgatgctataatgcgtgcttaactgctgacgaacctttttcctctacatttccgtggtatatatatatgtgccgtcaaatcatgcctggg

SEQ ID NO: 19366 - protein, 273 aa, Zea mays subsp. mays
  peptide (1)..(273): Ceres Seq. ID no. 13577821
  misc_feature (202)..(267): Homolog of NCBI NO: 21594016 NR Description: unknown [Arabidopsis thaliana]
  misc_feature (202)..(267): Homolog of NCBI NO: 15241692 NR Description: expressed protein [Arabidopsis thaliana]
  misc_feature (60)..(86): Homolog of NCBI NO: 19347818 NR Description: unknown protein [Arabidopsis thaliana]
  misc_feature (198)..(239): Homolog of NCBI NO: 19347818 NR Description: unknown protein [Arabidopsis thaliana]
  misc_feature (60)..(86): Homolog of NCBI NO: 30682982 NR Description: expressed protein [Arabidopsis thaliana]
  misc_feature (198)..(239): Homolog of NCBI NO: 30682982 NR Description: expressed protein [Arabidopsis thaliana]
  misc_feature (60)..(86): Homolog of NCBI NO: 15235911 NR Description: expressed protein [Arabidopsis thaliana]
  misc_feature (202)..(273): Homolog of NCBI NO: 15235911 NR Description: expressed protein [Arabidopsis thaliana]
  misc_feature (202)..(273): Homolog of NCBI NO: 38567921 NR Description: OSJNBa0088I22.17 [Oryza sativa (japonica
  misc_feature (43)..(86): Homolog of NCBI NO: 38567921 NR Description: OSJNBa0088I22.17 [Oryza sativa (japonica
  misc_feature (184)..(184): Xaa is any aa, unknown or other
LIPHVPLPFLSRRRTPLSNLRAPAQLGFPRSPLLLNRRRRRERRHDVGAAACAGELGETLAGRALKALRGLVKLQALVRGNIVRRRRRKPPPPAPPVAVLDDDGLRAEQPELRDHAGVAVQGLDDRAAVGAEPAVGGHGRGGGPEPAARARARGRGRALRQPPVLLGHVVAARELEAGPVHADXQERVLAQPLRRLLPTTRNYMANTESFRAKARSQSAPKQRPQYERSSSLRRASAAQRSAAAAASSLHAKFTNKAYPGSGRLDRLGLPARY

SEQ ID NO: 19367 - protein, 176 aa, Zea mays subsp. mays
  peptide (1)..(176): Ceres Seq. ID no. 13577822
  misc_feature (1)..(120): Homolog of NCBI NO: 38567921 NR Description: OSJNBa0088I22.17 [Oryza sativa (japonica
  misc_feature (82)..(82): Xaa is any aa, unknown or other
MGSEQNSRSYATMPESPSKDSTTAQQSVPSPPSVGMAEEEALSPLRVPVPADVAELCDSPQFFSATSSRPGSSRRGPFTPTXKSECSRSLFGGYSRLPETTWPTRSRSAPRRGRRARRSRGRSTSGPAPYAGRRRRRGRRRRRPPPCTPSSPTRRTRALAGWIGLACRPGTDTEPA

SEQ ID NO: 19368 - protein, 164 aa, Zea mays subsp. mays
  peptide (1)..(164): Ceres Seq. ID no. 13577823
  misc_feature (1)..(108): Homolog of NCBI NO: 38567921 NR Description: OSJNBa0088I22.17 [Oryza sativa (japonica
  misc_feature (70)..(70): Xaa is any aa, unknown or other
MPESPSKDSTTAQQSVPSPPSVGMAEEEALSPLRVPVPADVAELCDSPQFFSATSSRPGSSRRGPFTPTXKSECSRSLFGGYSRLPETTWPTRSRSAPRRGRRARRSRGRSTSGPAPYAGRRRRRGRRRRRPPPCTPSSPTRRTRALAGWIGLACRPGTDTEPA

SEQ ID NO: 19369 - DNA, 985 bp, Zea mays subsp. mays; identical to SEQ ID NO: 4228
  misc_feature (1)..(985): Ceres Seq. ID no. 13495278
  misc_feature: MA Experiment ID: 108543 Result: Up-regulated in Transcription

SEQ ID NO: 19370 - protein, 327 aa, Zea mays subsp. mays; identical to SEQ ID NO: 4229
  peptide (1)..(327): Ceres Seq. ID no. 13495279
  misc_feature (172)..(326): Homolog of NCBI NO: 38423965 NR Description: putative glycosyltransferase
  misc_feature (105)..(326): Homolog of NCBI NO: 37533460 NR Description: hypothetical protein [Oryza sativa (japonica
  misc_feature (172)..(326): Homolog of NCBI NO: 18422837 NR Description: glycosyltransferase family 8 [Arabidopsis
  misc_feature (172)..(326): Homolog of NCBI NO: 10177914 NR Description: emb|CAB71043.1~gene_id:MCA23.10~strong similarity
  misc_feature (111)..(326): Homolog of NCBI NO: 15227235 NR Description: glycosyltransferase family 8 [Arabidopsis
  misc_feature (120)..(326): Homolog of NCBI NO: 30691875 NR Description: glycosyltransferase family 8 [Arabidopsis
  misc_feature (120)..(326): Homolog of NCBI NO: 7485958 NR Description: hypothetical protein F22I13.40 - Arabidopsis
  misc_feature (87)..(326): Homolog of NCBI NO: 7271113 NR Description: 68 kDa protein [Cicer arietinum]
  misc_feature (93)..(326): Homolog of NCBI NO: 15233046 NR Description: glycosyltransferase family 8 [Arabidopsis
  misc_feature (93)..(326): Homolog of NCBI NO: 14517362 NR Description: AT3g61130/T20K12_30 [Arabidopsis thaliana]
  misc_feature (93)..(326): Homolog of NCBI NO: 14517362 NR Description: AT3g61130/T20K12_30 [Arabidopsis thaliana]
  misc_feature (172)..(326): Homolog of NCBI NO: 38423965 NR Description: putative glycosyltransferase
  misc_feature (105)..(326): Homolog of NCBI NO: 37533460 NR Description: hypothetical protein [Oryza sativa (japonica
  misc_feature (172)..(326): Homolog of NCBI NO: 18422837 NR Description: glycosyltransferase family 8 [Arabidopsis
  misc_feature (172)..(326): Homolog of NCBI NO: 10177914 NR Description: emb|CAB71043.1~gene_id:MCA23.10~strong similarity
  misc_feature (111)..(326): Homolog of NCBI NO: 15227235 NR Description: glycosyltransferase family 8 [Arabidopsis
  misc_feature (120)..(326): Homolog of NCBI NO: 30691875 NR Description: glycosyltransferase family 8 [Arabidopsis
  misc_feature (120)..(326): Homolog of NCBI NO: 7485958 NR Description: hypothetical protein F22I13.40 - Arabidopsis
  misc_feature (87)..(326): Homolog of NCBI NO: 7271113 NR Description: 68 kDa protein [Cicer arietinum]
  misc_feature (93)..(326): Homolog of NCBI NO: 15233046 NR Description: glycosyltransferase family 8 [Arabidopsis

SEQ ID NO: 19371 - protein, 284 aa, Zea mays subsp. mays; identical to SEQ ID NO: 4230
  peptide (1)..(284): Ceres Seq. ID no. 13495280
  misc_feature (129)..(283): Homolog of NCBI NO: 38423965 NR Description: putative glycosyltransferase
  misc_feature (62)..(283): Homolog of NCBI NO: 37533460 NR Description: hypothetical protein [Oryza sativa (japonica
  misc_feature (129)..(283): Homolog of NCBI NO: 18422837 NR Description: glycosyltransferase family 8 [Arabidopsis
  misc_feature (129)..(283): Homolog of NCBI NO: 10177914 NR Description: emb|CAB71043.1~gene_id:MCA23.10~strong similarity
  misc_feature (68)..(283): Homolog of NCBI NO: 15227235 NR Description: glycosyltransferase family 8 [Arabidopsis
  misc_feature (77)..(283): Homolog of NCBI NO: 30691875 NR Description: glycosyltransferase family 8 [Arabidopsis
  misc_feature (77)..(283): Homolog of NCBI NO: 7485958 NR Description: hypothetical protein F22I13.40 - Arabidopsis
  misc_feature (44)..(283): Homolog of NCBI NO: 7271113 NR Description: 68 kDa protein [Cicer arietinum]
  misc_feature (50)..(283): Homolog of NCBI NO: 15233046 NR Description: glycosyltransferase family 8 [Arabidopsis
  misc_feature (50)..(283): Homolog of NCBI NO: 14517362 NR Description: AT3g61130/T20K12_30 [Arabidopsis thaliana]
  misc_feature (129)..(283): Homolog of NCBI NO: 38423965 NR Description: putative glycosyltransferase
  misc_feature (62)..(283): Homolog of NCBI NO: 37533460 NR Description: hypothetical protein [Oryza sativa (japonica
  misc_feature (129)..(283): Homolog of NCBI NO: 18422837 NR Description: glycosyltransferase family 8 [Arabidopsis
  misc_feature (129)..(283): Homolog of NCBI NO: 10177914 NR Description: emb|CAB71043.1~gene_id:MCA23.10~strong similarity
  misc_feature (68)..(283): Homolog of NCBI NO: 15227235 NR Description: glycosyltransferase family 8 [Arabidopsis
  misc_feature (77)..(283): Homolog of NCBI NO: 30691875 NR Description: glycosyltransferase family 8 [Arabidopsis
  misc_feature (77)..(283): Homolog of NCBI NO: 7485958 NR Description: hypothetical protein F22I13.40 - Arabidopsis
  misc_feature (44)..(283): Homolog of NCBI NO: 7271113 NR Description: 68 kDa protein [Cicer arietinum]
  misc_feature (50)..(283): Homolog of NCBI NO: 15233046 NR Description: glycosyltransferase family 8 [Arabidopsis
  misc_feature (50)..(283): Homolog of NCBI NO: 14517362 NR Description: AT3g61130/T20K12_30 [Arabidopsis thaliana]

SEQ ID NO: 19372 - protein, 233 aa, Zea mays subsp. mays; identical to SEQ ID NO: 4231
  peptide (1)..(233): Ceres Seq. ID no. 13495281
  misc_feature (78)..(232): Homolog of NCBI NO: 38423965 NR Description: putative glycosyltransferase
  misc_feature (11)..(232): Homolog of NCBI NO: 37533460 NR Description: hypothetical protein [Oryza sativa (japonica
  misc_feature (78)..(232): Homolog of NCBI NO: 18422837 NR Description: glycosyltransferase family 8 [Arabidopsis
  misc_feature (78)..(232): Homolog of NCBI NO: 10177914 NR Description: emb|CAB71043.1~gene_id:MCA23.10~strong similarity
  misc_feature (17)..(232): Homolog of NCBI NO: 15227235 NR Description: glycosyltransferase family 8 [Arabidopsis
  misc_feature (26)..(232): Homolog of NCBI NO: 30691875 NR Description: glycosyltransferase family 8 [Arabidopsis
  misc_feature (26)..(232): Homolog of NCBI NO: 7485958 NR Description: hypothetical protein F22I13.40 - Arabidopsis
  misc_feature (1)..(232): Homolog of NCBI NO: 7271113 NR Description: 68 kDa protein [Cicer arietinum]
  misc_feature (1)..(232): Homolog of NCBI NO: 15233046 NR Description: glycosyltransferase family 8 [Arabidopsis
  misc_feature (1)..(232): Homolog of NCBI NO: 14517362 NR Description: AT3g61130/T20K12_30 [Arabidopsis thaliana]
  misc_feature (78)..(232): Homolog of NCBI NO: 38423965 NR Description: putative glycosyltransferase
  misc_feature (11)..(232): Homolog of NCBI NO: 37533460 NR Description: hypothetical protein [Oryza sativa (japonica
  misc_feature (78)..(232): Homolog of NCBI NO: 18422837 NR Description: glycosyltransferase family 8 [Arabidopsis
  misc_feature (78)..(232): Homolog of NCBI NO: 10177914 NR Description: emb|CAB71043.1~gene_id:MCA23.10~strong similarity
  misc_feature (17)..(232): Homolog of NCBI NO: 15227235 NR Description: glycosyltransferase family 8 [Arabidopsis
  misc_feature (26)..(232): Homolog of NCBI NO: 30691875 NR Description: glycosyltransferase family 8 [Arabidopsis
  misc_feature (26)..(232): Homolog of NCBI NO: 7485958 NR Description: hypothetical protein F22I13.40 - Arabidopsis
  misc_feature (1)..(232): Homolog of NCBI NO: 7271113 NR Description: 68 kDa protein [Cicer arietinum]
  misc_feature (1)..(232): Homolog of NCBI NO: 15233046 NR Description: glycosyltransferase family 8 [Arabidopsis
  misc_feature (1)..(232): Homolog of NCBI NO: 14517362 NR Description: AT3g61130/T20K12_30 [Arabidopsis thaliana]

SEQ ID NO: 19373 - DNA, 2629 bp, Zea mays subsp. mays
  misc_feature (1)..(2629): Ceres Seq. ID no. 12375783
  misc_feature: MA Experiment ID: 108536 Result: Down-regulated in Transcription
  misc_feature: MA Experiment 108536 PARAMETER Experiment Name: Zm_Meristem_P Parameter: Age (day) Value: 8
  misc_feature: MA Experiment 108536 PARAMETER Experiment Name: Zm_Meristem_P Parameter: Organism Value: Zea mays
  misc_feature: MA Experiment 108536 PARAMETER Experiment Name: Zm_Meristem_P Parameter: Plant Line Value: 35A19
  misc_feature: MA Experiment 108536 PARAMETER Experiment Name: Zm_Meristem_P Parameter: Tissue Value: Shoot Meristem vs. Above Shoot Meristem
  misc_feature: MA Experiment ID: 108543 Result: Up-regulated in Transcription
  misc_feature: MA Experiment ID: 108544 Result: Down-regulated in Transcription
  misc_feature: MA Experiment ID: 108597 Result: Down-regulated in Transcription
  misc_feature: MA Experiment 108597 PARAMETER Experiment Name: Zm_100uM_ABA_P Parameter: Age (day) Value: 9
  misc_feature: MA Experiment 108597 PARAMETER Experiment Name: Zm_100uM_ABA_P Parameter: Organism Value: Zea mays
  misc_feature: MA Experiment 108597 PARAMETER Experiment Name: Zm_100uM_ABA_P Parameter: Plant Line Value: 35A19
  misc_feature: MA Experiment 108597 PARAMETER Experiment Name: Zm_100uM_ABA_P Parameter: Timepoint (hr) Value: 24
  misc_feature: MA Experiment 108597 PARAMETER Experiment Name: Zm_100uM_ABA_P Parameter: Tissue Value: Aerial
  misc_feature: MA Experiment 108597 PARAMETER Experiment Name: Zm_100uM_ABA_P Parameter: Treatment Value: 100uM ABA vs. No Treatment
  misc_feature: MA Experiment ID: 20000477 Result: Down-regulated in Transcription
  misc_feature: MA Experiment 20000477 PARAMETER Experiment Name: Zm_5mM_SA_P Parameter: Age (day) Value: 10
  misc_feature: MA Experiment 20000477 PARAMETER Experiment Name: Zm_5mM_SA_P Parameter: Organism Value: Zea mays
  misc_feature: MA Experiment 20000477 PARAMETER Experiment Name: Zm_5mM_SA_P Parameter: Plant Line Value: 35A19
  misc_feature: MA Experiment 20000477 PARAMETER Experiment Name: Zm_5mM_SA_P Parameter: Timepoint (hr) Value: 48
  misc_feature: MA Experiment 20000477 PARAMETER Experiment Name: Zm_5mM_SA_P Parameter: Tissue Value: Aerial
  misc_feature: MA Experiment 20000477 PARAMETER Experiment Name: Zm_5mM_SA_P Parameter: Treatment Value: 5mM SA vs. No Treatment
  misc_feature: MA Experiment ID: 20000478 Result: Down-regulated in Transcription
  misc_feature: MA Experiment 20000478 PARAMETER Experiment Name: Zm_5mM_SA_P Parameter: Age (day) Value: 11
  misc_feature: MA Experiment 20000478 PARAMETER Experiment Name: Zm_5mM_SA_P Parameter: Organism Value: Zea mays
  misc_feature: MA Experiment 20000478 PARAMETER Experiment Name: Zm_5mM_SA_P Parameter: Plant Line Value: 35A19
  misc_feature: MA Experiment 20000478 PARAMETER Experiment Name: Zm_5mM_SA_P Parameter: Timepoint (hr) Value: 72
  misc_feature: MA Experiment 20000478 PARAMETER Experiment Name: Zm_5mM_SA_P Parameter: Tissue Value: Aerial
  misc_feature: MA Experiment 20000478 PARAMETER Experiment Name: Zm_5mM_SA_P Parameter: Treatment Value: 5mM SA vs. No Treatment
  misc_feature: MA Experiment ID: 20000479 Result: Down-regulated in Transcription
  misc_feature: MA Experiment 20000479 PARAMETER Experiment Name: Zm_Drought_P Parameter: Age (day) Value: 10
  misc_feature: MA Experiment 20000479 PARAMETER Experiment Name: Zm_Drought_P Parameter: Organism Value: Zea mays
  misc_feature: MA Experiment 20000479 PARAMETER Experiment Name: Zm_Drought_P Parameter: Plant Line Value: 35A19
  misc_feature: MA Experiment 20000479 PARAMETER Experiment Name: Zm_Drought_P Parameter: Timepoint (hr) Value: 48
  misc_feature: MA Experiment 20000479 PARAMETER Experiment Name: Zm_Drought_P Parameter: Tissue Value: Aerial
  misc_feature: MA Experiment 20000479 PARAMETER Experiment Name: Zm_Drought_P Parameter: Treatment Value: Drought vs. No Drought
  misc_feature: MA Experiment ID: 20000480 Result: Down-regulated in Transcription
  misc_feature: MA Experiment 20000480 PARAMETER Experiment Name: Zm_Drought_P Parameter: Age (day) Value: 11
  misc_feature: MA Experiment 20000480 PARAMETER Experiment Name: Zm_Drought_P Parameter: Organism Value: Zea mays
  misc_feature: MA Experiment 20000480 PARAMETER Experiment Name: Zm_Drought_P Parameter: Plant Line Value: 35A19
  misc_feature: MA Experiment 20000480 PARAMETER Experiment Name: Zm_Drought_P Parameter: Timepoint (hr) Value: 72
  misc_feature: MA Experiment 20000480 PARAMETER Experiment Name: Zm_Drought_P Parameter: Tissue Value: Aerial
  misc_feature: MA Experiment 20000480 PARAMETER Experiment Name: Zm_Drought_P Parameter: Treatment Value: Drought vs. No Drought
  misc_feature: MA Experiment ID: 20000492 Result: Down-regulated in Transcription
  misc_feature: MA Experiment 20000492 PARAMETER Experiment Name: Zm_Hybrid_Seed_Dev_P Parameter: DAP Value: 12
  misc_feature: MA Experiment 20000492 PARAMETER Experiment Name: Zm_Hybrid_Seed_Dev_P Parameter: Organism Value: Zea mays
  misc_feature: MA Experiment 20000492 PARAMETER Experiment Name: Zm_Hybrid_Seed_Dev_P Parameter: Plant Line Value: 35A19
  misc_feature: MA Experiment 20000492 PARAMETER Experiment Name: Zm_Hybrid_Seed_Dev_P Parameter: Tissue Value: Fert Kernel vs. Unfert Floret
  misc_feature: MA Experiment ID: 20000535 Result: Down-regulated in Transcription
  misc_feature: MA Experiment 20000535 PARAMETER Experiment Name: Zm_Hybrid_Seed_Dev_P Parameter: DAP Value: 30 vs. 12
  misc_feature: MA Experiment 20000535 PARAMETER Experiment Name: Zm_Hybrid_Seed_Dev_P Parameter: Organism Value: Zea mays
  misc_feature: MA Experiment 20000535 PARAMETER Experiment Name: Zm_Hybrid_Seed_Dev_P Parameter: Plant Line Value: 35A19
  misc_feature: MA Experiment 20000535 PARAMETER Experiment Name: Zm_Hybrid_Seed_Dev_P Parameter: Tissue Value: Embryo vs. Unfert Floret
  misc_feature: MA Experiment ID: 20001613 Result: Down-regulated in Transcription
  misc_feature: MA Experiment 20001613 PARAMETER Experiment Name: Zm_50ppm_KNO3_L-to-H_P Parameter: Age (day) Value: 20
  misc_feature: MA Experiment 20001613 PARAMETER Experiment Name: Zm_50ppm_KNO3_L-to-H_P Parameter: Organism Value: Zea mays
  misc_feature: MA Experiment 20001613 PARAMETER Experiment Name: Zm_50ppm_KNO3_L-to-H_P Parameter: Plant Line Value: 35A19
  misc_feature: MA Experiment 20001613 PARAMETER Experiment Name: Zm_50ppm_KNO3_L-to-H_P Parameter: Timepoint (hr) Value: 24
  misc_feature: MA Experiment 20001613 PARAMETER Experiment Name: Zm_50ppm_KNO3_L-to-H_P Parameter: Tissue Value: Roots
  misc_feature: MA Experiment 20001613 PARAMETER Experiment Name: Zm_50ppm_KNO3_L-to-H_P Parameter: Treatment Value: 50ppm KNO3 vs. 50ppm KCl
gcacgagaccattacctagaacatcctaatcgaaaaacagtgcagtgcattcaatctcaaataaaaagccctgctacagtgctagcagtactcggatccacgaccttctccctccctccgctgctgctccgtcaaggaagggaggaaagaaagggcaggggaatggaggtggaggaagacggccgagccgcccgagtgctgctgagctcccagtgtctctgtctctgatgagatgactggacttatttgatgctcttgccgttctcgacttggggcgcgagccgatggatctcctccggatgaaacttctcctgccctccttcatcagctgccttcttctgatgcaggcagcactatgtgatggcgccgccgccaccaccaccaccaccggcgaaaacggaacggcaaactggacatgtgtgtgcgcagctcatcctctcggtgaaccagactccaacagcagcttgctgtccaattgctcttcctcctgccattgccaccgagatgagaacggcggcggcggcggcggcggcgcaggctcgtggaactgcacgtgtgcctctggtgatgagggccttcagaaggaagagcatgctgagctacgtgacgggagctgtttcacttcctgcaactgcacgtcgggtactggaacttcagaggaagggagaaagcgtgtctcaagcaaaacagtcatagctacgctcctggtctgcgtggttctcaccaccaccgctttcctcgtcaccaccgtatactacttccgccgcaaggacgccctctctccgcgatcgcagatatactccttcgatagatacactactagctggagcagcaggtcgaacctcgtcagcagtcgatcgtctccgcttccccagatgaaacccaaaccaaagcttggtggtctgaaagagtttctgtgcagctgcaatcttgtcatctgtgggggagagagcggcgcattccccggtgtcgtcgcccggttctcgtacgcagagctggagcaagcgaccgggagattctcggacgaccaccttatcggagtcggtgggtcaagcaaggtgtaccgcggccagctcggcgatggcagagtcgttgccgtgaagaagcttaggccgctaggaggcacggacgaagacttggagttcctgtcagagatcgagctgctgtcgaggctgaaccactgccacgtggtgccgttgctggggtactgctcggagagccagggccggcagctggagcggctgctggtgttcgagtgcatggccaacggcaacctgagggactgcctagacctgaagcgagggaggaagcccatggactggcagacgcgggtgagcgtcgcgctcggcgccgcgagggggctggagtacctgcacgaggcggcggcgccgcgcatcctccaccgcgacatcaagtccaccaacatcctcctggacgacaagttcagagccaagatcactgacctcggcatggccaagtgcctgatgaacgacggcgtgaccagctgctcgagctccccggcgcggatgctgggcacgttcggctacttcgcaccggagtacgccatcgtgggcaaggcgtcgctcaagtccgacgtcttcagcttcggcgtcgttgtgctggagctcatcaccggccggcagcccatccacaagtcgtcgtcgacgagggccgacgagagcctcgtactctgggcgacgtcgcggctgcgggacagcgggctggtggtcacggagctgccggacccgacgctgcagggcaagttcccggcggaggagatgcagatcatggcgcacctggcgcgggagtgcctgcagtgggaccccgaggccaggcccaccatgacggaggtcgtgcacatcctcgccaccatcgcaccactccagcacggcgccaagcgtcggaaccttcccatcgccaccgccttcaacctcacgccatcgccgcacgtcgggcggtgtgacccggagcctaaagacgacgacatcgagaggcagatgcagcagcaggagtgctcgccgacgacggctgtccagtggcaacaacaacaagcgcgctgcacccacgcgccaacgggccgcgcgtcgtggcccggcgacagggggaacgttgtgagcagaggcgcggcggtgtcgggcgagctggtgaacgggacggtgctgatgaacccccacgggcggggcagctggcggcggccgccgccgcttggcgacgaggaggcagtggacgtggatctgacggagccccggatggaggcgttcacgcagccggcggcgtttcagcctttcaggtgacggaaggattaggatcaggtggtggtggttctgattggtgcggcggcggcgggtgctgctgtacatcttcttgttcgtgcctccacgatccacaccaggatcatctgcttctgcatctgcgttcatgaatgtacagtacaggcaaatacatctagattggcaacgggaaaagaaaagaaaggcatcgagatcgttatgggatataggacctagattgaacacgagatcaatgcatgaatctgaatccacggcgcgcgtcattggacacatcactgttgtacacaagcaaacagacaatgagtgttcacagaagcaaaaaatataagaccgagttc

SEQ ID NO: 19374 - protein, 669 aa, Zea mays subsp. mays
  peptide (1)..(669): Ceres Seq. ID no. 12375784
  misc_feature (220)..(530): Homolog of NCBI NO: 30679031 NR Description: protein kinase family [Arabidopsis thaliana]
  misc_feature (220)..(530): Homolog of NCBI NO: 7488203 NR Description: probable serine/threonine-specific protein kinase
  misc_feature (233)..(531): Homolog of NCBI NO: 34894174 NR Description: putative protein kinase [Oryza sativa (japonica
  misc_feature (222)..(531): Homolog of NCBI NO: 15221470 NR Description: protein kinase, putative
  misc_feature (232)..(530): Homolog of NCBI NO: 34902828 NR Description: unnamed protein product [Oryza sativa (japonica
  misc_feature (233)..(555): Homolog of NCBI NO: 11358842 NR Description: serine/threonine-specific protein kinase-like
  misc_feature (220)..(523): Homolog of NCBI NO: 34896634 NR Description: putative protein kinase [Oryza sativa]
  misc_feature (123)..(530): Homolog of NCBI NO: 15240947 NR Description: putative protein
  misc_feature (82)..(550): Homolog of NCBI NO: 25407968 NR Description: probable protein kinase [imported] - Arabidopsis
  misc_feature (57)..(548): Homolog of NCBI NO: 30683822 NR Description: protein kinase family [Arabidopsis thaliana]
MDLLRMKLLLPSFISCLLLMQAALCDGAAATTTTTGENGTANWTCVCAAHPLGEPDSNSSLLSNCSSSCHCHRDENGGGGGGGAGSWNCTCASGDEGLQKEEHAELRDGSCFTSCNCTSGTGTSEEGRKRVSSKTVIATLLVCVVLTTTAFLVTTVYYFRRKDALSPRSQIYSFDRYTTSWSSRSNLVSSRSSPLPQMKPKPKLGGLKEFLCSCNLVICGGESGAFPGVVARFSYAELEQATGRFSDDHLIGVGGSSKVYRGQLGDGRVVAVKKLRPLGGTDEDLEFLSEIELLSRLNHCHVVPLLGYCSESQGRQLERLLVFECMANGNLRDCLDLKRGRKPMDWQTRVSVALGAARGLEYLHEAAAPRILHRDIKSTNILLDDKFRAKITDLGMAKCLMNDGVTSCSSSPARMLGTFGYFAPEYAIVGKASLKSDVFSFGVVVLELITGRQPIHKSSSTRADESLVLWATSRLRDSGLVVTELPDPTLQGKFPAEEMQIMAHLARECLQWDPEARPTMTEVVHILATIAPLQHGAKRRNLPIATAFNLTPSPHVGRCDPEPKDDDIERQMQQQECSPTTAVQWQQQQARCTHAPTGRASWPGDRGNVVSRGAAVSGELVNGTVLMNPHGRGSWRRPPPLGDEEAVDVDLTEPRMEAFTQPAAFQPFR

SEQ ID NO: 19375 - protein, 664 aa, Zea mays subsp. mays
  peptide (1)..(664): Ceres Seq. ID no. 12375785
  misc_feature (215)..(525): Homolog of NCBI NO: 30679031 NR Description: protein kinase family [Arabidopsis thaliana]
  misc_feature (215)..(525): Homolog of NCBI NO: 7488203 NR Description: probable serine/threonine-specific protein kinase
  misc_feature (228)..(526): Homolog of NCBI NO: 34894174 NR Description: putative protein kinase [Oryza sativa (japonica
  misc_feature (217)..(526): Homolog of NCBI NO: 15221470 NR Description: protein kinase, putative
  misc_feature (227)..(525): Homolog of NCBI NO: 34902828 NR Description: unnamed protein product [Oryza sativa (japonica
  misc_feature (228)..(550): Homolog of NCBI NO: 11358842 NR Description: serine/threonine-specific protein kinase-like
  misc_feature (215)..(518): Homolog of NCBI NO: 34896634 NR Description: putative protein kinase [Oryza sativa]
  misc_feature (118)..(525): Homolog of NCBI NO: 15240947 NR Description: putative protein
  misc_feature (77)..(545): Homolog of NCBI NO: 25407968 NR Description: probable protein kinase [imported] - Arabidopsis
  misc_feature (52)..(543): Homolog of NCBI NO: 30683822 NR Description: protein kinase family [Arabidopsis thaliana]
MKLLLPSFISCLLLMQAALCDGAAATTTTTGENGTANWTCVCAAHPLGEPDSNSSLLSNCSSSCHCHRDENGGGGGGGAGSWNCTCASGDEGLQKEEHAELRDGSCFTSCNCTSGTGTSEEGRKRVSSKTVIATLLVCVVLTTTAFLVTTVYYFRRKDALSPRSQIYSFDRYTTSWSSRSNLVSSRSSPLPQMKPKPKLGGLKEFLCSCNLVICGGESGAFPGVVARFSYAELEQATGRFSDDHLIGVGGSSKVYRGQLGDGRVVAVKKLRPLGGTDEDLEFLSEIELLSRLNHCHVVPLLGYCSESQGRQLERLLVFECMANGNLRDCLDLKRGRKPMDWQTRVSVALGAARGLEYLHEAAAPRILHRDIKSTNILLDDKFRAKITDLGMAKCLMNDGVTSCSSSPARMLGTFGYFAPEYAIVGKASLKSDVFSFGVVVLELITGRQPIHKSSSTRADESLVLWATSRLRDSGLVVTELPDPTLQGKFPAEEMQIMAHLARECLQWDPEARPTMTEVVHILATIAPLQHGAKRRNLPIATAFNLTPSPHVGRCDPEPKDDDIERQMQQQECSPTTAVQWQQQQARCTHAPTGRASWPGDRGNVVSRGAAVSGELVNGTVLMNPHGRGSWRRPPPLGDEEAVDVDLTEPRMEAFTQPAAFQPFR

SEQ ID NO: 19376 - protein, 650 aa, Zea mays subsp. mays
  peptide (1)..(650): Ceres Seq. ID no. 12375786
  misc_feature (201)..(511): Homolog of NCBI NO: 30679031 NR Description: protein kinase family [Arabidopsis thaliana]
  misc_feature (201)..(511): Homolog of NCBI NO: 7488203 NR Description: probable serine/threonine-specific protein kinase
  misc_feature (214)..(512): Homolog of NCBI NO: 34894174 NR Description: putative protein kinase [Oryza sativa (japonica
  misc_feature (203)..(512): Homolog of NCBI NO: 15221470 NR Description: protein kinase, putative
  misc_feature (213)..(511): Homolog of NCBI NO: 34902828 NR Description: unnamed protein product [Oryza sativa (japonica
  misc_feature (214)..(536): Homolog of NCBI NO: 11358842 NR Description: serine/threonine-specific protein kinase-like
  misc_feature (201)..(504): Homolog of NCBI NO: 34896634 NR Description: putative protein kinase [Oryza sativa]
  misc_feature (104)..(511): Homolog of NCBI NO: 15240947 NR Description: putative protein
  misc_feature (63)..(531): Homolog of NCBI NO: 25407968 NR Description: probable protein kinase [imported] - Arabidopsis
  misc_feature (38)..(529): Homolog of NCBI NO: 30683822 NR Description: protein kinase family [Arabidopsis thaliana]
MQAALCDGAAATTTTTGENGTANWTCVCAAHPLGEPDSNSSLLSNCSSSCHCHRDENGGGGGGGAGSWNCTCASGDEGLQKEEHAELRDGSCFTSCNCTSGTGTSEEGRKRVSSKTVIATLLVCVVLTTTAFLVTTVYYFRRKDALSPRSQIYSFDRYTTSWSSRSNLVSSRSSPLPQMKPKPKLGGLKEFLCSCNLVICGGESGAFPGVVARFSYAELEQATGRFSDDHLIGVGGSSKVYRGQLGDGRVVAVKKLRPLGGTDEDLEFLSEIELLSRLNHCHVVPLLGYCSESQGRQLERLLVFECMANGNLRDCLDLKRGRKPMDWQTRVSVALGAARGLEYLHEAAAPRILHRDIKSTNILLDDKFRAKITDLGMAKCLMNDGVTSCSSSPARMLGTFGYFAPEYAIVGKASLKSDVFSFGVVVLELITGRQPIHKSSSTRADESLVLWATSRLRDSGLVVTELPDPTLQGKFPAEEMQIMAHLARECLQWDPEARPTMTEVVHILATIAPLQHGAKRRNLPIATAFNLTPSPHVGRCDPEPKDDDIERQMQQQECSPTTAVQWQQQQARCTHAPTGRASWPGDRGNVVSRGAAVSGELVNGTVLMNPHGRGSWRRPPPLGDEEAVDVDLTEPRMEAFTQPAAFQPFR

SEQ ID NO: 19377 - DNA, 799 bp, Zea mays subsp. mays
  misc_feature (1)..(799): Ceres Seq. ID no. 12364546
  misc_feature: MA Experiment ID: 108529 Result: Up-regulated in Transcription
  misc_feature: MA Experiment 108529 PARAMETER Experiment Name: Zm_Imbibed_Seeds_P Parameter: Age (day) Value: 5 vs. 2
  misc_feature: MA Experiment 108529 PARAMETER Experiment Name: Zm_Imbibed_Seeds_P Parameter: Organism Value: Zea mays
  misc_feature: MA Experiment 108529 PARAMETER Experiment Name: Zm_Imbibed_Seeds_P Parameter: Plant Line Value: 35A19
  misc_feature: MA Experiment 108529 PARAMETER Experiment Name: Zm_Imbibed_Seeds_P Parameter: Tissue Value: Roots vs. Embryo
  misc_feature: MA Experiment ID: 108535 Result: Down-regulated in Transcription
  misc_feature: MA Experiment 108535 PARAMETER Experiment Name: Zm_Meristem_P Parameter: Age (day) Value: 8
  misc_feature: MA Experiment 108535 PARAMETER Experiment Name: Zm_Meristem_P Parameter: Organism Value: Zea mays
  misc_feature: MA Experiment 108535 PARAMETER Experiment Name: Zm_Meristem_P Parameter: Plant Line Value: 35A19
  misc_feature: MA Experiment 108535 PARAMETER Experiment Name: Zm_Meristem_P Parameter: Tissue Value: Root Meristem vs. Above Root Meristem
gcacgagaccattacctagaacatcctaatcgaaaaagtttccactgtgctccttctcgccgactccgccatgaccgcctcgccctacccgacgacgccgtggctgcggccaccgcctcctatggcatttctgagtctcctcctcctccttggctgcctctccccgtcgatctcactggcgggtgcggaggcggcgggggttctgagacaagtggttggtggggacgacggcgggacattcttcgagccgttcaacgtgacctacgaccaccgcgcgcttatccttggcgggaagcgcaggatgctcgtctctgcggggctccactacccgcgtgccacgcccgagatgtggccgagtttgattgcaaagtgcaaggagggcggcgtggatgtaattgagacatatgtgttttggaatgggcatgagccggccaaaggccagtggtttcccagtttggttgcgcgatgtccctggggatagaattccgcactgacaatgaaccctacaaggctgaaatgcagatttttgtgacaaaaattgtagatatcatgaaagaggagaagctttattcttggcaaggtggtcccattatactgcagcagattgaaaatgaatacggtaacattcaaggccattatggtcaagcagggaaatagagaatggagaagatggtagtgctgctgctgactgttgtagatattgagacaggcacaatagagaatagagtgacacttggtatggccataaatcgctactttttccactagagcgaatagcattctccgtgtacatctgttg

SEQ ID NO: 19378 - protein, 136 aa, Zea mays subsp. mays
  peptide (1)..(136): Ceres Seq. ID no. 12364547
  misc_feature (55)..(125): Pfam Name: Glycosyl hydrolases family 35 Pfam Description: Glycosyl hydrolases family 35
  misc_feature (63)..(126): Homolog of NCBI NO: 15231696 NR Description: glycosyl hydrolase family 35 (beta-galactosidase)
  misc_feature (63)..(126): Homolog of NCBI NO: 6686876 NR Description: putative beta-galactosidase [Arabidopsis
  misc_feature (63)..(126): Homolog of NCBI NO: 24417238 NR Description: unknown [Arabidopsis thaliana]
  misc_feature (33)..(125): Homolog of NCBI NO: 14970841 NR Description: beta-galactosidase [Fragaria x ananassa]
  misc_feature (62)..(125): Homolog of NCBI NO: 30683905 NR Description: glycosyl hydrolase family 35 (beta-galactosidase)
  misc_feature (62)..(125): Homolog of NCBI NO: 6686888 NR Description: putative beta-galactosidase [Arabidopsis thaliana]
  misc_feature (62)..(125): Homolog of NCBI NO: 25326167 NR Description: probable beta-galactosidase [imported] -
  misc_feature (55)..(125): Homolog of NCBI NO: 7939617 NR Description: beta-galactosidase [Lycopersicon esculentum]
  misc_feature (55)..(125): Homolog of NCBI NO: 18403090 NR Description: glycosyl hydrolase family 35 (beta-galactosidase)
  misc_feature (55)..(125): Homolog of NCBI NO: 7488064 NR Description: probable beta-galactosidase (EC 3.2.1.23) F24L7.5
MTASPYPTTPWLRPPPPMAFLSLLLLLGCLSPSISLAGAEAAGVLRQVVGGDDGGTFFEPFNVTYDHRALILGGKRRMLVSAGLHYPRATPEMWPSLIAKCKEGGVDVIETYVFWNGHEPAKGQWFPSLVARCPWG

SEQ ID NO: 19379 - protein, 132 aa, Zea mays subsp. mays
  peptide (1)..(132): Ceres Seq. ID no. 12364548
ARDHYLEHPNRKSFHCAPSRRLRHDRLALPDDAVAAATASYGISESPPPPWLPLPVDLTGGCGGGGGSETSGWWGRRRDILRAVQRDLRPPRAYPWREAQDARLCGAPLPACHARDVAEFDCKVQGGRRGCN

SEQ ID NO: 19380 - protein, 119 aa, Zea mays subsp. mays
  peptide (1)..(119): Ceres Seq. ID no. 12364549
  misc_feature (38)..(108): Pfam Name: Glycosyl hydrolases family 35 Pfam Description: Glycosyl hydrolases family 35
  misc_feature (16)..(108): Homolog of NCBI NO: 14970841 NR Description: beta-galactosidase [Fragaria x ananassa]
  misc_feature (45)..(108): Homolog of NCBI NO: 30683905 NR Description: glycosyl hydrolase family 35 (beta-galactosidase)
  misc_feature (45)..(108): Homolog of NCBI NO: 6686888 NR Description: putative beta-galactosidase [Arabidopsis thaliana]
  misc_feature (45)..(108): Homolog of NCBI NO: 25326167 NR Description: probable beta-galactosidase [imported] -
  misc_feature (46)..(109): Homolog of NCBI NO: 6686876 NR Description: putative beta-galactosidase [Arabidopsis
  misc_feature (46)..(109): Homolog of NCBI NO: 24417238 NR Description: unknown [Arabidopsis thaliana]
  misc_feature (46)..(109): Homolog of NCBI NO: 15231696 NR Description: glycosyl hydrolase family 35 (beta-galactosidase)
  misc_feature (38)..(108): Homolog of NCBI NO: 7939617 NR Description: beta-galactosidase [Lycopersicon esculentum]
  misc_feature (38)..(108): Homolog of NCBI NO: 18403090 NR Description: glycosyl hydrolase family 35 (beta-galactosidase)
  misc_feature (38)..(108): Homolog of NCBI NO: 7488064 NR Description: probable beta-galactosidase (EC 3.2.1.23) F24L7.5
MAFLSLLLLLGCLSPSISLAGAEAAGVLRQVVGGDDGGTFFEPFNVTYDHRALILGGKRRMLVSAGLHYPRATPEMWPSLIAKCKEGGVDVIETYVFWNGHEPAKGQWFPSLVARCPWG

SEQ ID NO: 19381 - DNA, 1435 bp, Zea mays subsp. mays
  misc_feature (1)..(1435): Ceres Seq. ID no. 12436094
  misc_feature: MA Experiment ID: 108523 Result: Down-regulated in Transcription
  misc_feature: MA Experiment 108523 PARAMETER Experiment Name: Zm_42deg_Heat_P Parameter: Age (day) Value: 8
  misc_feature: MA Experiment 108523 PARAMETER Experiment Name: Zm_42deg_Heat_P Parameter: Organism Value: Zea mays
  misc_feature: MA Experiment 108523 PARAMETER Experiment Name: Zm_42deg_Heat_P Parameter: Plant Line Value: 35A19
  misc_feature: MA Experiment 108523 PARAMETER Experiment Name: Zm_42deg_Heat_P Parameter: Temperature (deg C) Value: 42 vs. 22
  misc_feature: MA Experiment 108523 PARAMETER Experiment Name: Zm_42deg_Heat_P Parameter: Timepoint (hr) Value: 6
  misc_feature: MA Experiment 108523 PARAMETER Experiment Name: Zm_42deg_Heat_P Parameter: Tissue Value: Aerial
  misc_feature: MA Experiment ID: 108527 Result: Down-regulated in Transcription
  misc_feature: MA Experiment 108527 PARAMETER Experiment Name: Zm_5mM_NO_P Parameter: Age (day) Value: 8
  misc_feature: MA Experiment 108527 PARAMETER Experiment Name: Zm_5mM_NO_P Parameter: Organism Value: Zea mays
  misc_feature: MA Experiment 108527 PARAMETER Experiment Name: Zm_5mM_NO_P Parameter: Plant Line Value: 35A19
  misc_feature: MA Experiment 108527 PARAMETER Experiment Name: Zm_5mM_NO_P Parameter: Timepoint (hr) Value: 6
  misc_feature: MA Experiment 108527 PARAMETER Experiment Name: Zm_5mM_NO_P Parameter: Tissue Value: Aerial
  misc_feature: MA Experiment 108527 PARAMETER Experiment Name: Zm_5mM_NO_P Parameter: Treatment Value: 5mM NO vs. No Treatment
  misc_feature: MA Experiment ID: 108528 Result: Up-regulated in Transcription
  misc_feature: MA Experiment 108528 PARAMETER Experiment Name: Zm_Imbibed_Seeds_P Parameter: Age (day) Value: 5 vs. 2
  misc_feature: MA Experiment 108528 PARAMETER Experiment Name: Zm_Imbibed_Seeds_P Parameter: Organism Value: Zea mays
  misc_feature: MA Experiment 108528 PARAMETER Experiment Name: Zm_Imbibed_Seeds_P Parameter: Plant Line Value: 35A19
  misc_feature: MA Experiment 108528 PARAMETER Experiment Name: Zm_Imbibed_Seeds_P Parameter: Tissue Value: Aerial vs. Embryo
  misc_feature: MA Experiment ID: 108534 Result: Down-regulated in Transcription
  misc_feature: MA Experiment 108534 PARAMETER Experiment Name: Zm_4deg_Cold_P Parameter: Age (hr) Value: 8
  misc_feature: MA Experiment 108534 PARAMETER Experiment Name: Zm_4deg_Cold_P Parameter: Organism Value: Zea mays
  misc_feature: MA Experiment 108534 PARAMETER Experiment Name: Zm_4deg_Cold_P Parameter: Plant Line Value: 35A19
  misc_feature: MA Experiment 108534 PARAMETER Experiment Name: Zm_4deg_Cold_P Parameter: Temperature (deg C) Value: 4 vs. 22
  misc_feature: MA Experiment 108534 PARAMETER Experiment Name: Zm_4deg_Cold_P Parameter: Timepoint (hr) Value: 6
  misc_feature: MA Experiment 108534 PARAMETER Experiment Name: Zm_4deg_Cold_P Parameter: Tissue Value: Aerial
  misc_feature: MA Experiment ID: 108535 Result: Down-regulated in Transcription
  misc_feature: MA Experiment 108535 PARAMETER Experiment Name: Zm_Meristem_P Parameter: Age (day) Value: 8
  misc_feature: MA Experiment 108535 PARAMETER Experiment Name: Zm_Meristem_P Parameter: Organism Value: Zea mays
  misc_feature: MA Experiment 108535 PARAMETER Experiment Name: Zm_Meristem_P Parameter: Plant Line Value: 35A19
  misc_feature: MA Experiment 108535 PARAMETER Experiment Name: Zm_Meristem_P Parameter: Tissue Value: Root Meristem vs. Above Root Meristem
  misc_feature: MA Experiment ID: 108536 Result: Up-regulated in Transcription
  misc_feature: MA Experiment 108536 PARAMETER Experiment Name: Zm_Meristem_P Parameter: Age (day) Value: 8
  misc_feature: MA Experiment 108536 PARAMETER Experiment Name: Zm_Meristem_P Parameter: Organism Value: Zea mays
  misc_feature: MA Experiment 108536 PARAMETER Experiment Name: Zm_Meristem_P Parameter: Plant Line Value: 35A19
  misc_feature: MA Experiment 108536 PARAMETER Experiment Name: Zm_Meristem_P Parameter: Tissue Value: Shoot Meristem vs. Above Shoot Meristem
  misc_feature: MA Experiment ID: 108597 Result: Down-regulated in Transcription
  misc_feature: MA Experiment 108597 PARAMETER Experiment Name: Zm_100uM_ABA_P Parameter: Age (day) Value: 9
  misc_feature: MA Experiment 108597 PARAMETER Experiment Name: Zm_100uM_ABA_P Parameter: Organism Value: Zea mays
  misc_feature: MA Experiment 108597 PARAMETER Experiment Name: Zm_100uM_ABA_P Parameter: Plant Line Value: 35A19
  misc_feature: MA Experiment 108597 PARAMETER Experiment Name: Zm_100uM_ABA_P Parameter: Timepoint (hr) Value: 24
  misc_feature: MA Experiment 108597 PARAMETER Experiment Name: Zm_100uM_ABA_P Parameter: Tissue Value: Aerial
  misc_feature: MA Experiment 108597 PARAMETER Experiment Name: Zm_100uM_ABA_P Parameter: Treatment Value: 100uM ABA vs. No Treatment
  misc_feature: MA Experiment ID: 108688 Result: Down-regulated in Transcription
  misc_feature: MA Experiment 108688 PARAMETER Experiment Name: Zm_Embryos-Flowers__P Parameter: Tissue Value: Immature Flowers vs. Aerial+
  misc_feature: MA Experiment ID: 108689 Result: Up-regulated in Transcription
  misc_feature: MA Experiment 108689 PARAMETER Experiment Name: Zm_Drought_Roots_P Parameter: Age (day) Value: 9
  misc_feature: MA Experiment 108689 PARAMETER Experiment Name: Zm_Drought_Roots_P Parameter: Organism Value: Zea mays
  misc_feature: MA Experiment 108689 PARAMETER Experiment Name: Zm_Drought_Roots_P Parameter: Plant Line Value: 35A19
  misc_feature: MA Experiment 108689 PARAMETER Experiment Name: Zm_Drought_Roots_P Parameter: Timepoint (hr) Value: 24
  misc_feature: MA Experiment 108689 PARAMETER Experiment Name: Zm_Drought_Roots_P Parameter: Tissue Value: Roots
  misc_feature: MA Experiment 108689 PARAMETER Experiment Name: Zm_Drought_Roots_P Parameter: Treatment Value: Drought vs. No Drought
  misc_feature: MA Experiment ID: 20000479 Result: Down-regulated in Transcription
  misc_feature: MA Experiment 20000479 PARAMETER Experiment Name: Zm_Drought_P Parameter: Age (day) Value: 10
  misc_feature: MA Experiment 20000479 PARAMETER Experiment Name: Zm_Drought_P Parameter: Organism Value: Zea mays
  misc_feature: MA Experiment 20000479 PARAMETER Experiment Name: Zm_Drought_P Parameter: Plant Line Value: 35A19
  misc_feature: MA Experiment 20000479 PARAMETER Experiment Name: Zm_Drought_P Parameter: Timepoint (hr) Value: 48
  misc_feature: MA Experiment 20000479 PARAMETER Experiment Name: Zm_Drought_P Parameter: Tissue Value: Aerial
  misc_feature: MA Experiment 20000479 PARAMETER Experiment Name: Zm_Drought_P Parameter: Treatment Value: Drought vs. No Drought
  misc_feature: MA Experiment ID: 20000535 Result: Up-regulated in Transcription
  misc_feature: MA Experiment 20000535 PARAMETER Experiment Name: Zm_Hybrid_Seed_Dev_P Parameter: DAP Value: 30 vs. 12
  misc_feature: MA Experiment 20000535 PARAMETER Experiment Name: Zm_Hybrid_Seed_Dev_P Parameter: Organism Value: Zea mays
  misc_feature: MA Experiment 20000535 PARAMETER Experiment Name: Zm_Hybrid_Seed_Dev_P Parameter: Plant Line Value: 35A19
  misc_feature: MA Experiment 20000535 PARAMETER Experiment Name: Zm_Hybrid_Seed_Dev_P Parameter: Tissue Value: Embryo vs. Unfert Floret
aacattgcaccgcatcgtctaagctcgcctgccctttacagcagcttactactacaaagacgacaacacagcgcgcgcgcgccaagctgagctcagctcgtcacgacacgccagcatggtggtgccttccacgacgccggtggtgcgccaagaaacgccaccgccgtcccacgacggcataggcataccgacggtggacctgtcggcgccgggcggccgcggcgcgctgtcgcggcaggtggcgcgcgcgtgcgcgcagcacggcttcttccgggccgtgaaccacggcgtggcgccaggccccgccgcacggctggacgccgccgccaggacgttcttcgcgctggcgccgcacaacaagcagcgcgccggcccgcccagcccactcggatacggctgccgcagcatcggcttcaacggcgacgccggggagctcgagtacctgctgctccacgccaacccggccgccgtcgcgcacagggccagatccatcgacactgatgacccctcgcgcttcagcaatgtggtgaacgagtatgtgggagcgatgaggcagctcgcatgtgagatcctggacctgctcggagaggggctagggctcaaggaccccagatccttcagcaggctcatcgctgacacagacagcgactcactcctgcggataaaccactaccctccaccatgcgccattcacaagcttgaccacgacagtcagtgcaggatgaagaacagtttcaggatcgtggcaggcaatggcgcgaaccagtcggcaggtgcacggatcggattcggggagcactcagacccgcagatccttagcttgctccgatcaaacgatgttgacggccttcaggtgcttctgaacagcgacggcagagaggtgtgggttcaggtgccagccgatccatcagcgttctttgtcaatgttggtgatctcctccaggccttcacaaatgggaaggtgataagcgtccggcacagggtaattgcaagctcgagcagggcgaggctgtcaacgatctacttcgctgcgccgccactgcatgcacgaattttggccctcccagagacagtcacagccaactcacccaggcagtaccggcccttcacctgggccgagtacaagaagacaatgtactccctccgcctcagccacagccgcctcaacctcttccacatcggccatgatgaccacggcaaaggagaacaagaatagggagaaagtggctgaactgcaggcagagagtttatgttggaggcttaggtaggtagaattgtccccaaaattttggctctctggcctccacagccagataatgtctagcagtatgctggttctgccaagtgccaatgggtaatagtatttagcattgtacacaagtccttgttgtatggaactgatgtactattgcctgttttagcagtttgttgtctc

SEQ ID NO: 19382 - protein, 366 aa, Zea mays subsp. mays
  peptide (1)..(366): Ceres Seq. ID no. 12436095
  misc_feature (177)..(307): Pfam Name: 2OG-Fe(II) oxygenase superfamily Pfam Description: 2OG-Fe(II) oxygenase superfamily
  misc_feature (1)..(188): Homolog of NCBI NO: 27261179 NR Description: gibberellin 2-oxidase 2 [Spinacia oleracea]
  misc_feature (1)..(355): Homolog of NCBI NO: 5579092 NR Description: gibberellin 2-oxidase-like protein [Pisum sativum]
  misc_feature (218)..(353): Homolog of NCBI NO: 15217753 NR Description: dioxygenase, putative; protein id: At1g02400.1
  misc_feature (1)..(192): Homolog of NCBI NO: 15217753 NR Description: dioxygenase, putative; protein id: At1g02400.1
  misc_feature (222)..(355): Homolog of NCBI NO: 37544101 NR Description: gibberellin 2-oxidase [Populus alba x Populus
  misc_feature (22)..(201): Homolog of NCBI NO: 37544101 NR Description: gibberellin 2-oxidase [Populus alba x Populus
  misc_feature (21)..(160): Homolog of NCBI NO: 34894880 NR Description: putative OsGA2ox1 [Oryza sativa (japonica
  misc_feature (145)..(363): Homolog of NCBI NO: 34894880 NR Description: putative OsGA2ox1 [Oryza sativa (japonica
  misc_feature (21)..(363): Homolog of NCBI NO: 23491590 NR Description: putative gibberellin 2-oxidase
  misc_feature (1)..(359): Homolog of NCBI NO: 13568428 NR Description: OsGA2ox1 [Oryza sativa]
MVVPSTTPVVRQETPPPSHDGIGIPTVDLSAPGGRGALSRQVARACAQHGFFRAVNHGVAPGPAARLDAAARTFFALAPHNKQRAGPPSPLGYGCRSIGFNGDAGELEYLLLHANPAAVAHRARSIDTDDPSRFSNVVNEYVGAMRQLACEILDLLGEGLGLKDPRSFSRLIADTDSDSLLRINHYPPPCAIHKLDHDSQCRMKNSFRIVAGNGANQSAGARIGFGEHSDPQILSLLRSNDVDGLQVLLNSDGREVWVQVPADPSAFFVNVGDLLQAFTNGKVISVRHRVIASSSRARLSTIYFAAPPLHARILALPETVTANSPRQYRPFTWAEYKKTMYSLRLSHSRLNLFHIGHDDHGKGEQE

SEQ ID NO: 19383 - protein, 222 aa, Zea mays subsp. mays
  peptide (1)..(222): Ceres Seq. ID no. 12436096
  misc_feature (33)..(163): Pfam Name: 2OG-Fe(II) oxygenase superfamily Pfam Description: 2OG-Fe(II) oxygenase superfamily
  misc_feature (1)..(44): Homolog of NCBI NO: 27261179 NR Description: gibberellin 2-oxidase 2 [Spinacia oleracea]
  misc_feature (1)..(211): Homolog of NCBI NO: 5579092 NR Description: gibberellin 2-oxidase-like protein [Pisum sativum]
  misc_feature (74)..(209): Homolog of NCBI NO: 15217753 NR Description: dioxygenase, putative; protein id: At1g02400.1
  misc_feature (1)..(48): Homolog of NCBI NO: 15217753 NR Description: dioxygenase, putative; protein id: At1g02400.1
  misc_feature (78)..(211): Homolog of NCBI NO: 37544101 NR Description: gibberellin 2-oxidase [Populus alba x Populus
  misc_feature (1)..(57): Homolog of NCBI NO: 37544101 NR Description: gibberellin 2-oxidase [Populus alba x Populus
  misc_feature (1)..(16): Homolog of NCBI NO: 34894880 NR Description: putative OsGA2ox1 [Oryza sativa (japonica
  misc_feature (1)..(219): Homolog of NCBI NO: 34894880 NR Description: putative OsGA2ox1 [Oryza sativa (japonica
  misc_feature (1)..(219): Homolog of NCBI NO: 23491590 NR Description: putative gibberellin 2-oxidase
  misc_feature (1)..(215): Homolog of NCBI NO: 13568428 NR Description: OsGA2ox1 [Oryza sativa]
MRQLACEILDLLGEGLGLKDPRSFSRLIADTDSDSLLRINHYPPPCAIHKLDHDSQCRMKNSFRIVAGNGANQSAGARIGFGEHSDPQILSLLRSNDVDGLQVLLNSDGREVWVQVPADPSAFFVNVGDLLQAFTNGKVISVRHRVIASSSRARLSTIYFAAPPLHARILALPETVTANSPRQYRPFTWAEYKKTMYSLRLSHSRLNLFHIGHDDHGKGEQE

SEQ ID NO: 19384 - DNA, 1300 bp, Zea mays subsp. mays
  misc_feature (1)..(1300): Ceres Seq. ID no. 12418940
  misc_feature: MA Experiment ID: 108527 Result: Up-regulated in Transcription
  misc_feature: MA Experiment 108527 PARAMETER Experiment Name: Zm_5mM_NO_P Parameter: Age (day) Value: 8
  misc_feature: MA Experiment 108527 PARAMETER Experiment Name: Zm_5mM_NO_P Parameter: Organism Value: Zea mays
  misc_feature: MA Experiment 108527 PARAMETER Experiment Name: Zm_5mM_NO_P Parameter: Plant Line Value: 35A19
  misc_feature: MA Experiment 108527 PARAMETER Experiment Name: Zm_5mM_NO_P Parameter: Timepoint (hr) Value: 6
  misc_feature: MA Experiment 108527 PARAMETER Experiment Name: Zm_5mM_NO_P Parameter: Tissue Value: Aerial
  misc_feature: MA Experiment 108527 PARAMETER Experiment Name: Zm_5mM_NO_P Parameter: Treatment Value: 5mM NO vs. No Treatment
  misc_feature: MA Experiment ID: 108528 Result: Down-regulated in Transcription
  misc_feature: MA Experiment 108528 PARAMETER Experiment Name: Zm_Imbibed_Seeds_P Parameter: Age (day) Value: 5 vs. 2
  misc_feature: MA Experiment 108528 PARAMETER Experiment Name: Zm_Imbibed_Seeds_P Parameter: Organism Value: Zea mays
  misc_feature: MA Experiment 108528 PARAMETER Experiment Name: Zm_Imbibed_Seeds_P Parameter: Plant Line Value: 35A19
  misc_feature: MA Experiment 108528 PARAMETER Experiment Name: Zm_Imbibed_Seeds_P Parameter: Tissue Value: Aerial vs. Embryo
  misc_feature: MA Experiment ID: 108530 Result: Down-regulated in Transcription
  misc_feature: MA Experiment 108530 PARAMETER Experiment Name: Zm_Imbibed_Seeds_P Parameter: Age (day) Value: 6 vs. 2
  misc_feature: MA Experiment 108530 PARAMETER Experiment Name: Zm_Imbibed_Seeds_P Parameter: Organism Value: Zea mays
  misc_feature: MA Experiment 108530 PARAMETER Experiment Name: Zm_Imbibed_Seeds_P Parameter: Plant Line Value: 35A19
  misc_feature: MA Experiment 108530 PARAMETER Experiment Name: Zm_Imbibed_Seeds_P Parameter: Tissue Value: Aerial vs. Embryo
  misc_feature: MA Experiment ID: 108536 Result: Up-regulated in Transcription
  misc_feature: MA Experiment 108536 PARAMETER Experiment Name: Zm_Meristem_P Parameter: Age (day) Value: 8
  misc_feature: MA Experiment 108536 PARAMETER Experiment Name: Zm_Meristem_P Parameter: Organism Value: Zea mays
  misc_feature: MA Experiment 108536 PARAMETER Experiment Name: Zm_Meristem_P Parameter: Plant Line Value: 35A19
  misc_feature: MA Experiment 108536 PARAMETER Experiment Name: Zm_Meristem_P Parameter: Tissue Value: Shoot Meristem vs. Above Shoot Meristem
  misc_feature: MA Experiment ID: 108544 Result: Down-regulated in Transcription
  misc_feature: MA Experiment ID: 108545 Result: Down-regulated in Transcription
  misc_feature: MA Experiment 108545 PARAMETER Experiment Name: Zm_Imbibed_Seeds_P Parameter: Age (day) Value: 3 vs. 2
  misc_feature: MA Experiment 108545 PARAMETER Experiment Name: Zm_Imbibed_Seeds_P Parameter: Organism Value: Zea mays
  misc_feature: MA Experiment 108545 PARAMETER Experiment Name: Zm_Imbibed_Seeds_P Parameter: Plant Line Value: 35A19
  misc_feature: MA Experiment 108545 PARAMETER Experiment Name: Zm_Imbibed_Seeds_P Parameter: Tissue Value: Aerial vs. Embryo
  misc_feature: MA Experiment ID: 108547 Result: Down-regulated in Transcription
  misc_feature: MA Experiment 108547 PARAMETER Experiment Name: Zm_Imbibed_Seeds_P Parameter: Age (day) Value: 4 vs. 2
  misc_feature: MA Experiment 108547 PARAMETER Experiment Name: Zm_Imbibed_Seeds_P Parameter: Organism Value: Zea mays
  misc_feature: MA Experiment 108547 PARAMETER Experiment Name: Zm_Imbibed_Seeds_P Parameter: Plant Line Value: 35A19
  misc_feature: MA Experiment 108547 PARAMETER Experiment Name: Zm_Imbibed_Seeds_P Parameter: Tissue Value: Aerial vs. Embryo
  misc_feature: MA Experiment ID: 108559 Result: Up-regulated in Transcription
  misc_feature: MA Experiment 108559 PARAMETER Experiment Name: Zm_5mM_NO_P Parameter: Age (day) Value: 8
  misc_feature: MA Experiment 108559 PARAMETER Experiment Name: Zm_5mM_NO_P Parameter: Organism Value: Zea mays
  misc_feature: MA Experiment 108559 PARAMETER Experiment Name: Zm_5mM_NO_P Parameter: Plant Line Value: 35A19
  misc_feature: MA Experiment 108559 PARAMETER Experiment Name: Zm_5mM_NO_P Parameter: Timepoint (hr) Value: 12
  misc_feature: MA Experiment 108559 PARAMETER Experiment Name: Zm_5mM_NO_P Parameter: Tissue Value: Aerial
  misc_feature: MA Experiment 108559 PARAMETER Experiment Name: Zm_5mM_NO_P Parameter: Treatment Value: 5mM NO vs. No Treatment
  misc_feature: MA Experiment ID: 108597 Result: Up-regulated in Transcription
  misc_feature: MA Experiment 108597 PARAMETER Experiment Name: Zm_100uM_ABA_P Parameter: Age (day) Value: 9
  misc_feature: MA Experiment 108597 PARAMETER Experiment Name: Zm_100uM_ABA_P Parameter: Organism Value: Zea mays
  misc_feature: MA Experiment 108597 PARAMETER Experiment Name: Zm_100uM_ABA_P Parameter: Plant Line Value: 35A19
  misc_feature: MA Experiment 108597 PARAMETER Experiment Name: Zm_100uM_ABA_P Parameter: Timepoint (hr) Value: 24
  misc_feature: MA Experiment 108597 PARAMETER Experiment Name: Zm_100uM_ABA_P Parameter: Tissue Value: Aerial
  misc_feature: MA Experiment 108597 PARAMETER Experiment Name: Zm_100uM_ABA_P Parameter: Treatment Value: 100uM ABA vs. No Treatment
  misc_feature: MA Experiment ID: 20000478 Result: Up-regulated in Transcription
  misc_feature: MA Experiment 20000478 PARAMETER Experiment Name: Zm_5mM_SA_P Parameter: Age (day) Value: 11
  misc_feature: MA Experiment 20000478 PARAMETER Experiment Name: Zm_5mM_SA_P Parameter: Organism Value: Zea mays
  misc_feature: MA Experiment 20000478 PARAMETER Experiment Name: Zm_5mM_SA_P Parameter: Plant Line Value: 35A19
  misc_feature: MA Experiment 20000478 PARAMETER Experiment Name: Zm_5mM_SA_P Parameter: Timepoint (hr) Value: 72
  misc_feature: MA Experiment 20000478 PARAMETER Experiment Name: Zm_5mM_SA_P Parameter: Tissue Value: Aerial
  misc_feature: MA Experiment 20000478 PARAMETER Experiment Name: Zm_5mM_SA_P Parameter: Treatment Value: 5mM SA vs. No Treatment
  misc_feature: MA Experiment ID: 20000480 Result: Up-regulated in Transcription
  misc_feature: MA Experiment 20000480 PARAMETER Experiment Name: Zm_Drought_P Parameter: Age (day) Value: 11
  misc_feature: MA Experiment 20000480 PARAMETER Experiment Name: Zm_Drought_P Parameter: Organism Value: Zea mays
  misc_feature: MA Experiment 20000480 PARAMETER Experiment Name: Zm_Drought_P Parameter: Plant Line Value: 35A19
  misc_feature: MA Experiment 20000480 PARAMETER Experiment Name: Zm_Drought_P Parameter: Timepoint (hr) Value: 72
  misc_feature: MA Experiment 20000480 PARAMETER Experiment Name: Zm_Drought_P Parameter: Tissue Value: Aerial
  misc_feature: MA Experiment 20000480 PARAMETER Experiment Name: Zm_Drought_P Parameter: Treatment Value: Drought vs. No Drought
  misc_feature: MA Experiment ID: 20000532 Result: Up-regulated in Transcription
  misc_feature: MA Experiment 20000532 PARAMETER Experiment Name: Zm_0.001percent_MeJA_P Parameter: Age (day) Value: 10
  misc_feature: MA Experiment 20000532 PARAMETER Experiment Name: Zm_0.001percent_MeJA_P Parameter: Organism Value: Zea mays
  misc_feature: MA Experiment 20000532 PARAMETER Experiment Name: Zm_0.001percent_MeJA_P Parameter: Plant Line Value: 35A19
  misc_feature: MA Experiment 20000532 PARAMETER Experiment Name: Zm_0.001percent_MeJA_P Parameter: Timepoint (hr) Value: 48
  misc_feature: MA Experiment 20000532 PARAMETER Experiment Name: Zm_0.001percent_MeJA_P Parameter: Tissue Value: Aerial
  misc_feature: MA Experiment 20000532 PARAMETER Experiment Name: Zm_0.001percent_MeJA_P Parameter: Treatment Value: 0.001percent MeJA vs. No Treatment
  misc_feature: MA Experiment ID: 20000626 Result: Up-regulated in Transcription
  misc_feature: MA Experiment 20000626 PARAMETER Experiment Name: Zm_Herbicide-Treatments_P Parameter: Timepoint (hr) Value: 12
  misc_feature: MA Experiment 20000626 PARAMETER Experiment Name: Zm_Herbicide-Treatments_P Parameter: Tissue Value: Aerial
  misc_feature: MA Experiment 20000626 PARAMETER Experiment Name: Zm_Herbicide-Treatments_P Parameter: Treatment Value: Roundup vs. No Treatment
acggcacggccacagctgactgactcctcctgcgttggctgataatcatggctagagctccgctgctcctcgcgctactgtgcgcgtgcgccgccaatgcggcggggaggaagatggtcggcgtgtacgagctcaaggcgggcgatttctccgtcggcgtcaccaactggggcgccaccatcacctccgttgtgctgccggactccaaaggggatttgtctgacgtcgtgcttggctacgacaccattggaggatacgtgagtggtaaaagctacttcggagcgcttgtcggacgagtggccaacaggatcgccaacgcgcgcttcgtgctcgacggaaaggcttaccatcttttcaagaacgatggcaacaacacgcttcatggtggccatagggggttcagtcaggttgtatggacggttaaagagttcgtcggtggcggtgactcgccctacatcacgttgtactaccacagcttcgatggagaacaaggtttcccaggcgacctggacgtgtacgtgacgtaccagctggcggccccctacgtgctgcgggtgcacatgaacgcgacggccgtgaacaaggcgaccccggtgaacctggcgcagcacacgtactggaacctgggcgggcagggcagcggcgacgtcctccgcaacacggtgcagctgttcgcgtcccggtacacgcccgtgggcggcggcctcatcccgacgggcgcggtggcgcccgtggccggcacgccctacgacttcctcgcgccggccgcggtgggctcgcgcatccgccaggtctccggcggcaaggccggcgtctacggctacgacaccaactacgccgtggacggggagcccggcgcgctgcggaaggtggccgtcgtccgggacggcgcgtccggccgggcgctggagctgtgggccaaccagcctggggtgcagttctacacgggcaacttcctccaggacgtcaaggggaagggcggcaaggtgtaccagcagtacggcgcgctgtgcctcgagacgcaggggttcccggacgccgtcaaccaccctaatttcccctcccagatcgtcaggccggggcaggtgtacaagcacgacatggtgttcaagttctccttctagctgatctgtataggcaacaccctggtccctggctaatcaatctactagtacctgttatgattgccactggcaaagtggcaactgggccttattgggactggagagacacgttacatgattccaagtcaatttgttttgcggaccgtaattaatgtttatcgcaaagattatgtatt

SEQ ID NO: 19385 - protein, 358 aa, Zea mays subsp. mays
  peptide (1)..(358): Ceres Seq. ID no. 12418941
  misc_feature (25)..(354): Pfam Name: Aldose 1-epimerase Pfam Description: Aldose 1-epimerase
  misc_feature (21)..(357): Homolog of NCBI NO: 15242223 NR Description: putative aldose 1-epimerase - like protein
  misc_feature (15)..(357): Homolog of NCBI NO: 7430313 NR Description: probable aldose 1-epimerase (EC 5.1.3.3) - common
  misc_feature (6)..(357): Homolog of NCBI NO: 15228261 NR Description: aldose 1-epimerase - like protein
  misc_feature (6)..(357): Homolog of NCBI NO: 21537069 NR Description: aldose 1-epimerase-like protein [Arabidopsis
  misc_feature (6)..(357): Homolog of NCBI NO: 15824565 NR Description: non-cell-autonomous protein pathway1;
  misc_feature (6)..(357): Homolog of NCBI NO: 15824567 NR Description: non-cell-autonomous protein pathway2;
  misc_feature (1)..(357): Homolog of NCBI NO: 40882679 NR Description: putative aldose 1-epimerase
  misc_feature (1)..(358): Homolog of NCBI NO: 38567884 NR Description: OSJNBa0036B21.19 [Oryza sativa (japonica
  misc_feature (1)..(121): Homolog of NCBI NO: 38567883 NR Description: OSJNBa0036B21.18 [Oryza sativa (japonica
  misc_feature (112)..(358): Homolog of NCBI NO: 38567883 NR Description: OSJNBa0036B21.18 [Oryza sativa (japonica
MARAPLLLALLCACAANAAGRKMVGVYELKAGDFSVGVTNWGATITSVVLPDSKGDLSDVVLGYDTIGGYVSGKSYFGALVGRVANRIANARFVLDGKAYHLFKNDGNNTLHGGHRGFSQVVWTVKEFVGGGDSPYITLYYHSFDGEQGFPGDLDVYVTYQLAAPYVLRVHMNATAVNKATPVNLAQHTYWNLGGQGSGDVLRNTVQLFASRYTPVGGGLIPTGAVAPVAGTPYDFLAPAAVGSRIRQVSGGKAGVYGYDTNYAVDGEPGALRKVAVVRDGASGRALELWANQPGVQFYTGNFLQDVKGKGGKVYQQYGALCLETQGFPDAVNHPNFPSQIVRPGQVYKHDMVFKFSF

SEQ ID NO: 19386 - protein, 336 aa, Zea mays subsp. mays
  peptide (1)..(336): Ceres Seq. ID no. 12418942
  misc_feature (3)..(332): Pfam Name: Aldose 1-epimerase Pfam Description: Aldose 1-epimerase
  misc_feature (1)..(335): Homolog of NCBI NO: 15242223 NR Description: putative aldose 1-epimerase - like protein
  misc_feature (1)..(335): Homolog of NCBI NO: 7430313 NR Description: probable aldose 1-epimerase (EC 5.1.3.3) - common
  misc_feature (1)..(335): Homolog of NCBI NO: 15228261 NR Description: aldose 1-epimerase - like protein
  misc_feature (1)..(335): Homolog of NCBI NO: 21537069 NR Description: aldose 1-epimerase-like protein [Arabidopsis
  misc_feature (1)..(335): Homolog of NCBI NO: 15824565 NR Description: non-cell-autonomous protein pathway1;
  misc_feature (1)..(335): Homolog of NCBI NO: 15824567 NR Description: non-cell-autonomous protein pathway2;
  misc_feature (1)..(335): Homolog of NCBI NO: 40882679 NR Description: putative aldose 1-epimerase
  misc_feature (1)..(336): Homolog of NCBI NO: 38567884 NR Description: OSJNBa0036B21.19 [Oryza sativa (japonica
  misc_feature (1)..(99): Homolog of NCBI NO: 38567883 NR Description: OSJNBa0036B21.18 [Oryza sativa (japonica
  misc_feature (90)..(336): Homolog of NCBI NO: 38567883 NR Description: OSJNBa0036B21.18 [Oryza sativa (japonica
MVGVYELKAGDFSVGVTNWGATITSVVLPDSKGDLSDVVLGYDTIGGYVSGKSYFGALVGRVANRIANARFVLDGKAYHLFKNDGNNTLHGGHRGFSQVVWTVKEFVGGGDSPYITLYYHSFDGEQGFPGDLDVYVTYQLAAPYVLRVHMNATAVNKATPVNLAQHTYWNLGGQGSGDVLRNTVQLFASRYTPVGGGLIPTGAVAPVAGTPYDFLAPAAVGSRIRQVSGGKAGVYGYDTNYAVDGEPGALRKVAVVRDGASGRALELWANQPGVQFYTGNFLQDVKGKGGKVYQQYGALCLETQGFPDAVNHPNFPSQIVRPGQVYKHDMVFKFSF

SEQ ID NO: 19387 - protein, 187 aa, Zea mays subsp. mays
  peptide (1)..(187): Ceres Seq. ID no. 12418943
  misc_feature (1)..(183): Pfam Name: Aldose 1-epimerase Pfam Description: Aldose 1-epimerase
  misc_feature (1)..(186): Homolog of NCBI NO: 37531218 NR Description: putative aldose 1-epimerase - like protein
  misc_feature (1)..(186): Homolog of NCBI NO: 15242223 NR Description: putative aldose 1-epimerase - like protein
  misc_feature (1)..(186): Homolog of NCBI NO: 7430313 NR Description: probable aldose 1-epimerase (EC 5.1.3.3) - common
  misc_feature (1)..(186): Homolog of NCBI NO: 15228261 NR Description: aldose 1-epimerase - like protein
  misc_feature (1)..(186): Homolog of NCBI NO: 21537069 NR Description: aldose 1-epimerase-like protein [Arabidopsis
  misc_feature (1)..(186): Homolog of NCBI NO: 15824565 NR Description: non-cell-autonomous protein pathway1;
  misc_feature (1)..(186): Homolog of NCBI NO: 15824567 NR Description: non-cell-autonomous protein pathway2;
  misc_feature (1)..(186): Homolog of NCBI NO: 40882679 NR Description: putative aldose 1-epimerase
  misc_feature (1)..(187): Homolog of NCBI NO: 38567884 NR Description: OSJNBa0036B21.19 [Oryza sativa (japonica
  misc_feature (1)..(187): Homolog of NCBI NO: 38567883 NR Description: OSJNBa0036B21.18 [Oryza sativa (japonica
MNATAVNKATPVNLAQHTYWNLGGQGSGDVLRNTVQLFASRYTPVGGGLIPTGAVAPVAGTPYDFLAPAAVGSRIRQVSGGKAGVYGYDTNYAVDGEPGALRKVAVVRDGASGRALELWANQPGVQFYTGNFLQDVKGKGGKVYQQYGALCLETQGFPDAVNHPNFPSQIVRPGQVYKHDMVFKFSF

SEQ ID NO: 19388 - DNA, 2127 bp, Zea mays subsp. mays
  misc_feature (1)..(2127): Ceres Seq. ID no. 12436087
  misc_feature: MA Experiment ID: 108536 Result: Up-regulated in Transcription
  misc_feature: MA Experiment 108536 PARAMETER Experiment Name: Zm_Meristem_P Parameter: Age (day) Value: 8
  misc_feature: MA Experiment 108536 PARAMETER Experiment Name: Zm_Meristem_P Parameter: Organism Value: Zea mays
  misc_feature: MA Experiment 108536 PARAMETER Experiment Name: Zm_Meristem_P Parameter: Plant Line Value: 35A19
  misc_feature: MA Experiment 108536 PARAMETER Experiment Name: Zm_Meristem_P Parameter: Tissue Value: Shoot Meristem vs. Above Shoot Meristem
  misc_feature: MA Experiment ID: 20000629 Result: Up-regulated in Transcription
  misc_feature: MA Experiment 20000629 PARAMETER Experiment Name: Zm_Herbicide-Treatments_P Parameter: Timepoint (hr) Value: 12
  misc_feature: MA Experiment 20000629 PARAMETER Experiment Name: Zm_Herbicide-Treatments_P Parameter: Tissue Value: Aerial
  misc_feature: MA Experiment 20000629 PARAMETER Experiment Name: Zm_Herbicide-Treatments_P Parameter: Treatment Value: Trimec vs. No Treatment
  misc_feature: MA Experiment ID: 20000633 Result: Up-regulated in Transcription
  misc_feature: MA Experiment 20000633 PARAMETER Experiment Name: Zm_Herbicide-Treatments_P Parameter: Timepoint (hr) Value: 4
  misc_feature: MA Experiment 20000633 PARAMETER Experiment Name: Zm_Herbicide-Treatments_P Parameter: Tissue Value: Aerial
  misc_feature: MA Experiment 20000633 PARAMETER Experiment Name: Zm_Herbicide-Treatments_P Parameter: Treatment Value: Trimec vs. No Treatment
accacgtctcccctcacctggctctccccctgccacctcacgcgcgcccctgctctgtctcttttggctccgctgaggccgagcacacacaacaaattctctctctcctctctcactctctctctctctcacacacactctgctccctgtgcggaggacgggccggccgcatggggtgggggtggacggcgctggcggcggccgcgatggcgtacgtggcggtgaagctgatggaggtgctgtggtggcggccgcggcggctggagcagcacttcgcgcggcaggggatcaggggcccccgctaccgcttcttcgtcggctgcgtccgcgagatggtggcgctcatggtggccgcctccgccaagccaatgccgcgtccctaccgctcccacaacgtcctcccgcgcgtcctcgccttctaccaccactggaagaaaatctacggttccacgttcctgatatggttcggcccgacgccgaggctcgccgtcgccgacccggacctcatccgggagatcctcctgtcccgcgccgaccaattcgaccgctacgagtcgcacccgatggtgcgccagctcgagggcgaggggctcgtcagcctgcgcggcgacaagtgggcgcaccgccgcaaggtgctcacgccggcgttccacatggagaacctcaagctgctgctgccgttcgtcgggaggacggtggtcgacgtggtggacaagtggcacgacatggccgccgcggcgtccggcgaggtcgagatcgacgtgtccgagtggttccaggtggtgacggaggacgccatcacccgtacggcgttcggccggagctacgaggacggcaaggccgttttcaagctccagacccagctcatggccttcgcctccgaggcgtttcgcaaggtcttcatccctggatacaggttcctgccgaccaagaagaacacgacctcgtggaagctggacaaggagatcaggaagaacctggcgacgctgatcggccggcggcaggaagccgcggacgacgagaagctcagcggctgtgccaaggacctccncggcctcctgatcaacgcgggcagcaacggcggcaaggtgagccccatcaccgngaacgacatagtggaggagtgcaagacgttcttcttcgcgggcaagcagaccacgtcgaacctcctgacatggaccacagtcctgctcgccatgcaccccgagtggcaggagctcgcccgtcaggaggtgctccaagtctgcggggcgcgtgacatcccttcccgcgagcagctcaccaagctcaagacactcgggatgatcctgaacgagacgctgcggctgtacccgccggcggtggcgacggtgcgtcgcgccaaggcggacgtggagctgggcgggtgcctgatcccgcgcggcacggagctgctgatcccgatcatggccatgcaccacgacgcgcggctgtgggggccggacgccacgcagttcaacccggcgcggttcgccaggggcgcggcgcangcggccaggcaccccacggcgttcatcccgttcgggctgggcgcgcggatgtgcatcggccagaacctggcgctcctggagtccaagctcacgctggccatcgtcctccagcggttcgacttccggctgtcgcccagctacctccacgcgccgacggtgctgatgctcctccacccgcagtacggggcgcccgtggtcttccggccgcgaccgtctgagccgtccgattccgattgcgacagtagggatgtgtgaggagatgacggagctcgtactaaccttgtcagtgtcaattgcgcctggcatgatgaccaataaccacctccgcagcatgctgctttgccctcaagggcaaacgagcagagcagccgccgccacgccgccaccgccaccgcccagcaccaccggaggaacaagtgactagaaggagcaccaccgtaccgtactaagtactaacaaatatatcctgctgaaggtgccagcagcagcttagactagtagagcagagtagaaggcttgaccagtgcctcccaatttttcagtcatttgggttgatgatttccttccttccatgaggttttgccaggtgtggttggtgtatgaaggattgcaaaattgt

SEQ ID NO: 19389 - protein, 586 aa, Zea mays subsp. mays
  peptide (1)..(586): Ceres Seq. ID no. 12436088
  misc_feature (61)..(570): Homolog of NCBI NO: 13661766 NR Description: putative cytochrome P450 [Lolium rigidum]
  misc_feature (63)..(567): Homolog of NCBI NO: 21842133 NR Description: cytochrome P450 monooxygenase CYP72A16 [Zea mays
  misc_feature (61)..(570): Homolog of NCBI NO: 13661774 NR Description: putative cytochrome P450 [Lolium rigidum]
  misc_feature (61)..(570): Homolog of NCBI NO: 13661772 NR Description: putative cytochrome P450 [Lolium rigidum]
  misc_feature (63)..(567): Homolog of NCBI NO: 34912882 NR Description: putative cytochrome P450 [Oryza sativa (japonica
  misc_feature (62)..(567): Homolog of NCBI NO: 21805645 NR Description: cytochrome P450 monooxygenase CYP72A5 [Zea mays
  misc_feature (59)..(574): Homolog of NCBI NO: 34898914 NR Description: putative cytochrome P450 [Oryza sativa (japonica
  misc_feature (69)..(570): Homolog of NCBI NO: 15225777 NR Description: cytochrome P450, putative; protein id:
  misc_feature (57)..(149): Homolog of NCBI NO: 34896248 NR Description: OSJNBb0008D07.14 [Oryza sativa (japonica
  misc_feature (148)..(582): Homolog of NCBI NO: 34896248 NR Description: OSJNBb0008D07.14 [Oryza sativa (japonica
  misc_feature (350)..(350): Xaa is any aa, unknown or other
  misc_feature (368)..(368): Xaa is any aa, unknown or other
  misc_feature (502)..(502): Xaa is any aa, unknown or other
HVSPHLALPLPPHARPCSVSFGSAEAEHTQQILSLLSHSLSLSHTLCSLCGGRAGRMGWGWTALAAAAMAYVAVKLMEVLWWRPRRLEQHFARQGIRGPRYRFFVGCVREMVALMVAASAKPMPRPYRSHNVLPRVLAFYHHWKKIYGSTFLIWFGPTPRLAVADPDLIREILLSRADQFDRYESHPMVRQLEGEGLVSLRGDKWAHRRKVLTPAFHMENLKLLLPFVGRTVVDVVDKWHDMAAAASGEVEIDVSEWFQVVTEDAITRTAFGRSYEDGKAVFKLQTQLMAFASEAFRKVFIPGYRFLPTKKNTTSWKLDKEIRKNLATLIGRRQEAADDEKLSGCAKDLXGLLINAGSNGGKVSPITXNDIVEECKTFFFAGKQTTSNLLTWTTVLLAMHPEWQELARQEVLQVCGARDIPSREQLTKLKTLGMILNETLRLYPPAVATVRRAKADVELGGCLIPRGTELLIPIMAMHHDARLWGPDATQFNPARFARGAAXAARHPTAFIPFGLGARMCIGQNLALLESKLTLAIVLQRFDFRLSPSYLHAPTVLMLLHPQYGAPVVFRPRPSEPSDSDCDSRDV

SEQ ID NO: 19390 - protein, 530 aa, Zea mays subsp. mays
  peptide (1)..(530): Ceres Seq. ID no. 12436089
  misc_feature (5)..(514): Homolog of NCBI NO: 13661766 NR Description: putative cytochrome P450 [Lolium rigidum]
  misc_feature (7)..(511): Homolog of NCBI NO: 21842133 NR Description: cytochrome P450 monooxygenase CYP72A16 [Zea mays
  misc_feature (5)..(514): Homolog of NCBI NO: 13661774 NR Description: putative cytochrome P450 [Lolium rigidum]
  misc_feature (5)..(514): Homolog of NCBI NO: 13661772 NR Description: putative cytochrome P450 [Lolium rigidum]
  misc_feature (7)..(511): Homolog of NCBI NO: 34912882 NR Description: putative cytochrome P450 [Oryza sativa (japonica
  misc_feature (6)..(511): Homolog of NCBI NO: 21805645 NR Description: cytochrome P450 monooxygenase CYP72A5 [Zea mays
  misc_feature (3)..(518): Homolog of NCBI NO: 34898914 NR Description: putative cytochrome P450 [Oryza sativa (japonica
  misc_feature (13)..(514): Homolog of NCBI NO: 15225777 NR Description: cytochrome P450, putative; protein id:
  misc_feature (1)..(93): Homolog of NCBI NO: 34896248 NR Description: OSJNBb0008D07.14 [Oryza sativa (japonica
  misc_feature (92)..(526): Homolog of NCBI NO: 34896248 NR Description: OSJNBb0008D07.14 [Oryza sativa (japonica
  misc_feature (294)..(294): Xaa is any aa, unknown or other
  misc_feature (312)..(312): Xaa is any aa, unknown or other
  misc_feature (446)..(446): Xaa is any aa, unknown or other
MGWGWTALAAAAMAYVAVKLMEVLWWRPRRLEQHFARQGIRGPRYRFFVGCVREMVALMVAASAKPMPRPYRSHNVLPRVLAFYHHWKKIYGSTFLIWFGPTPRLAVADPDLIREILLSRADQFDRYESHPMVRQLEGEGLVSLRGDKWAHRRKVLTPAFHMENLKLLLPFVGRTVVDVVDKWHDMAAAASGEVEIDVSEWFQVVTEDAITRTAFGRSYEDGKAVFKLQTQLMAFASEAFRKVFIPGYRFLPTKKNTTSWKLDKEIRKNLATLIGRRQEAADDEKLSGCAKDLXGLLINAGSNGGKVSPITXNDIVEECKTFFFAGKQTTSNLLTWTTVLLAMHPEWQELARQEVLQVCGARDIPSREQLTKLKTLGMILNETLRLYPPAVATVRRAKADVELGGCLIPRGTELLIPIMAMHHDARLWGPDATQFNPARFARGAAXAARHPTAFIPFGLGARMCIGQNLALLESKLTLAIVLQRFDFRLSPSYLHAPTVLMLLHPQYGAPVVFRPRPSEPSDSDCDSRDV

SEQ ID NO: 19391 - protein, 518 aa, Zea mays subsp. mays
  peptide (1)..(518): Ceres Seq. ID no. 12436090
  misc_feature (1)..(502): Homolog of NCBI NO: 13661766 NR Description: putative cytochrome P450 [Lolium rigidum]
  misc_feature (1)..(499): Homolog of NCBI NO: 21842133 NR Description: cytochrome P450 monooxygenase CYP72A16 [Zea mays
  misc_feature (1)..(502): Homolog of NCBI NO: 13661774 NR Description: putative cytochrome P450 [Lolium rigidum]
  misc_feature (1)..(502): Homolog of NCBI NO: 13661772 NR Description: putative cytochrome P450 [Lolium rigidum]
  misc_feature (1)..(499): Homolog of NCBI NO: 34912882 NR Description: putative cytochrome P450 [Oryza sativa (japonica
  misc_feature (1)..(499): Homolog of NCBI NO: 21805645 NR Description: cytochrome P450 monooxygenase CYP72A5 [Zea mays
  misc_feature (1)..(506): Homolog of NCBI NO: 34898914 NR Description: putative cytochrome P450 [Oryza sativa (japonica
  misc_feature (1)..(502): Homolog of NCBI NO: 15225777 NR Description: cytochrome P450, putative; protein id:
  misc_feature (1)..(81): Homolog of NCBI NO: 34896248 NR Description: OSJNBb0008D07.14 [Oryza sativa (japonica
  misc_feature (80)..(514): Homolog of NCBI NO: 34896248 NR Description: OSJNBb0008D07.14 [Oryza sativa (japonica
  misc_feature (282)..(282): Xaa is any aa, unknown or other
  misc_feature (300)..(300): Xaa is any aa, unknown or other
  misc_feature (434)..(434): Xaa is any aa, unknown or other
MAYVAVKLMEVLWWRPRRLEQHFARQGIRGPRYRFFVGCVREMVALMVAASAKPMPRPYRSHNVLPRVLAFYHHWKKIYGSTFLIWFGPTPRLAVADPDLIREILLSRADQFDRYESHPMVRQLEGEGLVSLRGDKWAHRRKVLTPAFHMENLKLLLPFVGRTVVDVVDKWHDMAAAASGEVEIDVSEWFQVVTEDAITRTAFGRSYEDGKAVFKLQTQLMAFASEAFRKVFIPGYRFLPTKKNTTSWKLDKEIRKNLATLIGRRQEAADDEKLSGCAKDLXGLLINAGSNGGKVSPITXNDIVEECKTFFFAGKQTTSNLLTWTTVLLAMHPEWQELARQEVLQVCGARDIPSREQLTKLKTLGMILNETLRLYPPAVATVRRAKADVELGGCLIPRGTELLIPIMAMHHDARLWGPDATQFNPARFARGAAXAARHPTAFIPFGLGARMCIGQNLALLESKLTLAIVLQRFDFRLSPSYLHAPTVLMLLHPQYGAPVVFRPRPSEPSDSDCDSRDV

SEQ ID NO: 19392 - DNA, 448 bp, Zea mays subsp. mays
  misc_feature (1)..(448): Ceres Seq. ID no. 4616522
  misc_feature: MA Experiment ID: 108527 Result: Down-regulated in Transcription
  misc_feature: MA Experiment 108527 PARAMETER Experiment Name: Zm_5mM_NO_P Parameter: Age (day) Value: 8
  misc_feature: MA Experiment 108527 PARAMETER Experiment Name: Zm_5mM_NO_P Parameter: Organism Value: Zea mays
  misc_feature: MA Experiment 108527 PARAMETER Experiment Name: Zm_5mM_NO_P Parameter: Plant Line Value: 35A19
  misc_feature: MA Experiment 108527 PARAMETER Experiment Name: Zm_5mM_NO_P Parameter: Timepoint (hr) Value: 6
  misc_feature: MA Experiment 108527 PARAMETER Experiment Name: Zm_5mM_NO_P Parameter: Tissue Value: Aerial
  misc_feature: MA Experiment 108527 PARAMETER Experiment Name: Zm_5mM_NO_P Parameter: Treatment Value: 5mM NO vs. No Treatment
  misc_feature: MA Experiment ID: 108528 Result: Up-regulated in Transcription
  misc_feature: MA Experiment 108528 PARAMETER Experiment Name: Zm_Imbibed_Seeds_P Parameter: Age (day) Value: 5 vs. 2
  misc_feature: MA Experiment 108528 PARAMETER Experiment Name: Zm_Imbibed_Seeds_P Parameter: Organism Value: Zea mays
  misc_feature: MA Experiment 108528 PARAMETER Experiment Name: Zm_Imbibed_Seeds_P Parameter: Plant Line Value: 35A19
  misc_feature: MA Experiment 108528 PARAMETER Experiment Name: Zm_Imbibed_Seeds_P Parameter: Tissue Value: Aerial vs. Embryo
  misc_feature: MA Experiment ID: 108530 Result: Up-regulated in Transcription
  misc_feature: MA Experiment 108530 PARAMETER Experiment Name: Zm_Imbibed_Seeds_P Parameter: Age (day) Value: 6 vs. 2
  misc_feature: MA Experiment 108530 PARAMETER Experiment Name: Zm_Imbibed_Seeds_P Parameter: Organism Value: Zea mays
  misc_feature: MA Experiment 108530 PARAMETER Experiment Name: Zm_Imbibed_Seeds_P Parameter: Plant Line Value: 35A19
  misc_feature: MA Experiment 108530 PARAMETER Experiment Name: Zm_Imbibed_Seeds_P Parameter: Tissue Value: Aerial vs. Embryo
  misc_feature: MA Experiment ID: 108536 Result: Down-regulated in Transcription
  misc_feature: MA Experiment 108536 PARAMETER Experiment Name: Zm_Meristem_P Parameter: Age (day) Value: 8
  misc_feature: MA Experiment 108536 PARAMETER Experiment Name: Zm_Meristem_P Parameter: Organism Value: Zea mays
  misc_feature: MA Experiment 108536 PARAMETER Experiment Name: Zm_Meristem_P Parameter: Plant Line Value: 35A19
  misc_feature: MA Experiment 108536 PARAMETER Experiment Name: Zm_Meristem_P Parameter: Tissue Value: Shoot Meristem vs. Above Shoot Meristem
  misc_feature: MA Experiment ID: 108545 Result: Up-regulated in Transcription
  misc_feature: MA Experiment 108545 PARAMETER Experiment Name: Zm_Imbibed_Seeds_P Parameter: Age (day) Value: 3 vs. 2
  misc_feature: MA Experiment 108545 PARAMETER Experiment Name: Zm_Imbibed_Seeds_P Parameter: Organism Value: Zea mays
  misc_feature: MA Experiment 108545 PARAMETER Experiment Name: Zm_Imbibed_Seeds_P Parameter: Plant Line Value: 35A19
  misc_feature: MA Experiment 108545 PARAMETER Experiment Name: Zm_Imbibed_Seeds_P Parameter: Tissue Value: Aerial vs. Embryo
  misc_feature: MA Experiment ID: 108547 Result: Up-regulated in Transcription
  misc_feature: MA Experiment 108547 PARAMETER Experiment Name: Zm_Imbibed_Seeds_P Parameter: Age (day) Value: 4 vs. 2
  misc_feature: MA Experiment 108547 PARAMETER Experiment Name: Zm_Imbibed_Seeds_P Parameter: Organism Value: Zea mays
  misc_feature: MA Experiment 108547 PARAMETER Experiment Name: Zm_Imbibed_Seeds_P Parameter: Plant Line Value: 35A19
  misc_feature: MA Experiment 108547 PARAMETER Experiment Name: Zm_Imbibed_Seeds_P Parameter: Tissue Value: Aerial vs. Embryo
  misc_feature: MA Experiment ID: 108556 Result: Down-regulated in Transcription
  misc_feature: MA Experiment 108556 PARAMETER Experiment Name: Zm_Drought_P Parameter: Age (day) Value: 9
  misc_feature: MA Experiment 108556 PARAMETER Experiment Name: Zm_Drought_P Parameter: Organism Value: Zea mays
  misc_feature: MA Experiment 108556 PARAMETER Experiment Name: Zm_Drought_P Parameter: Plant Line Value: 35A19
  misc_feature: MA Experiment 108556 PARAMETER Experiment Name: Zm_Drought_P Parameter: Timepoint (hr) Value: 24
  misc_feature: MA Experiment 108556 PARAMETER Experiment Name: Zm_Drought_P Parameter: Tissue Value: Aerial
  misc_feature: MA Experiment 108556 PARAMETER Experiment Name: Zm_Drought_P Parameter: Treatment Value: Drought vs. No Drought
  misc_feature: MA Experiment ID: 108559 Result: Down-regulated in Transcription
  misc_feature: MA Experiment 108559 PARAMETER Experiment Name: Zm_5mM_NO_P Parameter: Age (day) Value: 8
  misc_feature: MA Experiment 108559 PARAMETER Experiment Name: Zm_5mM_NO_P Parameter: Organism Value: Zea mays
  misc_feature: MA Experiment 108559 PARAMETER Experiment Name: Zm_5mM_NO_P Parameter: Plant Line Value: 35A19
  misc_feature: MA Experiment 108559 PARAMETER Experiment Name: Zm_5mM_NO_P Parameter: Timepoint (hr) Value: 12
  misc_feature: MA Experiment 108559 PARAMETER Experiment Name: Zm_5mM_NO_P Parameter: Tissue Value: Aerial
  misc_feature: MA Experiment 108559 PARAMETER Experiment Name: Zm_5mM_NO_P Parameter: Treatment Value: 5mM NO vs. No Treatment
  misc_feature: MA Experiment ID: 108597 Result: Down-regulated in Transcription
  misc_feature: MA Experiment 108597 PARAMETER Experiment Name: Zm_100uM_ABA_P Parameter: Age (day) Value: 9
  misc_feature: MA Experiment 108597 PARAMETER Experiment Name: Zm_100uM_ABA_P Parameter: Organism Value: Zea mays
  misc_feature: MA Experiment 108597 PARAMETER Experiment Name: Zm_100uM_ABA_P Parameter: Plant Line Value: 35A19
  misc_feature: MA Experiment 108597 PARAMETER Experiment Name: Zm_100uM_ABA_P Parameter: Timepoint (hr) Value: 24
  misc_feature: MA Experiment 108597 PARAMETER Experiment Name: Zm_100uM_ABA_P Parameter: Tissue Value: Aerial
  misc_feature: MA Experiment 108597 PARAMETER Experiment Name: Zm_100uM_ABA_P Parameter: Treatment Value: 100uM ABA vs. No Treatment
  misc_feature: MA Experiment ID: 108687 Result: Down-regulated in Transcription
  misc_feature: MA Experiment 108687 PARAMETER Experiment Name: Zm_Embryos-Flowers__P Parameter: Tissue Value: Embryo vs. Aerial+
  misc_feature: MA Experiment ID: 20000477 Result: Down-regulated in Transcription
  misc_feature: MA Experiment 20000477 PARAMETER Experiment Name: Zm_5mM_SA_P Parameter: Age (day) Value: 10
  misc_feature: MA Experiment 20000477 PARAMETER Experiment Name: Zm_5mM_SA_P Parameter: Organism Value: Zea mays
  misc_feature: MA Experiment 20000477 PARAMETER Experiment Name: Zm_5mM_SA_P Parameter: Plant Line Value: 35A19
  misc_feature: MA Experiment 20000477 PARAMETER Experiment Name: Zm_5mM_SA_P Parameter: Timepoint (hr) Value: 48
  misc_feature: MA Experiment 20000477 PARAMETER Experiment Name: Zm_5mM_SA_P Parameter: Tissue Value: Aerial
  misc_feature: MA Experiment 20000477 PARAMETER Experiment Name: Zm_5mM_SA_P Parameter: Treatment Value: 5mM SA vs. No Treatment
  misc_feature: MA Experiment ID: 20000479 Result: Down-regulated in Transcription
  misc_feature: MA Experiment 20000479 PARAMETER Experiment Name: Zm_Drought_P Parameter: Age (day) Value: 10
  misc_feature: MA Experiment 20000479 PARAMETER Experiment Name: Zm_Drought_P Parameter: Organism Value: Zea mays
  misc_feature: MA Experiment 20000479 PARAMETER Experiment Name: Zm_Drought_P Parameter: Plant Line Value: 35A19
  misc_feature: MA Experiment 20000479 PARAMETER Experiment Name: Zm_Drought_P Parameter: Timepoint (hr) Value: 48
  misc_feature: MA Experiment 20000479 PARAMETER Experiment Name: Zm_Drought_P Parameter: Tissue Value: Aerial
  misc_feature: MA Experiment 20000479 PARAMETER Experiment Name: Zm_Drought_P Parameter: Treatment Value: Drought vs. No Drought
  misc_feature: MA Experiment ID: 20000480 Result: Down-regulated in Transcription
  misc_feature: MA Experiment 20000480 PARAMETER Experiment Name: Zm_Drought_P Parameter: Age (day) Value: 11
  misc_feature: MA Experiment 20000480 PARAMETER Experiment Name: Zm_Drought_P Parameter: Organism Value: Zea mays
  misc_feature: MA Experiment 20000480 PARAMETER Experiment Name: Zm_Drought_P Parameter: Plant Line Value: 35A19
  misc_feature: MA Experiment 20000480 PARAMETER Experiment Name: Zm_Drought_P Parameter: Timepoint (hr) Value: 72
  misc_feature: MA Experiment 20000480 PARAMETER Experiment Name: Zm_Drought_P Parameter: Tissue Value: Aerial
  misc_feature: MA Experiment 20000480 PARAMETER Experiment Name: Zm_Drought_P Parameter: Treatment Value: Drought vs. No Drought
  misc_feature: MA Experiment ID: 20000492 Result: Down-regulated in Transcription
  misc_feature: MA Experiment 20000492 PARAMETER Experiment Name: Zm_Hybrid_Seed_Dev_P Parameter: DAP Value: 12
  misc_feature: MA Experiment 20000492 PARAMETER Experiment Name: Zm_Hybrid_Seed_Dev_P Parameter: Organism Value: Zea mays
  misc_feature: MA Experiment 20000492 PARAMETER Experiment Name: Zm_Hybrid_Seed_Dev_P Parameter: Plant Line Value: 35A19
  misc_feature: MA Experiment 20000492 PARAMETER Experiment Name: Zm_Hybrid_Seed_Dev_P Parameter: Tissue Value: Fert Kernel vs. Unfert Floret
  misc_feature: MA Experiment ID: 20000535 Result: Down-regulated in Transcription
  misc_feature: MA Experiment 20000535 PARAMETER Experiment Name: Zm_Hybrid_Seed_Dev_P Parameter: DAP Value: 30 vs. 12
  misc_feature: MA Experiment 20000535 PARAMETER Experiment Name: Zm_Hybrid_Seed_Dev_P Parameter: Organism Value: Zea mays
  misc_feature: MA Experiment 20000535 PARAMETER Experiment Name: Zm_Hybrid_Seed_Dev_P Parameter: Plant Line Value: 35A19
  misc_feature: MA Experiment 20000535 PARAMETER Experiment Name: Zm_Hybrid_Seed_Dev_P Parameter: Tissue Value: Embryo vs. Unfert Floret
  misc_feature: MA Experiment ID: 20000626 Result: Down-regulated in Transcription
  misc_feature: MA Experiment 20000626 PARAMETER Experiment Name: Zm_Herbicide-Treatments_P Parameter: Timepoint (hr) Value: 12
  misc_feature: MA Experiment 20000626 PARAMETER Experiment Name: Zm_Herbicide-Treatments_P Parameter: Tissue Value: Aerial
  misc_feature: MA Experiment 20000626 PARAMETER Experiment Name: Zm_Herbicide-Treatments_P Parameter: Treatment Value: Roundup vs. No Treatment
gcgtccattccacctgcttggtccatcagcagcgagcgaacagggaaaaaggagaggccgagaagcgctttagcgataagactggtgcacccgtagcggcacggcatggcggccacggcgtactccgtggcgctcctcggcggcgcacgcctgccggccgccctcctccctcggcgcagcagcgtgtgccaccagcagcttcgcctccaagacgcgccgaggctctccctgcaccgtgccagggccgcttccgaggacacgtcggcctccggcggcgacgagctcatcgaagacctcaaggcaaagtgggacgccgttgaggacaagcccaccgtcctcctgtacggcggcggcgccgtcgtggcgctatggttgacgtccgttgttgtcggcgccatcaacgccgtgccgctgctccccaagatcctggagctcgtcggcctcgtct

SEQ ID NO: 19393 - protein, 114 aa, Zea mays subsp. mays
  peptide (1)..(114): Ceres Seq. ID no. 4616523
  misc_feature (46)..(113): Homolog of NCBI NO: 18420175 NR Description: expressed protein
  misc_feature (46)..(113): Homolog of NCBI NO: 7485852 NR Description: hypothetical protein F20D10.220 - Arabidopsis
  misc_feature (1)..(113): Homolog of NCBI NO: 38175474 NR Description: unknown protein [Oryza sativa (japonica
  misc_feature (39)..(113): Homolog of NCBI NO: 687677 NR Description: unknown
  misc_feature (39)..(113): Homolog of NCBI NO: 18411555 NR Description: expressed protein
MAATAYSVALLGGARLPAALLPRRSSVCHQQLRLQDAPRLSLHRARAASEDTSASGGDELIEDLKAKWDAVEDKPTVLLYGGGAVVALWLTSVVVGAINAVPLLPKILELVGLV

SEQ ID NO: 19394 - protein, 105 aa, Zea mays subsp. mays
  peptide (1)..(105): Ceres Seq. ID no. 4616524
VHSTCLVHQQRANREKGEAEKRFSDKTGAPVAARHGGHGVLRGAPRRRTPAGRPPPSAQQRVPPAASPPRRAEALPAPCQGRFRGHVGLRRRRAHRRPQGKVGRR

SEQ ID NO: 19395 - DNA, 1649 bp, Zea mays subsp. mays
  misc_feature (1)..(1649): Ceres Seq. ID no. 12364563
  misc_feature: MA Experiment ID: 108504 Result: Up-regulated in Transcription
  misc_feature: MA Experiment 108504 PARAMETER Experiment Name: Zm_Drought_P Parameter: Age (day) Value: 8
  misc_feature: MA Experiment 108504 PARAMETER Experiment Name: Zm_Drought_P Parameter: Organism Value: Zea mays
  misc_feature: MA Experiment 108504 PARAMETER Experiment Name: Zm_Drought_P Parameter: Plant Line Value: 35A19
  misc_feature: MA Experiment 108504 PARAMETER Experiment Name: Zm_Drought_P Parameter: Timepoint (hr) Value: 12
  misc_feature: MA Experiment 108504 PARAMETER Experiment Name: Zm_Drought_P Parameter: Tissue Value: Aerial
  misc_feature: MA Experiment 108504 PARAMETER Experiment Name: Zm_Drought_P Parameter: Treatment Value: Drought vs. No Drought
  misc_feature: MA Experiment ID: 108527 Result: Up-regulated in Transcription
  misc_feature: MA Experiment 108527 PARAMETER Experiment Name: Zm_5mM_NO_P Parameter: Age (day) Value: 8
  misc_feature: MA Experiment 108527 PARAMETER Experiment Name: Zm_5mM_NO_P Parameter: Organism Value: Zea mays
  misc_feature: MA Experiment 108527 PARAMETER Experiment Name: Zm_5mM_NO_P Parameter: Plant Line Value: 35A19
  misc_feature: MA Experiment 108527 PARAMETER Experiment Name: Zm_5mM_NO_P Parameter: Timepoint (hr) Value: 6
  misc_feature: MA Experiment 108527 PARAMETER Experiment Name: Zm_5mM_NO_P Parameter: Tissue Value: Aerial
  misc_feature: MA Experiment 108527 PARAMETER Experiment Name: Zm_5mM_NO_P Parameter: Treatment Value: 5mM NO vs. No Treatment
  misc_feature: MA Experiment ID: 108540 Result: Up-regulated in Transcription
  misc_feature: MA Experiment 108540 PARAMETER Experiment Name: Zm_20percent_PEG_P Parameter: Age (day) Value: 8
  misc_feature: MA Experiment 108540 PARAMETER Experiment Name: Zm_20percent_PEG_P Parameter: Organism Value: Zea mays
  misc_feature: MA Experiment 108540 PARAMETER Experiment Name: Zm_20percent_PEG_P Parameter: Plant Line Value: 35A19
  misc_feature: MA Experiment 108540 PARAMETER Experiment Name: Zm_20percent_PEG_P Parameter: Timepoint (hr) Value: 6
  misc_feature: MA Experiment 108540 PARAMETER Experiment Name: Zm_20percent_PEG_P Parameter: Tissue Value: Aerial
  misc_feature: MA Experiment 108540 PARAMETER Experiment Name: Zm_20percent_PEG_P Parameter: Treatment Value: 20percent PEG vs. No Treatment
  misc_feature: MA Experiment ID: 108556 Result: Up-regulated in Transcription
  misc_feature: MA Experiment 108556 PARAMETER Experiment Name: Zm_Drought_P Parameter: Age (day) Value: 9
  misc_feature: MA Experiment 108556 PARAMETER Experiment Name: Zm_Drought_P Parameter: Organism Value: Zea mays
  misc_feature: MA Experiment 108556 PARAMETER Experiment Name: Zm_Drought_P Parameter: Plant Line Value: 35A19
  misc_feature: MA Experiment 108556 PARAMETER Experiment Name: Zm_Drought_P Parameter: Timepoint (hr) Value: 24
  misc_feature: MA Experiment 108556 PARAMETER Experiment Name: Zm_Drought_P Parameter: Tissue Value: Aerial
  misc_feature: MA Experiment 108556 PARAMETER Experiment Name: Zm_Drought_P Parameter: Treatment Value: Drought vs. No Drought
  misc_feature: MA Experiment ID: 108559 Result: Up-regulated in Transcription
  misc_feature: MA Experiment 108559 PARAMETER Experiment Name: Zm_5mM_NO_P Parameter: Age (day) Value: 8
  misc_feature: MA Experiment 108559 PARAMETER Experiment Name: Zm_5mM_NO_P Parameter: Organism Value: Zea mays
  misc_feature: MA Experiment 108559 PARAMETER Experiment Name: Zm_5mM_NO_P Parameter: Plant Line Value: 35A19
  misc_feature: MA Experiment 108559 PARAMETER Experiment Name: Zm_5mM_NO_P Parameter: Timepoint (hr) Value: 12
  misc_feature: MA Experiment 108559 PARAMETER Experiment Name: Zm_5mM_NO_P Parameter: Tissue Value: Aerial
  misc_feature: MA Experiment 108559 PARAMETER Experiment Name: Zm_5mM_NO_P Parameter: Treatment Value: 5mM NO vs. No Treatment
  misc_feature: MA Experiment ID: 20000478 Result: Up-regulated in Transcription
  misc_feature: MA Experiment 20000478 PARAMETER Experiment Name: Zm_5mM_SA_P Parameter: Age (day) Value: 11
  misc_feature: MA Experiment 20000478 PARAMETER Experiment Name: Zm_5mM_SA_P Parameter: Organism Value: Zea mays
  misc_feature: MA Experiment 20000478 PARAMETER Experiment Name: Zm_5mM_SA_P Parameter: Plant Line Value: 35A19
  misc_feature: MA Experiment 20000478 PARAMETER Experiment Name: Zm_5mM_SA_P Parameter: Timepoint (hr) Value: 72
  misc_feature: MA Experiment 20000478 PARAMETER Experiment Name: Zm_5mM_SA_P Parameter: Tissue Value: Aerial
  misc_feature: MA Experiment 20000478 PARAMETER Experiment Name: Zm_5mM_SA_P Parameter: Treatment Value: 5mM SA vs. No Treatment
  misc_feature: MA Experiment ID: 20000479 Result: Up-regulated in Transcription
  misc_feature: MA Experiment 20000479 PARAMETER Experiment Name: Zm_Drought_P Parameter: Age (day) Value: 10
  misc_feature: MA Experiment 20000479 PARAMETER Experiment Name: Zm_Drought_P Parameter: Organism Value: Zea mays
  misc_feature: MA Experiment 20000479 PARAMETER Experiment Name: Zm_Drought_P Parameter: Plant Line Value: 35A19
  misc_feature: MA Experiment 20000479 PARAMETER Experiment Name: Zm_Drought_P Parameter: Timepoint (hr) Value: 48
  misc_feature: MA Experiment 20000479 PARAMETER Experiment Name: Zm_Drought_P Parameter: Tissue Value: Aerial
  misc_feature: MA Experiment 20000479 PARAMETER Experiment Name: Zm_Drought_P Parameter: Treatment Value: Drought vs. No Drought
  misc_feature: MA Experiment ID: 20000626 Result: Up-regulated in Transcription
  misc_feature: MA Experiment 20000626 PARAMETER Experiment Name: Zm_Herbicide-Treatments_P Parameter: Timepoint (hr) Value: 12
  misc_feature: MA Experiment 20000626 PARAMETER Experiment Name: Zm_Herbicide-Treatments_P Parameter: Tissue Value: Aerial
  misc_feature: MA Experiment 20000626 PARAMETER Experiment Name: Zm_Herbicide-Treatments_P Parameter: Treatment Value: Roundup vs. No Treatment
gcacgagaccattacctagaacatcctaatcaaaaagacttgagttcaccggtactatttatgtaccgtacataaagtaaagtttaacgaaaagaaaagcacgggagacgggacgggaccgctgggcgcgccgggccgcgccgagccgagcgagtcgtccactctccactccgcccgccacgcccacgccccgtcctcgcttccgtctcccacaatccaaggacaccgagcagcaggcggcggaagcaacccgctgtgggggcggcgtggagtccagttttgctcggctcgtcgctgggatccgccggccggcgaagcggggaagggaagaggagcggagattggagagtacaagcaggggaagatgtcagacgcgctgatcaacggcctcgccggcgccggcggcgggatcatcgcccagctccttacctacccgctccagaccgtgaacgcgcggcaacagacggagcgcgacccctccaagccggcgttcaaggacggcgccgctcgccagttgtatctggttgtgaagaacgaggggtgggagcgcctgtatggcgggcttatgccctctctcgtcggcaccgctgcctcccagggtgtctactactacttctaccaaatattccggaacagggccgaggcaagggcccttgagcgatccaggagagggcttggcgatgggtctgtcggcatgctccagtctctcactgtcgctgccctgtctggctgtgtcaatgtactgctcacaaacccgatttgggttgttgttacacgaatgcaaactcacagaaaggcaaacaaacagcaaagacctcagggtttgaattgtgctcttgataagccccttgaagctgctacagctgaaaacgctccatacaaaacgattgatgtttttcaggaactctacaaagaatctggagttcttggcttctggaaaggggtaattccggctcttatcatggttagcaatcccgcaattcagttcatgctatatgagactcttctgaagaaattgaagaagagacgagcctctaattttaagggagctgatggattgactgctcttgaaatttttcttcttggtgctgttgcgaaacttggtgcaaccgtcgttacgtatccccttctagttgttaaggcaagacttcaggcaaagcacatgattaacgatgacaagaggcatcgctacaaaggtacacttgatgcgttcacaaagatggtacgatatgagggtctgtcagggatgtacaaaggaatgggcacaaaaattgtgcaaagtgtttttgcttctgctttgctttttatgattaaggaggagctggtgaagggtgctcgactattggtaactggtaacactagtctggttaagaaactaccatcaaagtcatcaagatgaactacgggcatcgcaagcgttagtatatcatcctaaaaagccatttattatccgcataaaccgtaaacaaggtcgacaagctatagagctcgcctctgctttggatatgtcaactgtaggttacacaatagccagtatgattcacgtagggaccaaagactatgttggatagatatttgtatcattcatgtagaatgtatcgtggaagatcgaaacagaagaaaataaataagtatgataatttgaactc

SEQ ID NO: 19396 - protein, 344 aa, Zea mays subsp. mays
  peptide (1)..(344): Ceres Seq. ID no. 12364564
  misc_feature (2)..(320): Homolog of NCBI NO: 38105196 NR Description: hypothetical protein MG03247.4 [Magnaporthe
  misc_feature (3)..(140): Homolog of NCBI NO: 28828484 NR Description: hypothetical protein [Dictyostelium discoideum]
  misc_feature (169)..(321): Homolog of NCBI NO: 28828484 NR Description: hypothetical protein [Dictyostelium discoideum]
  misc_feature (1)..(333): Homolog of NCBI NO: 15225602 NR Description: 36kDa-peroxisomal membrane protein (PMP36)
  misc_feature (1)..(334): Homolog of NCBI NO: 21593883 NR Description: putative peroxisomal membrane carrier protein
  misc_feature (1)..(344): Homolog of NCBI NO: 34901996 NR Description: unknown protein [Oryza sativa (japonica
  misc_feature (162)..(320): Homolog of NCBI NO: 19921888 NR Description: CG8026-PB [Drosophila melanogaster]
  misc_feature (54)..(320): Homolog of NCBI NO: 40739628 NR Description: hypothetical protein AN4280.2 [Aspergillus
  misc_feature (169)..(320): Homolog of NCBI NO: 34222684 NR Description: Mitochondrial folate transporter/carrier
  misc_feature (9)..(158): Homolog of NCBI NO: 19921888 NR Description: CG8026-PB [Drosophila melanogaster]
MSDALINGLAGAGGGIIAQLLTYPLQTVNARQQTERDPSKPAFKDGAARQLYLVVKNEGWERLYGGLMPSLVGTAASQGVYYYFYQIFRNRAEARALERSRRGLGDGSVGMLQSLTVAALSGCVNVLLTNPIWVVVTRMQTHRKANKQQRPQGLNCALDKPLEAATAENAPYKTIDVFQELYKESGVLGFWKGVIPALIMVSNPAIQFMLYETLLKKLKKRRASNFKGADGLTALEIFLLGAVAKLGATVVTYPLLVVKARLQAKHMINDDKRHRYKGTLDAFTKMVRYEGLSGMYKGMGTKIVQSVFASALLFMIKEELVKGARLLVTGNTSLVKKLPSKSSR

SEQ ID NO: 19397 - protein, 277 aa, Zea mays subsp. mays
  peptide (1)..(277): Ceres Seq. ID no. 12364565
  misc_feature (102)..(253): Homolog of NCBI NO: 34222684 NR Description: Mitochondrial folate transporter/carrier
  misc_feature (1)..(91): Homolog of NCBI NO: 19921888 NR Description: CG8026-PB [Drosophila melanogaster]
  misc_feature (95)..(253): Homolog of NCBI NO: 19921888 NR Description: CG8026-PB [Drosophila melanogaster]
  misc_feature (1)..(253): Homolog of NCBI NO: 40739628 NR Description: hypothetical protein AN4280.2 [Aspergillus
  misc_feature (1)..(253): Homolog of NCBI NO: 38105196 NR Description: hypothetical protein MG03247.4 [Magnaporthe
  misc_feature (1)..(73): Homolog of NCBI NO: 28828484 NR Description: hypothetical protein [Dictyostelium discoideum]
  misc_feature (102)..(254): Homolog of NCBI NO: 28828484 NR Description: hypothetical protein [Dictyostelium discoideum]
  misc_feature (1)..(266): Homolog of NCBI NO: 15225602 NR Description: 36kDa-peroxisomal membrane protein (PMP36)
  misc_feature (1)..(267): Homolog of NCBI NO: 21593883 NR Description: putative peroxisomal membrane carrier protein
  misc_feature (1)..(277): Homolog of NCBI NO: 34901996 NR Description: unknown protein [Oryza sativa (japonica
MPSLVGTAASQGVYYYFYQIFRNRAEARALERSRRGLGDGSVGMLQSLTVAALSGCVNVLLTNPIWVVVTRMQTHRKANKQQRPQGLNCALDKPLEAATAENAPYKTIDVFQELYKESGVLGFWKGVIPALIMVSNPAIQFMLYETLLKKLKKRRASNFKGADGLTALEIFLLGAVAKLGATVVTYPLLVVKARLQAKHMINDDKRHRYKGTLDAFTKMVRYEGLSGMYKGMGTKIVQSVFASALLFMIKEELVKGARLLVTGNTSLVKKLPSKSSR

SEQ ID NO: 19398 - protein, 234 aa, Zea mays subsp. mays
  peptide (1)..(234): Ceres Seq. ID no. 12364566
  misc_feature (59)..(210): Homolog of NCBI NO: 34222684 NR Description: Mitochondrial folate transporter/carrier
  misc_feature (1)..(48): Homolog of NCBI NO: 19921888 NR Description: CG8026-PB [Drosophila melanogaster]
  misc_feature (52)..(210): Homolog of NCBI NO: 19921888 NR Description: CG8026-PB [Drosophila melanogaster]
  misc_feature (1)..(210): Homolog of NCBI NO: 40739628 NR Description: hypothetical protein AN4280.2 [Aspergillus
  misc_feature (1)..(210): Homolog of NCBI NO: 38105196 NR Description: hypothetical protein MG03247.4 [Magnaporthe
  misc_feature (1)..(30): Homolog of NCBI NO: 28828484 NR Description: hypothetical protein [Dictyostelium discoideum]
  misc_feature (59)..(211): Homolog of NCBI NO: 28828484 NR Description: hypothetical protein [Dictyostelium discoideum]
  misc_feature (1)..(223): Homolog of NCBI NO: 15225602 NR Description: 36kDa-peroxisomal membrane protein (PMP36)
  misc_feature (1)..(224): Homolog of NCBI NO: 21593883 NR Description: putative peroxisomal membrane carrier protein
  misc_feature (1)..(234): Homolog of NCBI NO: 34901996 NR Description: unknown protein [Oryza sativa (japonica
MLQSLTVAALSGCVNVLLTNPIWVVVTRMQTHRKANKQQRPQGLNCALDKPLEAATAENAPYKTIDVFQELYKESGVLGFWKGVIPALIMVSNPAIQFMLYETLLKKLKKRRASNFKGADGLTALEIFLLGAVAKLGATVVTYPLLVVKARLQAKHMINDDKRHRYKGTLDAFTKMVRYEGLSGMYKGMGTKIVQSVFASALLFMIKEELVKGARLLVTGNTSLVKKLPSKSSR

SEQ ID NO: 19399 - DNA, 1083 bp, Zea mays subsp. mays
  misc_feature (1)..(1083): Ceres Seq. ID no. 13492652
  misc_feature: MA Experiment ID: 108527 Result: Up-regulated in Transcription
  misc_feature: MA Experiment 108527 PARAMETER Experiment Name: Zm_5mM_NO_P Parameter: Age (day) Value: 8
  misc_feature: MA Experiment 108527 PARAMETER Experiment Name: Zm_5mM_NO_P Parameter: Organism Value: Zea mays
  misc_feature: MA Experiment 108527 PARAMETER Experiment Name: Zm_5mM_NO_P Parameter: Plant Line Value: 35A19
  misc_feature: MA Experiment 108527 PARAMETER Experiment Name: Zm_5mM_NO_P Parameter: Timepoint (hr) Value: 6
  misc_feature: MA Experiment 108527 PARAMETER Experiment Name: Zm_5mM_NO_P Parameter: Tissue Value: Aerial
  misc_feature: MA Experiment 108527 PARAMETER Experiment Name: Zm_5mM_NO_P Parameter: Treatment Value: 5mM NO vs. No Treatment
  misc_feature: MA Experiment ID: 108529 Result: Up-regulated in Transcription
  misc_feature: MA Experiment 108529 PARAMETER Experiment Name: Zm_Imbibed_Seeds_P Parameter: Age (day) Value: 5 vs. 2
  misc_feature: MA Experiment 108529 PARAMETER Experiment Name: Zm_Imbibed_Seeds_P Parameter: Organism Value: Zea mays
  misc_feature: MA Experiment 108529 PARAMETER Experiment Name: Zm_Imbibed_Seeds_P Parameter: Plant Line Value: 35A19
  misc_feature: MA Experiment 108529 PARAMETER Experiment Name: Zm_Imbibed_Seeds_P Parameter: Tissue Value: Roots vs. Embryo
  misc_feature: MA Experiment ID: 108535 Result: Down-regulated in Transcription
  misc_feature: MA Experiment 108535 PARAMETER Experiment Name: Zm_Meristem_P Parameter: Age (day) Value: 8
  misc_feature: MA Experiment 108535 PARAMETER Experiment Name: Zm_Meristem_P Parameter: Organism Value: Zea mays
  misc_feature: MA Experiment 108535 PARAMETER Experiment Name: Zm_Meristem_P Parameter: Plant Line Value: 35A19
  misc_feature: MA Experiment 108535 PARAMETER Experiment Name: Zm_Meristem_P Parameter: Tissue Value: Root Meristem vs. Above Root Meristem
  misc_feature: MA Experiment ID: 108543 Result: Up-regulated in Transcription
  misc_feature: MA Experiment ID: 108599 Result: Down-regulated in Transcription
  misc_feature: MA Experiment 108599 PARAMETER Experiment Name: Zm_RT1_P Parameter: Age (day) Value: 11
  misc_feature: MA Experiment 108599 PARAMETER Experiment Name: Zm_RT1_P Parameter: Organism Value: Zea mays
  misc_feature: MA Experiment 108599 PARAMETER Experiment Name: Zm_RT1_P Parameter: Plant Line Value: rt1 mut vs. rt1 wt
  misc_feature: MA Experiment 108599 PARAMETER Experiment Name: Zm_RT1_P Parameter: Tissue Value: Roots
  misc_feature: MA Experiment ID: 108689 Result: Down-regulated in Transcription
  misc_feature: MA Experiment 108689 PARAMETER Experiment Name: Zm_Drought_Roots_P Parameter: Age (day) Value: 9
  misc_feature: MA Experiment 108689 PARAMETER Experiment Name: Zm_Drought_Roots_P Parameter: Organism Value: Zea mays
  misc_feature: MA Experiment 108689 PARAMETER Experiment Name: Zm_Drought_Roots_P Parameter: Plant Line Value: 35A19
  misc_feature: MA Experiment 108689 PARAMETER Experiment Name: Zm_Drought_Roots_P Parameter: Timepoint (hr) Value: 24
  misc_feature: MA Experiment 108689 PARAMETER Experiment Name: Zm_Drought_Roots_P Parameter: Tissue Value: Roots
  misc_feature: MA Experiment 108689 PARAMETER Experiment Name: Zm_Drought_Roots_P Parameter: Treatment Value: Drought vs. No Drought
  misc_feature: MA Experiment ID: 20000629 Result: Up-regulated in Transcription
  misc_feature: MA Experiment 20000629 PARAMETER Experiment Name: Zm_Herbicide-Treatments_P Parameter: Timepoint (hr) Value: 12
  misc_feature: MA Experiment 20000629 PARAMETER Experiment Name: Zm_Herbicide-Treatments_P Parameter: Tissue Value: Aerial
  misc_feature: MA Experiment 20000629 PARAMETER Experiment Name: Zm_Herbicide-Treatments_P Parameter: Treatment Value: Trimec vs. No Treatment
ccacacagcaaaaccacccgcgctccgccaatccagagagccagccagcccgaggtcacacagcagcgagctcggtcttctcgccaggacacgaacacgaccccagcaggcggcaggcaagccacgctctctcgacggacggacgttaatcgagacatggggcgctctccgtgctgcgagaagatggggctgaagaggggtccgtggacggccgaggaggacaggattctggtggcgcacgtcgagcgccacggccacagcaactggcgcgcgctgcccaagcaggcgggcctgctccgctgcggcaagagctgccgcctccgctggatcaactacctgcgccccgacatcaagcgcggcaacttcagccgggaggaggaggacgccatcatacagctccaccaaatgctcggcaacagatggtcgacaatcgctgccaggctgccggggaggacggacaacgagatcaagaacgtctggcacacccacctcaagaagcgcctggagccaaagccagccagccagcaggcgcccaagcgcaagcccacgaagaagcagcagccgcagccggagcccgtaacggcgctcgaggggccgaccggggccgtgccggtgtcgccggagcggtcactctccacgacgacgtcgaccaccaccagcaccgcggactactcggccgcctcgtcgctggagaacgcaggcgacagcttcacctcggaggaggactactaccagatcgacgacagcttctggtccgagacgctggcgatgacgacgacggtggacagcttcgagtccggggtgcagcaggcggagggaagcttcggcaagtcggcggcgccgccgtcgtcgaccaacgacgacatggacttctggctcaagctgttcatgcaggccagcgacatgcagaatttgccccagattatttaggcgggaaacggacctagacggttggttatctctcggctgatgatgatattcattggcgcgcgctcacgattctttgaatctttgttctgctccgttttcggtggatgcatatatcccactgaaaccttgtgaagcggaaagcaattgcttcgt

SEQ ID NO: 19400 - protein, 309 aa, Zea mays subsp. mays
  peptide (1)..(309): Ceres Seq. ID no. 15222886
  misc_feature (66)..(113): Pfam Name: Myb-like DNA-binding domain Pfam Description: Myb-like DNA-binding domain
  misc_feature (53)..(307): Homolog of NCBI NO: 7438333 NR Description: myb-related transcription factor THM18 - tomato
  misc_feature (53)..(262): Homolog of NCBI NO: 282963 NR Description: myb-related protein Ph2 - garden petunia
  misc_feature (53)..(308): Homolog of NCBI NO: 33087073 NR Description: myb-related protein [Oryza sativa (japonica
  misc_feature (53)..(308): Homolog of NCBI NO: 7438336 NR Description: myb protein homolog - rice
PHSKTTRAPPIQRASQPEVTQQRARSSRQDTNTTPAGGRQATLSRRTDVNRDMGRSPCCEKMGLKRGPWTAEEDRILVAHVERHGHSNWRALPKQAGLLRCGKSCRLRWINYLRPDIKRGNFSREEEDAIIQLHQMLGNRWSTIAARLPGRTDNEIKNVWHTHLKKRLEPKPASQQAPKRKPTKKQQPQPEPVTALEGPTGAVPVSPERSLSTTTSTTTSTADYSAASSLENAGDSFTSEEDYYQIDDSFWSETLAMTTTVDSFESGVQQAEGSFGKSAAPPSSTNDDMDFWLKLFMQASDMQNLPQII

SEQ ID NO: 19401 - protein, 257 aa, Zea mays subsp. mays
  peptide (1)..(257): Ceres Seq. ID no. 15222887
  misc_feature (14)..(61): Pfam Name: Myb-like DNA-binding domain Pfam Description: Myb-like DNA-binding domain
  misc_feature (1)..(255): Homolog of NCBI NO: 7438333 NR Description: myb-related transcription factor THM18 - tomato
  misc_feature (1)..(210): Homolog of NCBI NO: 282963 NR Description: myb-related protein Ph2 - garden petunia
  misc_feature (1)..(256): Homolog of NCBI NO: 33087073 NR Description: myb-related protein [Oryza sativa (japonica
  misc_feature (1)..(256): Homolog of NCBI NO: 7438336 NR Description: myb protein homolog - rice
MGRSPCCEKMGLKRGPWTAEEDRILVAHVERHGHSNWRALPKQAGLLRCGKSCRLRWINYLRPDIKRGNFSREEEDAIIQLHQMLGNRWSTIAARLPGRTDNEIKNVWHTHLKKRLEPKPASQQAPKRKPTKKQQPQPEPVTALEGPTGAVPVSPERSLSTTTSTTTSTADYSAASSLENAGDSFTSEEDYYQIDDSFWSETLAMTTTVDSFESGVQQAEGSFGKSAAPPSSTNDDMDFWLKLFMQASDMQNLPQII

SEQ ID NO: 19402 - protein, 248 aa, Zea mays subsp. mays
  peptide (1)..(248): Ceres Seq. ID no. 15222888
  misc_feature (5)..(52): Pfam Name: Myb-like DNA-binding domain Pfam Description: Myb-like DNA-binding domain
  misc_feature (1)..(246): Homolog of NCBI NO: 7438333 NR Description: myb-related transcription factor THM18 - tomato
  misc_feature (1)..(201): Homolog of NCBI NO: 282963 NR Description: myb-related protein Ph2 - garden petunia
  misc_feature (1)..(247): Homolog of NCBI NO: 33087073 NR Description: myb-related protein [Oryza sativa (japonica
  misc_feature (1)..(247): Homolog of NCBI NO: 7438336 NR Description: myb protein homolog - rice
MGLKRGPWTAEEDRILVAHVERHGHSNWRALPKQAGLLRCGKSCRLRWINYLRPDIKRGNFSREEEDAIIQLHQMLGNRWSTIAARLPGRTDNEIKNVWHTHLKKRLEPKPASQQAPKRKPTKKQQPQPEPVTALEGPTGAVPVSPERSLSTTTSTTTSTADYSAASSLENAGDSFTSEEDYYQIDDSFWSETLAMTTTVDSFESGVQQAEGSFGKSAAPPSSTNDDMDFWLKLFMQASDMQNLPQII

SEQ ID NO: 19403 - DNA, 944 bp, Zea mays subsp. mays
  misc_feature (1)..(944): Ceres Seq. ID no. 12390522
  misc_feature: MA Experiment ID: 108522 Result: Up-regulated in Transcription
  misc_feature: MA Experiment 108522 PARAMETER Experiment Name: Zm_42deg_Heat_P Parameter: Age (day) Value: 8
  misc_feature: MA Experiment 108522 PARAMETER Experiment Name: Zm_42deg_Heat_P Parameter: Organism Value: Zea mays
  misc_feature: MA Experiment 108522 PARAMETER Experiment Name: Zm_42deg_Heat_P Parameter: Plant Line Value: 35A19
  misc_feature: MA Experiment 108522 PARAMETER Experiment Name: Zm_42deg_Heat_P Parameter: Temperature (deg C) Value: 42 vs. 22
  misc_feature: MA Experiment 108522 PARAMETER Experiment Name: Zm_42deg_Heat_P Parameter: Timepoint (hr) Value: 1
  misc_feature: MA Experiment 108522 PARAMETER Experiment Name: Zm_42deg_Heat_P Parameter: Tissue Value: Aerial
  misc_feature: MA Experiment ID: 108527 Result: Up-regulated in Transcription
  misc_feature: MA Experiment 108527 PARAMETER Experiment Name: Zm_5mM_NO_P Parameter: Age (day) Value: 8
  misc_feature: MA Experiment 108527 PARAMETER Experiment Name: Zm_5mM_NO_P Parameter: Organism Value: Zea mays
  misc_feature: MA Experiment 108527 PARAMETER Experiment Name: Zm_5mM_NO_P Parameter: Plant Line Value: 35A19
  misc_feature: MA Experiment 108527 PARAMETER Experiment Name: Zm_5mM_NO_P Parameter: Timepoint (hr) Value: 6
  misc_feature: MA Experiment 108527 PARAMETER Experiment Name: Zm_5mM_NO_P Parameter: Tissue Value: Aerial
  misc_feature: MA Experiment 108527 PARAMETER Experiment Name: Zm_5mM_NO_P Parameter: Treatment Value: 5mM NO vs. No Treatment
  misc_feature: MA Experiment ID: 20000534 Result: Up-regulated in Transcription
  misc_feature: MA Experiment 20000534 PARAMETER Experiment Name: Zm_Hybrid_Pollen_P Parameter: Age (day) Value: 8
  misc_feature: MA Experiment 20000534 PARAMETER Experiment Name: Zm_Hybrid_Pollen_P Parameter: Organism Value: Zea mays
  misc_feature: MA Experiment 20000534 PARAMETER Experiment Name: Zm_Hybrid_Pollen_P Parameter: Plant Line Value: 35A19
  misc_feature: MA Experiment 20000534 PARAMETER Experiment Name: Zm_Hybrid_Pollen_P Parameter: Tissue Value: Pollen vs. Aerial
atttttcccctcgtcctccctgcgatttcgcgacctccatccaatccctctgcacggagaatcgtctaatggcggaggagggctacagaggtgacgctgaacgtgtacgacctcagcaacggcctcagcaacggcaagcccattgaggccatctggcacacgggagtggtggtgtacgggaacgagtactacttcggcggcgggatccagtcgtcccccgcgggacgacgccgtacgggcggccgctgcgggtggtggagctgggcgtcacgcacatcccgcgggaggtgttcgaggactacctccgcgacatcgcgccccggtacacggccgagacctaccgcctgctcacccacaactgcaacaacttcagtcacgaggtggcgcagttcctcgtcggcactggcgccggcgtgcccgattacatcctcaacctccccgccgaggtcatgtccagccccatgggcccgctcatcatgcccatgatccagaacctcgagtccacgctcaggagcaacgtcgctccgcagaccacgcagttcgtgcccacgcccgcctccgtntccgcgccgaccgaggctcccgcctccgagcgaaaagcgccggcgccggcgccggcggagaaggcttcgaaggaagctcctgcgcctgcgaagaaggaagcccctactcctgcggctgaccctctcgggagcgccagggggaaggtgcaggaggaggtgatgaaggagttcgcggccatcatggccagcggtacgctacgggccagcgaggcggcggcgctggccatgcgccgggtcatggagcgccacggcgacggcgccacgatgcagcagggctagacgaatcaggctgtgaacgcgttccggttccatgggaattggaatttgtcatctgcatgctgatgccgccgccgtatggaaaaatttggagaagttattcct

SEQ ID NO: 19404 - protein, 130 aa, Zea mays subsp. mays
  peptide (1)..(130): Ceres Seq. ID no. 12390523
  misc_feature (1)..(20): Homolog of NCBI NO: 23479931 NR Description: hypothetical protein [Plasmodium yoelii yoelii]
  misc_feature (1)..(17): Homolog of NCBI NO: 34867307 NR Description: similar to D15Wsu75e protein [Rattus norvegicus]
  misc_feature (51)..(122): Homolog of NCBI NO: 37535296 NR Description: unknown protein [Oryza sativa (japonica
  misc_feature (1)..(17): Homolog of NCBI NO: 20162548 NR Description: D15Wsu75e protein [Mus musculus]
  misc_feature (1)..(126): Homolog of NCBI NO: 40738408 NR Description: hypothetical protein AN6915.2 [Aspergillus
  misc_feature (1)..(17): Homolog of NCBI NO: 14779199 NR Description: similar to LD11371p [Drosophila melanogaster]
  misc_feature (1)..(16): Homolog of NCBI NO: 37589651 NR Description: Unknown (protein for MGC:73066) [Danio rerio]
  misc_feature (1)..(23): Homolog of NCBI NO: 28277916 NR Description: Similar to DNA segment, Chr 15, Wayne State
  misc_feature (1)..(77): Homolog of NCBI NO: 37535296 NR Description: unknown protein [Oryza sativa (japonica
  misc_feature (1)..(122): Homolog of NCBI NO: 15231383 NR Description: unknown protein
  misc_feature (38)..(38): Xaa is any aa, unknown or other
MSSPMGPLIMPMIQNLESTLRSNVAPQTTQFVPTPASXSAPTEAPASERKAPAPAPAEKASKEAPAPAKKEAPTPAADPLGSARGKVQEEVMKEFAAIMASGTLRASEAAALAMRRVMERHGDGATMQQG

SEQ ID NO: 19405 - protein, 126 aa, Zea mays subsp. mays
  peptide (1)..(126): Ceres Seq. ID no. 12390524
  misc_feature (1)..(16): Homolog of NCBI NO: 23479931 NR Description: hypothetical protein [Plasmodium yoelii yoelii]
  misc_feature (1)..(13): Homolog of NCBI NO: 34867307 NR Description: similar to D15Wsu75e protein [Rattus norvegicus]
  misc_feature (47)..(118): Homolog of NCBI NO: 37535296 NR Description: unknown protein [Oryza sativa (japonica
  misc_feature (1)..(13): Homolog of NCBI NO: 20162548 NR Description: D15Wsu75e protein [Mus musculus]
  misc_feature (1)..(122): Homolog of NCBI NO: 40738408 NR Description: hypothetical protein AN6915.2 [Aspergillus
  misc_feature (1)..(13): Homolog of NCBI NO: 14779199 NR Description: similar to LD11371p [Drosophila melanogaster]
  misc_feature (1)..(12): Homolog of NCBI NO: 37589651 NR Description: Unknown (protein for MGC:73066) [Danio rerio]
  misc_feature (1)..(19): Homolog of NCBI NO: 28277916 NR Description: Similar to DNA segment, Chr 15, Wayne State
  misc_feature (1)..(73): Homolog of NCBI NO: 37535296 NR Description: unknown protein [Oryza sativa (japonica
  misc_feature (1)..(118): Homolog of NCBI NO: 15231383 NR Description: unknown protein
  misc_feature (34)..(34): Xaa is any aa, unknown or other
MGPLIMPMIQNLESTLRSNVAPQTTQFVPTPASXSAPTEAPASERKAPAPAPAEKASKEAPAPAKKEAPTPAADPLGSARGKVQEEVMKEFAAIMASGTLRASEAAALAMRRVMERHGDGATMQQG

SEQ ID NO: 19406 - protein, 121 aa, Zea mays subsp. mays
  peptide (1)..(121): Ceres Seq. ID no. 12390525
  misc_feature (1)..(11): Homolog of NCBI NO: 23508869 NR Description: hypothetical protein [Plasmodium falciparum 3D7]
  misc_feature (1)..(26): Homolog of NCBI NO: 29246854 NR Description: GLP_191_9337_10773 [Giardia lamblia ATCC 50803]
  misc_feature (1)..(11): Homolog of NCBI NO: 23479931 NR Description: hypothetical protein [Plasmodium yoelii yoelii]
  misc_feature (42)..(113): Homolog of NCBI NO: 37535296 NR Description: unknown protein [Oryza sativa (japonica
  misc_feature (1)..(117): Homolog of NCBI NO: 40738408 NR Description: hypothetical protein AN6915.2 [Aspergillus
  misc_feature (1)..(14): Homolog of NCBI NO: 28277916 NR Description: Similar to DNA segment, Chr 15, Wayne State
  misc_feature (1)..(68): Homolog of NCBI NO: 37535296 NR Description: unknown protein [Oryza sativa (japonica
  misc_feature (1)..(113): Homolog of NCBI NO: 15231383 NR Description: unknown protein
  misc_feature (29)..(29): Xaa is any aa, unknown or other
MPMIQNLESTLRSNVAPQTTQFVPTPASXSAPTEAPASERKAPAPAPAEKASKEAPAPAKKEAPTPAADPLGSARGKVQEEVMKEFAAIMASGTLRASEAAALAMRRVMERHGDGATMQQG

SEQ ID NO: 19407 - DNA, 1698 bp, Zea mays subsp. mays; identical to SEQ ID NO: 13749
  misc_feature (1)..(1698): Ceres Seq. ID no. 13494587
  misc_feature: MA Experiment ID: 108556 Result: Up-regulated in Transcription
  misc_feature: MA Experiment 108556 PARAMETER Experiment Name: Zm_Drought_P Parameter: Age (day) Value: 9
  misc_feature: MA Experiment 108556 PARAMETER Experiment Name: Zm_Drought_P Parameter: Organism Value: Zea mays
  misc_feature: MA Experiment 108556 PARAMETER Experiment Name: Zm_Drought_P Parameter: Plant Line Value: 35A19
  misc_feature: MA Experiment 108556 PARAMETER Experiment Name: Zm_Drought_P Parameter: Timepoint (hr) Value: 24
  misc_feature: MA Experiment 108556 PARAMETER Experiment Name: Zm_Drought_P Parameter: Tissue Value: Aerial
  misc_feature: MA Experiment 108556 PARAMETER Experiment Name: Zm_Drought_P Parameter: Treatment Value: Drought vs. No Drought
  misc_feature: MA Experiment ID: 20001606 Result: Down-regulated in Transcription
  misc_feature: MA Experiment 20001606 PARAMETER Experiment Name: Zm_50ppm_KNO3_L-to-H_P Parameter: Age (day) Value: 19
  misc_feature: MA Experiment 20001606 PARAMETER Experiment Name: Zm_50ppm_KNO3_L-to-H_P Parameter: Organism Value: Zea mays
  misc_feature: MA Experiment 20001606 PARAMETER Experiment Name: Zm_50ppm_KNO3_L-to-H_P Parameter: Plant Line Value: 35A19
  misc_feature: MA Experiment 20001606 PARAMETER Experiment Name: Zm_50ppm_KNO3_L-to-H_P Parameter: Timepoint (hr) Value: 8
  misc_feature: MA Experiment 20001606 PARAMETER Experiment Name: Zm_50ppm_KNO3_L-to-H_P Parameter: Tissue Value: Shoots
  misc_feature: MA Experiment 20001606 PARAMETER Experiment Name: Zm_50ppm_KNO3_L-to-H_P Parameter: Treatment Value: 50ppm KNO3 vs. 50ppm KCl

SEQ ID NO: 19408 - protein, 355 aa, Zea mays subsp. mays; identical to SEQ ID NO: 13750
  peptide (1)..(355): Ceres Seq. ID no. 13494588
  misc_feature (1)..(81): Pfam Name: Assemblin (Peptidase family S21) Pfam Description: Assemblin (Peptidase family S21)
  misc_feature (1)..(341): Homolog of NCBI NO: 22773231 NR Description: Putative RNA-binding protein [Oryza sativa
  misc_feature (34)..(340): Homolog of NCBI NO: 18087662 NR Description: putative RNA-binding protein [Oryza sativa]
  misc_feature (29)..(334): Homolog of NCBI NO: 30682679 NR Description: expressed protein [Arabidopsis thaliana] gb|AAD10646.1~gene_id:MRP15.12~strong similarity to unknown [Arabidopsis thaliana] >gi|21703124|gb|AAM74503.1|
  misc_feature (29)..(334): Homolog of NCBI NO: 25084169 NR Description: Unknown protein [Arabidopsis thaliana]
  misc_feature (29)..(334): Homolog of NCBI NO: 30682683 NR Description: expressed protein [Arabidopsis thaliana]
  misc_feature (82)..(336): Homolog of NCBI NO: 18405397 NR Description: expressed protein [Arabidopsis thaliana] At1g55500/T5A14_10 [Arabidopsis thaliana]
  misc_feature (29)..(204): Homolog of NCBI NO: 25372787 NR Description: Rubisco subunit binding-protein beta subunit - Arabidopsis thaliana >gi|4204265|gb|AAD10646.1| Hypothetical
  misc_feature (80)..(243): Homolog of NCBI NO: 34395023 NR Description: high-glucose-regulated protein 8-like [Oryza
  misc_feature (30)..(191): Homolog of NCBI NO: 30682433 NR Description: expressed protein [Arabidopsis thaliana]
  misc_feature (30)..(191): Homolog of NCBI NO: 30682438 NR Description: expressed protein [Arabidopsis thaliana]

SEQ ID NO: 19409 - protein, 263 aa, Zea mays subsp. mays; identical to SEQ ID NO: 13751
  peptide (1)..(263): Ceres Seq. ID no. 13494589
  misc_feature (1)..(249): Homolog of NCBI NO: 22773231 NR Description: Putative RNA-binding protein [Oryza sativa
  misc_feature (1)..(248): Homolog of NCBI NO: 18087662 NR Description: putative RNA-binding protein [Oryza sativa]
  misc_feature (1)..(242): Homolog of NCBI NO: 30682679 NR Description: expressed protein [Arabidopsis thaliana] gb|AAD10646.1~gene_id:MRP15.12~strong similarity to unknown [Arabidopsis thaliana] >gi|21703124|gb|AAM74503.1|
  misc_feature (1)..(242): Homolog of NCBI NO: 25084169 NR Description: Unknown protein [Arabidopsis thaliana]
  misc_feature (1)..(242): Homolog of NCBI NO: 30682683 NR Description: expressed protein [Arabidopsis thaliana]
  misc_feature (1)..(244): Homolog of NCBI NO: 18405397 NR Description: expressed protein [Arabidopsis thaliana] At1g55500/T5A14_10 [Arabidopsis thaliana]
  misc_feature (1)..(112): Homolog of NCBI NO: 25372787 NR Description: Rubisco subunit binding-protein beta subunit - Arabidopsis thaliana >gi|4204265|gb|AAD10646.1| Hypothetical
  misc_feature (1)..(151): Homolog of NCBI NO: 34395023 NR Description: high-glucose-regulated protein 8-like [Oryza
  misc_feature (1)..(99): Homolog of NCBI NO: 30682433 NR Description: expressed protein [Arabidopsis thaliana]
  misc_feature (1)..(99): Homolog of NCBI NO: 30682438 NR Description: expressed protein [Arabidopsis thaliana]

SEQ ID NO: 19410 - protein, 244 aa, Zea mays subsp. mays; identical to SEQ ID NO: 13752
  peptide (1)..(244): Ceres Seq. ID no. 13494590
  misc_feature (1)..(223): Homolog of NCBI NO: 30682679 NR Description: expressed protein [Arabidopsis thaliana] gb|AAD10646.1~gene_id:MRP15.12~strong similarity to unknown [Arabidopsis thaliana] >gi|21703124|gb|AAM74503.1|
  misc_feature (1)..(223): Homolog of NCBI NO: 25084169 NR Description: Unknown protein [Arabidopsis thaliana]
  misc_feature (1)..(223): Homolog of NCBI NO: 30682683 NR Description: expressed protein [Arabidopsis thaliana]
  misc_feature (1)..(225): Homolog of NCBI NO: 18405397 NR Description: expressed protein [Arabidopsis thaliana] At1g55500/T5A14_10 [Arabidopsis thaliana]
  misc_feature (1)..(93): Homolog of NCBI NO: 25372787 NR Description: Rubisco subunit binding-protein beta subunit - Arabidopsis thaliana >gi|4204265|gb|AAD10646.1| Hypothetical
  misc_feature (1)..(132): Homolog of NCBI NO: 34395023 NR Description: high-glucose-regulated protein 8-like [Oryza
  misc_feature (1)..(80): Homolog of NCBI NO: 30682433 NR Description: expressed protein [Arabidopsis thaliana]
  misc_feature (1)..(80): Homolog of NCBI NO: 30682438 NR Description: expressed protein [Arabidopsis thaliana]
  misc_feature (1)..(230): Homolog of NCBI NO: 22773231 NR Description: Putative RNA-binding protein [Oryza sativa
  misc_feature (1)..(229): Homolog of NCBI NO: 18087662 NR Description: putative RNA-binding protein [Oryza sativa]

SEQ ID NO: 19411 - DNA, 2064 bp, Zea mays subsp. mays
  misc_feature (1)..(2064): Ceres Seq. ID no. 12361230
  misc_feature: MA Experiment ID: 108522 Result: Down-regulated in Transcription
  misc_feature: MA Experiment 108522 PARAMETER Experiment Name: Zm_42deg_Heat_P Parameter: Age (day) Value: 8
  misc_feature: MA Experiment 108522 PARAMETER Experiment Name: Zm_42deg_Heat_P Parameter: Organism Value: Zea mays
  misc_feature: MA Experiment 108522 PARAMETER Experiment Name: Zm_42deg_Heat_P Parameter: Plant Line Value: 35A19
  misc_feature: MA Experiment 108522 PARAMETER Experiment Name: Zm_42deg_Heat_P Parameter: Temperature (deg C) Value: 42 vs. 22
  misc_feature: MA Experiment 108522 PARAMETER Experiment Name: Zm_42deg_Heat_P Parameter: Timepoint (hr) Value: 1
  misc_feature: MA Experiment 108522 PARAMETER Experiment Name: Zm_42deg_Heat_P Parameter: Tissue Value: Aerial
  misc_feature: MA Experiment ID: 108535 Result: Up-regulated in Transcription
  misc_feature: MA Experiment 108535 PARAMETER Experiment Name: Zm_Meristem_P Parameter: Age (day) Value: 8
  misc_feature: MA Experiment 108535 PARAMETER Experiment Name: Zm_Meristem_P Parameter: Organism Value: Zea mays
  misc_feature: MA Experiment 108535 PARAMETER Experiment Name: Zm_Meristem_P Parameter: Plant Line Value: 35A19
  misc_feature: MA Experiment 108535 PARAMETER Experiment Name: Zm_Meristem_P Parameter: Tissue Value: Root Meristem vs. Above Root Meristem
  misc_feature: MA Experiment ID: 108556 Result: Down-regulated in Transcription
  misc_feature: MA Experiment 108556 PARAMETER Experiment Name: Zm_Drought_P Parameter: Age (day) Value: 9
  misc_feature: MA Experiment 108556 PARAMETER Experiment Name: Zm_Drought_P Parameter: Organism Value: Zea mays
  misc_feature: MA Experiment 108556 PARAMETER Experiment Name: Zm_Drought_P Parameter: Plant Line Value: 35A19
  misc_feature: MA Experiment 108556 PARAMETER Experiment Name: Zm_Drought_P Parameter: Timepoint (hr) Value: 24
  misc_feature: MA Experiment 108556 PARAMETER Experiment Name: Zm_Drought_P Parameter: Tissue Value: Aerial
  misc_feature: MA Experiment 108556 PARAMETER Experiment Name: Zm_Drought_P Parameter: Treatment Value: Drought vs. No Drought
  misc_feature: MA Experiment ID: 20000534 Result: Down-regulated in Transcription
  misc_feature: MA Experiment 20000534 PARAMETER Experiment Name: Zm_Hybrid_Pollen_P Parameter: Age (day) Value: 8
  misc_feature: MA Experiment 20000534 PARAMETER Experiment Name: Zm_Hybrid_Pollen_P Parameter: Organism Value: Zea mays
  misc_feature: MA Experiment 20000534 PARAMETER Experiment Name: Zm_Hybrid_Pollen_P Parameter: Plant Line Value: 35A19
  misc_feature: MA Experiment 20000534 PARAMETER Experiment Name: Zm_Hybrid_Pollen_P Parameter: Tissue Value: Pollen vs. Aerial
gcacgagaccattacctagaacatcctaatcgaaaaagaaaggtccccgtagaaattcgaaaccacaccaccacctggaaacccagacaaagcacgagccacgcacggcccccgctgcctcccttccgccgccgccgccgccggcggcgcgccaccgtcgctgctctcccgccttcaccgcgcccaactccaatccttgcctcccccgcgcgcttcagcctcttcactccccatcgttttcgcctggccagatccaggtttccttgaccgagacctcgcctgccttacgcctccggtcggattcttcgccgtccttgtccccactgggcaccgctggggtggagcggagatcggatccgccgggagctgattccttctctcgcaggctggatgcccttactttcttcgatggactgctcgtgttattctgcaattctcagttttgctgtgaacgctgaatcgaatgtttctttcgttgcgttcagtctagtttgacgcggattcatttgctggtcggcatagcatgatcctacggtgattgcggatagcttgtgcaagctggtggcttgggtgttgtctttttaatctggcctaaagatatcctgagacggtagcgtcacatggatgctagtacagaggttactgatgctattggtgcggtgggctttgacaatgaggccgcggggaagttgccgcccagtgatagtgtagaggggcacgcagaagaacacgatgtgctggctgatggagcccattcgggcgagagcgaggtgatcaacccatctgaagaagtagaaatggaagccacctcgcagtcccaggacataaagcctcgagttcctgagggggttcaaggccattcaatgaaggttggtactaaatctcagcgacagagccctcgaggcggggataagagtcaaactaggaaaagctcttttagtccttcttatcctaaggcgcccattgcacgggtttctgatccagatctagttgattgctctttgagcaatggtgatgctggttccagtaagaaaaaggccgagaagagcagtttccgcccagttgccaaggagaccccatcacttgaggactcaaatgagaagaaaaaaactcagaaggcatcaaaccaacattctgtcaaaaaggatattgaagaagaatcaaatgaaagtgtgaaacctcaaagggttggcagcactccttcatatggatttagttttaagtgtgatgagagagctgaaaaacgaagagagttctactcaaagctcgaggagaagattcatgcacaggaactagagaaaagcaacttgcaggcaaaatcaaaggaaactgaagaagctgaactcaaaatgctgagaaagagtttaaatttcaaggcaacaccaatgcccagcttttataaggaaccacctccccccaaggttgagttgaagaagatacctacaacaagagctaggtcaccaaagcttggtcgctccaagaacacatcctcaggagggacagaagggaatccaaatcctccagctcgttcagctcgactgagtctcgatgaaagggtctcccaaaatggtgtcaagaaagcacctgctgcaaatgcagcgaagaagccccagcggaaatctctacctaaactgccttcagagcaaacaaccaaagttgacattgcaccatctgttccatctgcagaagagctagaaaacaagttgccgacgaagggtggtcttgatcgagagccgatccgcgctcaaattacacctgacgaacctggactcactgcataggaacctatcaagccgactcctatgaaaggagggagttgtgccccagcttcctttatcacattttgctatttctgcagtaaactgctggctggtattatgtattagaattagtctcagcaccaggagcttgaagagtggcaagtgacaccgtgtattctttatcttagtttctgttgacataccaggtatttgtagttggcagacaggcagaatttcatattattctccagggctaccagtcaattaagttgccgtccaagtaagatatgtacacgattttgcc

SEQ ID NO: 19412 - protein, 386 aa, Zea mays subsp. mays
  peptide (1)..(386): Ceres Seq. ID no. 12361231
  misc_feature (23)..(340): Pfam Name: AF-4 proto-oncoprotein Pfam Description: AF-4 proto-oncoprotein
  misc_feature (45)..(371): Homolog of NCBI NO: 18417986 NR Description: putative protein
  misc_feature (47)..(292): Homolog of NCBI NO: 9294199 NR Description: gb|AAF04893.1~gene_id:MXC7.13~similar to unknown
  misc_feature (1)..(337): Homolog of NCBI NO: 34393229 NR Description: putative seed specific protein
  misc_feature (133)..(292): Homolog of NCBI NO: 32395575 NR Description: seed specific protein Bn15D14A [Brassica napus]
  misc_feature (18)..(329): Homolog of NCBI NO: 34897180 NR Description: unknown protein [Oryza sativa (japonica
  misc_feature (154)..(272): Homolog of NCBI NO: 7486636 NR Description: hypothetical protein F8B4.30 - Arabidopsis
  misc_feature (154)..(272): Homolog of NCBI NO: 7485356 NR Description: hypothetical protein F10M6.40 - Arabidopsis
  misc_feature (60)..(381): Homolog of NCBI NO: 25408425 NR Description: hypothetical protein At2g35880 [imported] -
  misc_feature (1)..(381): Homolog of NCBI NO: 18403980 NR Description: expressed protein
  misc_feature (53)..(365): Homolog of NCBI NO: 15224733 NR Description: unknown protein; protein id: At2g25480.1
MDASTEVTDAIGAVGFDNEAAGKLPPSDSVEGHAEEHDVLADGAHSGESEVINPSEEVEMEATSQSQDIKPRVPEGVQGHSMKVGTKSQRQSPRGGDKSQTRKSSFSPSYPKAPIARVSDPDLVDCSLSNGDAGSSKKKAEKSSFRPVAKETPSLEDSNEKKKTQKASNQHSVKKDIEEESNESVKPQRVGSTPSYGFSFKCDERAEKRREFYSKLEEKIHAQELEKSNLQAKSKETEEAELKMLRKSLNFKATPMPSFYKEPPPPKVELKKIPTTRARSPKLGRSKNTSSGGTEGNPNPPARSARLSLDERVSQNGVKKAPAANAAKKPQRKSLPKLPSEQTTKVDIAPSVPSAEELENKLPTKGGLDREPIRAQITPDEPGLTA

SEQ ID NO: 19413 - protein, 327 aa, Zea mays subsp. mays
  peptide (1)..(327): Ceres Seq. ID no. 12361232
  misc_feature (1)..(281): Pfam Name: AF-4 proto-oncoprotein Pfam Description: AF-4 proto-oncoprotein
  misc_feature (1)..(233): Homolog of NCBI NO: 9294199 NR Description: gb|AAF04893.1~gene_id:MXC7.13~similar to unknown
  misc_feature (1)..(278): Homolog of NCBI NO: 34393229 NR Description: putative seed specific protein
  misc_feature (74)..(233): Homolog of NCBI NO: 32395575 NR Description: seed specific protein Bn15D14A [Brassica napus]
  misc_feature (1)..(270): Homolog of NCBI NO: 34897180 NR Description: unknown protein [Oryza sativa (japonica
  misc_feature (95)..(213): Homolog of NCBI NO: 7486636 NR Description: hypothetical protein F8B4.30 - Arabidopsis
  misc_feature (95)..(213): Homolog of NCBI NO: 7485356 NR Description: hypothetical protein F10M6.40 - Arabidopsis
  misc_feature (1)..(322): Homolog of NCBI NO: 25408425 NR Description: hypothetical protein At2g35880 [imported] -
  misc_feature (1)..(322): Homolog of NCBI NO: 18403980 NR Description: expressed protein
  misc_feature (1)..(306): Homolog of NCBI NO: 15224733 NR Description: unknown protein; protein id: At2g25480.1
  misc_feature (1)..(312): Homolog of NCBI NO: 18417986 NR Description: putative protein
MEATSQSQDIKPRVPEGVQGHSMKVGTKSQRQSPRGGDKSQTRKSSFSPSYPKAPIARVSDPDLVDCSLSNGDAGSSKKKAEKSSFRPVAKETPSLEDSNEKKKTQKASNQHSVKKDIEEESNESVKPQRVGSTPSYGFSFKCDERAEKRREFYSKLEEKIHAQELEKSNLQAKSKETEEAELKMLRKSLNFKATPMPSFYKEPPPPKVELKKIPTTRARSPKLGRSKNTSSGGTEGNPNPPARSARLSLDERVSQNGVKKAPAANAAKKPQRKSLPKLPSEQTTKVDIAPSVPSAEELENKLPTKGGLDREPIRAQITPDEPGLTA

SEQ ID NO: 19414 - protein, 305 aa, Zea mays subsp. mays
  peptide (1)..(305): Ceres Seq. ID no. 12361233
  misc_feature (1)..(259): Pfam Name: AF-4 proto-oncoprotein Pfam Description: AF-4 proto-oncoprotein
  misc_feature (1)..(211): Homolog of NCBI NO: 9294199 NR Description: gb|AAF04893.1~gene_id:MXC7.13~similar to unknown
  misc_feature (1)..(256): Homolog of NCBI NO: 34393229 NR Description: putative seed specific protein
  misc_feature (52)..(211): Homolog of NCBI NO: 32395575 NR Description: seed specific protein Bn15D14A [Brassica napus]
  misc_feature (1)..(248): Homolog of NCBI NO: 34897180 NR Description: unknown protein [Oryza sativa (japonica
  misc_feature (73)..(191): Homolog of NCBI NO: 7486636 NR Description: hypothetical protein F8B4.30 - Arabidopsis
  misc_feature (73)..(191): Homolog of NCBI NO: 7485356 NR Description: hypothetical protein F10M6.40 - Arabidopsis
  misc_feature (1)..(300): Homolog of NCBI NO: 25408425 NR Description: hypothetical protein At2g35880 [imported] -
  misc_feature (1)..(300): Homolog of NCBI NO: 18403980 NR Description: expressed protein
  misc_feature (1)..(284): Homolog of NCBI NO: 15224733 NR Description: unknown protein; protein id: At2g25480.1
  misc_feature (1)..(290): Homolog of NCBI NO: 18417986 NR Description: putative protein
MKVGTKSQRQSPRGGDKSQTRKSSFSPSYPKAPIARVSDPDLVDCSLSNGDAGSSKKKAEKSSFRPVAKETPSLEDSNEKKKTQKASNQHSVKKDIEEESNESVKPQRVGSTPSYGFSFKCDERAEKRREFYSKLEEKIHAQELEKSNLQAKSKETEEAELKMLRKSLNFKATPMPSFYKEPPPPKVELKKIPTTRARSPKLGRSKNTSSGGTEGNPNPPARSARLSLDERVSQNGVKKAPAANAAKKPQRKSLPKLPSEQTTKVDIAPSVPSAEELENKLPTKGGLDREPIRAQITPDEPGLTA

SEQ ID NO: 19415 - DNA, 1589 bp, Zea mays subsp. mays
  misc_feature (1)..(1589): Ceres Seq. ID no. 12364378
  misc_feature: MA Experiment ID: 108529 Result: Up-regulated in Transcription
  misc_feature: MA Experiment 108529 PARAMETER Experiment Name: Zm_Imbibed_Seeds_P Parameter: Age (day) Value: 5 vs. 2
  misc_feature: MA Experiment 108529 PARAMETER Experiment Name: Zm_Imbibed_Seeds_P Parameter: Organism Value: Zea mays
  misc_feature: MA Experiment 108529 PARAMETER Experiment Name: Zm_Imbibed_Seeds_P Parameter: Plant Line Value: 35A19
  misc_feature: MA Experiment 108529 PARAMETER Experiment Name: Zm_Imbibed_Seeds_P Parameter: Tissue Value: Roots vs. Embryo
  misc_feature: MA Experiment ID: 108535 Result: Down-regulated in Transcription
  misc_feature: MA Experiment 108535 PARAMETER Experiment Name: Zm_Meristem_P Parameter: Age (day) Value: 8
  misc_feature: MA Experiment 108535 PARAMETER Experiment Name: Zm_Meristem_P Parameter: Organism Value: Zea mays
  misc_feature: MA Experiment 108535 PARAMETER Experiment Name: Zm_Meristem_P Parameter: Plant Line Value: 35A19
  misc_feature: MA Experiment 108535 PARAMETER Experiment Name: Zm_Meristem_P Parameter: Tissue Value: Root Meristem vs. Above Root Meristem
  misc_feature: MA Experiment ID: 108544 Result: Down-regulated in Transcription
  misc_feature: MA Experiment ID: 108546 Result: Up-regulated in Transcription
  misc_feature: MA Experiment 108546 PARAMETER Experiment Name: Zm_Imbibed_Seeds_P Parameter: Age (day) Value: 3 vs. 2
  misc_feature: MA Experiment 108546 PARAMETER Experiment Name: Zm_Imbibed_Seeds_P Parameter: Organism Value: Zea mays
  misc_feature: MA Experiment 108546 PARAMETER Experiment Name: Zm_Imbibed_Seeds_P Parameter: Plant Line Value: 35A19
  misc_feature: MA Experiment 108546 PARAMETER Experiment Name: Zm_Imbibed_Seeds_P Parameter: Tissue Value: Roots vs. Embryo
gcacgagaccattacctagaacatcctaatcaaaaaacttcacgcaccaccctagtacaagagataccacagtccacagcaaaacgtacgccagaacaagctaagcgcgcgcgagccgcagacatcctaacgatggccgtcgtcgaggtcgtcacctccgagctggtggcgccgagcgagcccacgccgcggcgcccgctctggctgtccaacctcgacctcgccgcgcggaacggctacaccccgacgatctacttcttccgccgtccccaggacagcagcgacggccggctgcgtgcggactcctgcttctcgacccacgcgctgcgtgcggcgctggccgccgcgctggtccggttctacccgtttgccggccggctccgcgccgccggccgcggcgggcgcgccgagatcgactgcaacgccgcgggcgcgctcttggtcgtcgcgcggtccgccgcggcgctcgaggacttcctccacgacttcgcgccgtccaaggccatgaacgacacgttcgtgcccacgtacgactccgctggccccgacgcaccgttgctactgcttcaggtcacctttttcaggtgcggcggcgtggcgctcggcacggcgatgcaccacttcgtcatcgacggccgcagcgccttccacttcatctgaacgtggtccagcatcgcccgtggagacaccgccgccgcgcccccgtcgcttgaccgcacggcactccgggcgcgcccactgctcactactgccgccgccctcttcgaccacacccacgagtacggcggccgcgcctccaggccagcagcagtaaccgccggcgccgccggaagcaaggcggagtacgccagcgcgatcctccgcgtgaccggcgcgcaggccgccgccctgcgcgcccgcgcgggcgcggtgtccacgttccgcgcgctggtggcgcacgtctnncggtgcgcgtgcgcggcacgcgcgctggctcacgacgcgagtcccgcctgtacacgatggtggacatgcgngcccgcctgtccccgccgntgccgnacgccttnttcggcaacgcggtggcgcgcacctccgtgtcggcccgcgtcggcgacntccctggccaacccgctgggtttcggcgcacgtcggctccgcgcggcgacggggcacggggacgagtatgtgcgctcgctgctggattacctggagacggcggacctggcgacggtaccgcgccagggcctgcgcggcacggacctgcgggtgatcagctggctggggatgccgtcgtacgacgccgacttcgggtggggcgagccggcgctgctggcgccggcgctcatgtattacccggggttcgtgtacctgttgaactgccccggcaagggtggcgatgttgccgtggccgccgcgctggagcccgagcgcatgcagcgttcaaggagctcttctacgaggagctggctatgctggagtgaacgtacgtgaggcaaaagattcacgcttaacgtgcactttgtgtgcaccagttaatctataatatgtctatgtataactatatttatcgttatatctataatctacatactatatagaaatattct

SEQ ID NO: 19416 - protein, 219 aa, Zea mays subsp. mays
  peptide (1)..(219): Ceres Seq. ID no. 12364379
  misc_feature (48)..(219): Pfam Name: Transferase family Pfam Description: Transferase family
  misc_feature (49)..(219): Homolog of NCBI NO: 7484690 NR Description: anthranilate N-benzoyltransferase (EC 2.3.1.144)
  misc_feature (48)..(219): Homolog of NCBI NO: 7484689 NR Description: anthranilate N-benzoyltransferase (EC 2.3.1.144)
  misc_feature (48)..(219): Homolog of NCBI NO: 40253398 NR Description: putative hydroxyanthranilate
  misc_feature (45)..(219): Homolog of NCBI NO: 40644084 NR Description: hydroxycinnamoyl CoA quinate transferase
  misc_feature (48)..(219): Homolog of NCBI NO: 27475616 NR Description: hydroxycinnamoyl transferase [Nicotiana tabacum]
  misc_feature (48)..(219): Homolog of NCBI NO: 21536883 NR Description: anthranilate N-benzoyltransferase [Arabidopsis
  misc_feature (48)..(219): Homolog of NCBI NO: 15239747 NR Description: anthranilate N-benzoyltransferase
  misc_feature (45)..(219): Homolog of NCBI NO: 38345030 NR Description: OSJNBa0029H02.14 [Oryza sativa (japonica
  misc_feature (45)..(219): Homolog of NCBI NO: 40644899 NR Description: hydroxycinnamoyl CoA quinate transferase
  misc_feature (48)..(219): Homolog of NCBI NO: 6469032 NR Description: N-hydroxycinnamoyl/benzoyltransferase [Ipomoea
ARDHYLEHPNQKTSRTTLVQEIPQSTAKRTPEQAKRARAADILTMAVVEVVTSELVAPSEPTPRRPLWLSNLDLAARNGYTPTIYFFRRPQDSSDGRLRADSCFSTHALRAALAAALVRFYPFAGRLRAAGRGGRAEIDCNAAGALLVVARSAAALEDFLHDFAPSKAMNDTFVPTYDSAGPDAPLLLLQVTFFRCGGVALGTAMHHFVIDGRSAFHFI

SEQ ID NO: 19417 - protein, 175 aa, Zea mays subsp. mays
  peptide (1)..(175): Ceres Seq. ID no. 12364380
  misc_feature (4)..(175): Pfam Name: Transferase family Pfam Description: Transferase family
  misc_feature (5)..(175): Homolog of NCBI NO: 7484690 NR Description: anthranilate N-benzoyltransferase (EC 2.3.1.144)
  misc_feature (4)..(175): Homolog of NCBI NO: 7484689 NR Description: anthranilate N-benzoyltransferase (EC 2.3.1.144)
  misc_feature (4)..(175): Homolog of NCBI NO: 40253398 NR Description: putative hydroxyanthranilate
  misc_feature (1)..(175): Homolog of NCBI NO: 40644084 NR Description: hydroxycinnamoyl CoA quinate transferase
  misc_feature (4)..(175): Homolog of NCBI NO: 27475616 NR Description: hydroxycinnamoyl transferase [Nicotiana tabacum]
  misc_feature (4)..(175): Homolog of NCBI NO: 21536883 NR Description: anthranilate N-benzoyltransferase [Arabidopsis
  misc_feature (4)..(175): Homolog of NCBI NO: 15239747 NR Description: anthranilate N-benzoyltransferase
  misc_feature (1)..(175): Homolog of NCBI NO: 38345030 NR Description: OSJNBa0029H02.14 [Oryza sativa (japonica
  misc_feature (1)..(175): Homolog of NCBI NO: 40644899 NR Description: hydroxycinnamoyl CoA quinate transferase
  misc_feature (4)..(175): Homolog of NCBI NO: 6469032 NR Description: N-hydroxycinnamoyl/benzoyltransferase [Ipomoea
MAVVEVVTSELVAPSEPTPRRPLWLSNLDLAARNGYTPTIYFFRRPQDSSDGRLRADSCFSTHALRAALAAALVRFYPFAGRLRAAGRGGRAEIDCNAAGALLVVARSAAALEDFLHDFAPSKAMNDTFVPTYDSAGPDAPLLLLQVTFFRCGGVALGTAMHHFVIDGRSAFHFI

SEQ ID NO: 19418 - protein, 153 aa, Zea mays subsp. mays
  peptide (1)..(153): Ceres Seq. ID no. 12364381
  misc_feature (1)..(122): Homolog of NCBI NO: 29247944 NR Description: GLP_26_54603_52153 [Giardia lamblia ATCC 50803]
  misc_feature (5)..(5): Xaa is any aa, unknown or other
  misc_feature (12)..(12): Xaa is any aa, unknown or other
  misc_feature (14)..(14): Xaa is any aa, unknown or other
  misc_feature (16)..(16): Xaa is any aa, unknown or other
  misc_feature (33)..(33): Xaa is any aa, unknown or other
MVDMXARLSPPXPXAXFGNAVARTSVSARVGDXPGQPAGFRRTSAPRGDGARGRVCALAAGLPGDGGPGDGTAPGPARHGPAGDQLAGDAVVRRRLRVGRAGAAGAGAHVLPGVRVPVELPRQGWRCCRGRRAGARAHAAFKELFYEELAMLE

SEQ ID NO: 19419 - DNA, 2126 bp, Zea mays subsp. mays
  misc_feature (1)..(2126): Ceres Seq. ID no. 12436083
  misc_feature: MA Experiment ID: 20000492 Result: Down-regulated in Transcription
  misc_feature: MA Experiment 20000492 PARAMETER Experiment Name: Zm_Hybrid_Seed_Dev_P Parameter: DAP Value: 12
  misc_feature: MA Experiment 20000492 PARAMETER Experiment Name: Zm_Hybrid_Seed_Dev_P Parameter: Organism Value: Zea mays
  misc_feature: MA Experiment 20000492 PARAMETER Experiment Name: Zm_Hybrid_Seed_Dev_P Parameter: Plant Line Value: 35A19
  misc_feature: MA Experiment 20000492 PARAMETER Experiment Name: Zm_Hybrid_Seed_Dev_P Parameter: Tissue Value: Fert Kernel vs. Unfert Floret
aaagagccgacgtcactcctcccgatctgggcgcggacgccaacgacgcgacggcccaagtcgcgacgccaccagctccccatcccctcggacgccatggaggaagctcgcgaccacaggctctcctccaccgccggccgccccttcctctctggcttctgcgccgcggcgctccgacgtaagcccctcggcgcccgcgcctccgccgccgccgccgccaccggcgagggccttgtgcggcagctcggcgtcctcgacctcgtgctgctcgggatcggtgcgtccatcggcgccggcatattcgtcgtcactggcaccgtcgcccgcgacgccggcccaggtgtcacgatcagttttgttcttgctggagctgcgtgcgtgctcaatgccctgtgctatgctgaactggcgtctcggttccctgctgtggttgggggagcatacttgtacacgtacgcagcgttcaatgagatcaccgccttcttggtcttcactcagttgatggtggattaccatatcggcgcagcaagcattgctcgcagcttagcaagctactttatcgagttcttggagctaatcccgctcttgaagggccaaattccaagctgggtaggccatggggaggagttttttggtggtgttgtatcaattaacatactggcccccgttcttctcatcatcttaactgcgattctctgctatggtgtcaaagaatcatcagcagtgaacacgtttatgacaacattgaagataatcattgttatagtcattgtatttgctggtgtgtttgaggtggatgtatcaaactggtctccgtttatgccaaatggtttcaaatctgtagtgactggagccacagtagtcttttttgcatatgttggatttgatgcggttgctaattctgctgaggaagccaaaaggccacagagagacctacccattggtatactaggaagccttatagcatgtgtgttgttatacgttgctgtatgcttggtcattactggaatggttccatatacattactcggtgaagatgctcctttggctgaggcttttgctgctaagggcctgaaatttattactgtattgattagtattggagctgttgctggacttacaacaacacttcttgttggcttgtatgttcagtcacgtttgtactttggacttggaagggatgggcttttaccttcagtatttgctgaagtacacccaacaaggcatactcctgtacagtctcagatttgggtcggttgtgttgcagcagtcatggcaggcctctttaatgtgcgtatgctctcacatattctttccgttggcactctgaccggttattcagttgtatcagcttgtgtgatcacactaagatggaatgacaaaggaactagtcgtcgctcccttggaagtatgtcaatttggcaagagggtgttcttagtcttgtcatagttgctctttgtggttttatagtgggactttgctatcgctttaactatgctatagcctttatggttgtagcttttctgatagctgttgctgccagtttcgctctccagtttcgtcaggtctatgtggatccacctggcttttcttgtcctggggtaccgttggttcccattatttctgttttcttcaacatggtcctgtttgctcagctacatgaagaagcgtggtatagatttgtcattcttagtctcatcgctgtgggagtttatgccggctatggtcagtacaatgctgttccttccagctcagaacactctactattggttaccatggcattccttctgaagccgcatgagctatgttcatccccggagttcttcgaacatactgtatggtaccaacatacaccatcgtcaccgaagtttgaacctgttgcttttttttttgatgttttgcacagtgcatactcttgtagttacgcttagtactcctatacctatatctagacagtgaatttcacagcctgtgttgtgcccaccacaccattcgtcaggaagcttgccaagtgcatagaccttgtaaaaatgcaaatgaaaataaagaactgcagctgcattgtttgtaggaactcattgtcatgcactatgtataattctgtgtatattgtgaagagttcat

SEQ ID NO: 19420 - protein, 600 aa, Zea mays subsp. mays
  peptide (1)..(600): Ceres Seq. ID no. 12436084
  misc_feature (222)..(391): Pfam Name: Spore germination protein Pfam Description: Spore germination protein
  misc_feature (505)..(581): Homolog of NCBI NO: 20808968 NR Description: Amino acid transporters [Thermoanaerobacter
  misc_feature (59)..(484): Homolog of NCBI NO: 20808968 NR Description: Amino acid transporters [Thermoanaerobacter
  misc_feature (507)..(580): Homolog of NCBI NO: 37521235 NR Description: probable amino acid transporter [Gloeobacter
  misc_feature (77)..(465): Homolog of NCBI NO: 37521235 NR Description: probable amino acid transporter [Gloeobacter
  misc_feature (471)..(590): Homolog of NCBI NO: 30018492 NR Description: Amino acid permease [Bacillus cereus ATCC 14579]
  misc_feature (59)..(457): Homolog of NCBI NO: 30018492 NR Description: Amino acid permease [Bacillus cereus ATCC 14579]
  misc_feature (107)..(587): Homolog of NCBI NO: 25406885 NR Description: hypothetical protein [imported] - Arabidopsis
  misc_feature (38)..(587): Homolog of NCBI NO: 18390592 NR Description: expressed protein
  misc_feature (383)..(599): Homolog of NCBI NO: 14140148 NR Description: putative protein [Oryza sativa]
  misc_feature (34)..(380): Homolog of NCBI NO: 14140148 NR Description: putative protein [Oryza sativa]
KEPTSLLPIWARTPTTRRPKSRRHQLPIPSDAMEEARDHRLSSTAGRPFLSGFCAAALRRKPLGARASAAAAATGEGLVRQLGVLDLVLLGIGASIGAGIFVVTGTVARDAGPGVTISFVLAGAACVLNALCYAELASRFPAVVGGAYLYTYAAFNEITAFLVFTQLMVDYHIGAASIARSLASYFIEFLELIPLLKGQIPSWVGHGEEFFGGVVSINILAPVLLIILTAILCYGVKESSAVNTFMTTLKIIIVIVIVFAGVFEVDVSNWSPFMPNGFKSVVTGATVVFFAYVGFDAVANSAEEAKRPQRDLPIGILGSLIACVLLYVAVCLVITGMVPYTLLGEDAPLAEAFAAKGLKFITVLISIGAVAGLTTTLLVGLYVQSRLYFGLGRDGLLPSVFAEVHPTRHTPVQSQIWVGCVAAVMAGLFNVRMLSHILSVGTLTGYSVVSACVITLRWNDKGTSRRSLGSMSIWQEGVLSLVIVALCGFIVGLCYRFNYAIAFMVVAFLIAVAASFALQFRQVYVDPPGFSCPGVPLVPIISVFFNMVLFAQLHEEAWYRFVILSLIAVGVYAGYGQYNAVPSSSEHSTIGYHGIPSEAA

SEQ ID NO: 19421 - protein, 568 aa, Zea mays subsp. mays
  peptide (1)..(568): Ceres Seq. ID no. 12436085
  misc_feature (190)..(359): Pfam Name: Spore germination protein Pfam Description: Spore germination protein
  misc_feature (473)..(549): Homolog of NCBI NO: 20808968 NR Description: Amino acid transporters [Thermoanaerobacter
  misc_feature (27)..(452): Homolog of NCBI NO: 20808968 NR Description: Amino acid transporters [Thermoanaerobacter
  misc_feature (475)..(548): Homolog of NCBI NO: 37521235 NR Description: probable amino acid transporter [Gloeobacter
  misc_feature (45)..(433): Homolog of NCBI NO: 37521235 NR Description: probable amino acid transporter [Gloeobacter
  misc_feature (439)..(558): Homolog of NCBI NO: 30018492 NR Description: Amino acid permease [Bacillus cereus ATCC 14579]
  misc_feature (27)..(425): Homolog of NCBI NO: 30018492 NR Description: Amino acid permease [Bacillus cereus ATCC 14579]
  misc_feature (75)..(555): Homolog of NCBI NO: 25406885 NR Description: hypothetical protein [imported] - Arabidopsis
  misc_feature (6)..(555): Homolog of NCBI NO: 18390592 NR Description: expressed protein
  misc_feature (351)..(567): Homolog of NCBI NO: 14140148 NR Description: putative protein [Oryza sativa]
  misc_feature (2)..(348): Homolog of NCBI NO: 14140148 NR Description: putative protein [Oryza sativa]
MEEARDHRLSSTAGRPFLSGFCAAALRRKPLGARASAAAAATGEGLVRQLGVLDLVLLGIGASIGAGIFVVTGTVARDAGPGVTISFVLAGAACVLNALCYAELASRFPAVVGGAYLYTYAAFNEITAFLVFTQLMVDYHIGAASIARSLASYFIEFLELIPLLKGQIPSWVGHGEEFFGGVVSINILAPVLLIILTAILCYGVKESSAVNTFMTTLKIIIVIVIVFAGVFEVDVSNWSPFMPNGFKSVVTGATVVFFAYVGFDAVANSAEEAKRPQRDLPIGILGSLIACVLLYVAVCLVITGMVPYTLLGEDAPLAEAFAAKGLKFITVLISIGAVAGLTTTLLVGLYVQSRLYFGLGRDGLLPSVFAEVHPTRHTPVQSQIWVGCVAAVMAGLFNVRMLSHILSVGTLTGYSVVSACVITLRWNDKGTSRRSLGSMSIWQEGVLSLVIVALCGFIVGLCYRFNYAIAFMVVAFLIAVAASFALQFRQVYVDPPGFSCPGVPLVPIISVFFNMVLFAQLHEEAWYRFVILSLIAVGVYAGYGQYNAVPSSSEHSTIGYHGIPSEAA

SEQ ID NO: 19422 - protein, 433 aa, Zea mays subsp. mays
  peptide (1)..(433): Ceres Seq. ID no. 12436086
  misc_feature (55)..(224): Pfam Name: Spore germination protein Pfam Description: Spore germination protein
  misc_feature (338)..(414): Homolog of NCBI NO: 20808968 NR Description: Amino acid transporters [Thermoanaerobacter
  misc_feature (1)..(317): Homolog of NCBI NO: 20808968 NR Description: Amino acid transporters [Thermoanaerobacter
  misc_feature (340)..(413): Homolog of NCBI NO: 37521235 NR Description: probable amino acid transporter [Gloeobacter
  misc_feature (1)..(298): Homolog of NCBI NO: 37521235 NR Description: probable amino acid transporter [Gloeobacter
  misc_feature (304)..(423): Homolog of NCBI NO: 30018492 NR Description: Amino acid permease [Bacillus cereus ATCC 14579]
  misc_feature (1)..(290): Homolog of NCBI NO: 30018492 NR Description: Amino acid permease [Bacillus cereus ATCC 14579]
  misc_feature (1)..(420): Homolog of NCBI NO: 25406885 NR Description: hypothetical protein [imported] - Arabidopsis
  misc_feature (1)..(420): Homolog of NCBI NO: 18390592 NR Description: expressed protein
  misc_feature (216)..(432): Homolog of NCBI NO: 14140148 NR Description: putative protein [Oryza sativa]
  misc_feature (1)..(213): Homolog of NCBI NO: 14140148 NR Description: putative protein [Oryza sativa]
MVDYHIGAASIARSLASYFIEFLELIPLLKGQIPSWVGHGEEFFGGVVSINILAPVLLIILTAILCYGVKESSAVNTFMTTLKIIIVIVIVFAGVFEVDVSNWSPFMPNGFKSVVTGATVVFFAYVGFDAVANSAEEAKRPQRDLPIGILGSLIACVLLYVAVCLVITGMVPYTLLGEDAPLAEAFAAKGLKFITVLISIGAVAGLTTTLLVGLYVQSRLYFGLGRDGLLPSVFAEVHPTRHTPVQSQIWVGCVAAVMAGLFNVRMLSHILSVGTLTGYSVVSACVITLRWNDKGTSRRSLGSMSIWQEGVLSLVIVALCGFIVGLCYRFNYAIAFMVVAFLIAVAASFALQFRQVYVDPPGFSCPGVPLVPIISVFFNMVLFAQLHEEAWYRFVILSLIAVGVYAGYGQYNAVPSSSEHSTIGYHGIPSEAA

SEQ ID NO: 19423 - DNA, 2189 bp, Zea mays subsp. mays
  misc_feature (1)..(2189): Ceres Seq. ID no. 12375779
  misc_feature: MA Experiment ID: 108527 Result: Up-regulated in Transcription
  misc_feature: MA Experiment 108527 PARAMETER Experiment Name: Zm_5mM_NO_P Parameter: Age (day) Value: 8
  misc_feature: MA Experiment 108527 PARAMETER Experiment Name: Zm_5mM_NO_P Parameter: Organism Value: Zea mays
  misc_feature: MA Experiment 108527 PARAMETER Experiment Name: Zm_5mM_NO_P Parameter: Plant Line Value: 35A19
  misc_feature: MA Experiment 108527 PARAMETER Experiment Name: Zm_5mM_NO_P Parameter: Timepoint (hr) Value: 6
  misc_feature: MA Experiment 108527 PARAMETER Experiment Name: Zm_5mM_NO_P Parameter: Tissue Value: Aerial
  misc_feature: MA Experiment 108527 PARAMETER Experiment Name: Zm_5mM_NO_P Parameter: Treatment Value: 5mM NO vs. No Treatment
  misc_feature: MA Experiment ID: 108528 Result: Down-regulated in Transcription
  misc_feature: MA Experiment 108528 PARAMETER Experiment Name: Zm_Imbibed_Seeds_P Parameter: Age (day) Value: 5 vs. 2
  misc_feature: MA Experiment 108528 PARAMETER Experiment Name: Zm_Imbibed_Seeds_P Parameter: Organism Value: Zea mays
  misc_feature: MA Experiment 108528 PARAMETER Experiment Name: Zm_Imbibed_Seeds_P Parameter: Plant Line Value: 35A19
  misc_feature: MA Experiment 108528 PARAMETER Experiment Name: Zm_Imbibed_Seeds_P Parameter: Tissue Value: Aerial vs. Embryo
  misc_feature: MA Experiment ID: 108530 Result: Down-regulated in Transcription
  misc_feature: MA Experiment 108530 PARAMETER Experiment Name: Zm_Imbibed_Seeds_P Parameter: Age (day) Value: 6 vs. 2
  misc_feature: MA Experiment 108530 PARAMETER Experiment Name: Zm_Imbibed_Seeds_P Parameter: Organism Value: Zea mays
  misc_feature: MA Experiment 108530 PARAMETER Experiment Name: Zm_Imbibed_Seeds_P Parameter: Plant Line Value: 35A19
  misc_feature: MA Experiment 108530 PARAMETER Experiment Name: Zm_Imbibed_Seeds_P Parameter: Tissue Value: Aerial vs. Embryo
  misc_feature: MA Experiment ID: 108543 Result: Up-regulated in Transcription
  misc_feature: MA Experiment ID: 108544 Result: Down-regulated in Transcription
  misc_feature: MA Experiment ID: 108545 Result: Down-regulated in Transcription
  misc_feature: MA Experiment 108545 PARAMETER Experiment Name: Zm_Imbibed_Seeds_P Parameter: Age (day) Value: 3 vs. 2
  misc_feature: MA Experiment 108545 PARAMETER Experiment Name: Zm_Imbibed_Seeds_P Parameter: Organism Value: Zea mays
  misc_feature: MA Experiment 108545 PARAMETER Experiment Name: Zm_Imbibed_Seeds_P Parameter: Plant Line Value: 35A19
  misc_feature: MA Experiment 108545 PARAMETER Experiment Name: Zm_Imbibed_Seeds_P Parameter: Tissue Value: Aerial vs. Embryo
  misc_feature: MA Experiment ID: 108547 Result: Down-regulated in Transcription
  misc_feature: MA Experiment 108547 PARAMETER Experiment Name: Zm_Imbibed_Seeds_P Parameter: Age (day) Value: 4 vs. 2
  misc_feature: MA Experiment 108547 PARAMETER Experiment Name: Zm_Imbibed_Seeds_P Parameter: Organism Value: Zea mays
  misc_feature: MA Experiment 108547 PARAMETER Experiment Name: Zm_Imbibed_Seeds_P Parameter: Plant Line Value: 35A19
  misc_feature: MA Experiment 108547 PARAMETER Experiment Name: Zm_Imbibed_Seeds_P Parameter: Tissue Value: Aerial vs. Embryo
  misc_feature: MA Experiment ID: 108559 Result: Up-regulated in Transcription
  misc_feature: MA Experiment 108559 PARAMETER Experiment Name: Zm_5mM_NO_P Parameter: Age (day) Value: 8
  misc_feature: MA Experiment 108559 PARAMETER Experiment Name: Zm_5mM_NO_P Parameter: Organism Value: Zea mays
  misc_feature: MA Experiment 108559 PARAMETER Experiment Name: Zm_5mM_NO_P Parameter: Plant Line Value: 35A19
  misc_feature: MA Experiment 108559 PARAMETER Experiment Name: Zm_5mM_NO_P Parameter: Timepoint (hr) Value: 12
  misc_feature: MA Experiment 108559 PARAMETER Experiment Name: Zm_5mM_NO_P Parameter: Tissue Value: Aerial
  misc_feature: MA Experiment 108559 PARAMETER Experiment Name: Zm_5mM_NO_P Parameter: Treatment Value: 5mM NO vs. No Treatment
  misc_feature: MA Experiment ID: 20000480 Result: Down-regulated in Transcription
  misc_feature: MA Experiment 20000480 PARAMETER Experiment Name: Zm_Drought_P Parameter: Age (day) Value: 11
  misc_feature: MA Experiment 20000480 PARAMETER Experiment Name: Zm_Drought_P Parameter: Organism Value: Zea mays
  misc_feature: MA Experiment 20000480 PARAMETER Experiment Name: Zm_Drought_P Parameter: Plant Line Value: 35A19
  misc_feature: MA Experiment 20000480 PARAMETER Experiment Name: Zm_Drought_P Parameter: Timepoint (hr) Value: 72
  misc_feature: MA Experiment 20000480 PARAMETER Experiment Name: Zm_Drought_P Parameter: Tissue Value: Aerial
  misc_feature: MA Experiment 20000480 PARAMETER Experiment Name: Zm_Drought_P Parameter: Treatment Value: Drought vs. No Drought
  misc_feature: MA Experiment ID: 20000627 Result: Up-regulated in Transcription
  misc_feature: MA Experiment 20000627 PARAMETER Experiment Name: Zm_Herbicide-Treatments_P Parameter: Timepoint (hr) Value: 12
  misc_feature: MA Experiment 20000627 PARAMETER Experiment Name: Zm_Herbicide-Treatments_P Parameter: Tissue Value: Aerial
  misc_feature: MA Experiment 20000627 PARAMETER Experiment Name: Zm_Herbicide-Treatments_P Parameter: Treatment Value: Finale vs. No Treatment
gcacgagaccattacctagaacatcctaatcgaaaagcccaaaattttcggaggctgtccaccgcaccaccaccctgcgcgccgagcgcaccccgatccagatccacccatcctccggtctccggcgggcgccctcttcaacgtcctcacgcgcctccggacgccagtgcgcgcgcagtgagcatcaacatcaacccacctcttctctcgtcggaccggtgcgcaccaggcggcggcggaggcggcaggcatgaaacgggtgtcgtcgcacgtctcgctcgcctccgaggcggagatcaacctcgacctgtcgcgcctcgtcatcgacaagcccaggttcacgctggagcggaagcgctccttcgacgagcagtcgtggagcgagctctcccaccgccagaacgacggcttcgacagcgtgctgcagtcgccggcattcccgtccggcggcttcgactcgcccttctccgtcggcacgcacttcggcggcccgcacccgctcgtcaacgaggcctgggaggcgctcaggaaatcggtcgtctacttccgggaacagcccgtcggcaccattgctgccgtcgatcatgcgtcggaggaagtgctcaactatgatcaggtttttgtgagggatttcgttccgagcgcattggcttttctaatgaacaatgagactgacatagtgaagaattttcttttgaaaactcttcaccttcagagctctgagaaaatggtagaccgattcaagcttggagcaggagcgatgccagcaagtttcaaggtggaccgtaataaaaacagaaacactgaaaccttagtggctgattttggtgagagtgcaatcggtagggtggcaccggttgactctggattttggtggatcattctccttcgggcatatacaaagtacaccggagatgttagtttgtcagaatcacctgaatgccagaagtgcatgaggttgatactgaatctctgcttatctgaaggatttgatacttttccaactctgctctgcacagatggctgctcaatgattgatcgtcgaatgggtatatatggttatcccattgagatccaagccctattctatatggcattaagatgtgctctccaaatgctcaagccagagggcgaagggaaggatttcatagagaagatagggcaacgactacatgcactaacctaccacatgaggaattacttctggctagattttcaccagctgaataacatatacagatacaaaacagaagagtattcccacactgctgtgaacaagttcaatgtaattccagattccattcctgattgggtgtttgatttcatgccatgtcgaggagctactttcttggcaacgtcagccctgctatgatggatttcaggtggtttgcccttggcaattgcattgccattgtatcatctctagctaccccagaacagtcagttgctataatggatctgatcgaggaaaagtgggatgagctagttggtgagatgcctctgaagatatgctatcctgctctcgagaatcatgagtggagaattattactggatgtgaccccaaaaacacccggtggagttaccacaatggaggatcttggccagttcttctgtggctgctgacagcagcctgcataaagactggtcggccacaaatggcaaaacgtgccattgagctcgcagagtcaaggctgctcaaggacggctggcccgagtattacgatggcaagctaggaagattcgttggcaagcaggccaggaagttccagacctggtccattgccggttacctcgtcgcccgcatgatgctggaggacccatcgacactgatgatgatctccatggaggaggaccgccctgtgaagtcgaccatgcggcggtcagcatcatggaatgcctgaatgcgtggatagttgtttctgaaccaaggaaattcagaatcagctgttatacggatttgtgatttgtttggaccacaagagtgcagcgttggtgtgatttgttgggaccacaaagttcaacattgattatagttggactctgtcaattaggacagagtttgtataccatagaggatcataggagttgcacaagattttgccatgcccttttggtttgtttcagaacaatactcaggatcctgttcagttgaaaccttgattttggaataacaaatcactgtttatgc

SEQ ID NO: 19424 - protein, 373 aa, Zea mays subsp. mays
  peptide (1)..(373): Ceres Seq. ID no. 12375780
  misc_feature (82)..(367): Pfam Name: Plant neutral invertase Pfam Description: Plant neutral invertase
  misc_feature (9)..(367): Homolog of NCBI NO: 15236209 NR Description: invertase - like protein
  misc_feature (11)..(367): Homolog of NCBI NO: 21594008 NR Description: putative invertase [Arabidopsis thaliana]
  misc_feature (6)..(367): Homolog of NCBI NO: 25354737 NR Description: neutral invertase like protein [imported] -
  misc_feature (80)..(363): Homolog of NCBI NO: 15242261 NR Description: alkaline/neutral invertase
  misc_feature (54)..(367): Homolog of NCBI NO: 7487359 NR Description: hypothetical protein T22J18.18 - Arabidopsis
  misc_feature (67)..(367): Homolog of NCBI NO: 15218303 NR Description: neutral invertase, putative; protein id:
  misc_feature (87)..(363): Homolog of NCBI NO: 34894878 NR Description: putative neutral invertase
  misc_feature (84)..(363): Homolog of NCBI NO: 21322510 NR Description: neutral invertase [Beta vulgaris]
  misc_feature (11)..(367): Homolog of NCBI NO: 18395144 NR Description: putative invertase
  misc_feature (6)..(367): Homolog of NCBI NO: 18413234 NR Description: neutral invertase like protein
MKRVSSHVSLASEAEINLDLSRLVIDKPRFTLERKRSFDEQSWSELSHRQNDGFDSVLQSPAFPSGGFDSPFSVGTHFGGPHPLVNEAWEALRKSVVYFREQPVGTIAAVDHASEEVLNYDQVFVRDFVPSALAFLMNNETDIVKNFLLKTLHLQSSEKMVDRFKLGAGAMPASFKVDRNKNRNTETLVADFGESAIGRVAPVDSGFWWIILLRAYTKYTGDVSLSESPECQKCMRLILNLCLSEGFDTFPTLLCTDGCSMIDRRMGIYGYPIEIQALFYMALRCALQMLKPEGEGKDFIEKIGQRLHALTYHMRNYFWLDFHQLNNIYRYKTEEYSHTAVNKFNVIPDSIPDWVFDFMPCRGATFLATSALL

SEQ ID NO: 19425 - protein, 237 aa, Zea mays subsp. mays
  peptide (1)..(237): Ceres Seq. ID no. 12375781
  misc_feature (1)..(231): Pfam Name: Plant neutral invertase Pfam Description: Plant neutral invertase
  misc_feature (1)..(227): Homolog of NCBI NO: 21322510 NR Description: neutral invertase [Beta vulgaris]
  misc_feature (1)..(227): Homolog of NCBI NO: 15242261 NR Description: alkaline/neutral invertase
  misc_feature (1)..(227): Homolog of NCBI NO: 34894878 NR Description: putative neutral invertase
  misc_feature (1)..(231): Homolog of NCBI NO: 7487359 NR Description: hypothetical protein T22J18.18 - Arabidopsis
  misc_feature (1)..(231): Homolog of NCBI NO: 15218303 NR Description: neutral invertase, putative; protein id:
  misc_feature (1)..(231): Homolog of NCBI NO: 15236209 NR Description: invertase - like protein
  misc_feature (1)..(231): Homolog of NCBI NO: 21594008 NR Description: putative invertase [Arabidopsis thaliana]
  misc_feature (1)..(231): Homolog of NCBI NO: 25354737 NR Description: neutral invertase like protein [imported] -
  misc_feature (1)..(231): Homolog of NCBI NO: 18395144 NR Description: putative invertase
  misc_feature (1)..(231): Homolog of NCBI NO: 18413234 NR Description: neutral invertase like protein
MNNETDIVKNFLLKTLHLQSSEKMVDRFKLGAGAMPASFKVDRNKNRNTETLVADFGESAIGRVAPVDSGFWWIILLRAYTKYTGDVSLSESPECQKCMRLILNLCLSEGFDTFPTLLCTDGCSMIDRRMGIYGYPIEIQALFYMALRCALQMLKPEGEGKDFIEKIGQRLHALTYHMRNYFWLDFHQLNNIYRYKTEEYSHTAVNKFNVIPDSIPDWVFDFMPCRGATFLATSALL

SEQ ID NO: 19426 - protein, 214 aa, Zea mays subsp. mays
  peptide (1)..(214): Ceres Seq. ID no. 12375782
  misc_feature (1)..(208): Pfam Name: Plant neutral invertase Pfam Description: Plant neutral invertase
  misc_feature (1)..(204): Homolog of NCBI NO: 21322510 NR Description: neutral invertase [Beta vulgaris]
  misc_feature (1)..(204): Homolog of NCBI NO: 15242261 NR Description: alkaline/neutral invertase
  misc_feature (1)..(204): Homolog of NCBI NO: 34894878 NR Description: putative neutral invertase
  misc_feature (1)..(208): Homolog of NCBI NO: 7487359 NR Description: hypothetical protein T22J18.18 - Arabidopsis
  misc_feature (1)..(208): Homolog of NCBI NO: 15218303 NR Description: neutral invertase, putative; protein id:
  misc_feature (1)..(208): Homolog of NCBI NO: 15236209 NR Description: invertase - like protein
  misc_feature (1)..(208): Homolog of NCBI NO: 21594008 NR Description: putative invertase [Arabidopsis thaliana]
  misc_feature (1)..(208): Homolog of NCBI NO: 25354737 NR Description: neutral invertase like protein [imported] -
  misc_feature (1)..(208): Homolog of NCBI NO: 18395144 NR Description: putative invertase
  misc_feature (1)..(208): Homolog of NCBI NO: 18413234 NR Description: neutral invertase like protein
MVDRFKLGAGAMPASFKVDRNKNRNTETLVADFGESAIGRVAPVDSGFWWIILLRAYTKYTGDVSLSESPECQKCMRLILNLCLSEGFDTFPTLLCTDGCSMIDRRMGIYGYPIEIQALFYMALRCALQMLKPEGEGKDFIEKIGQRLHALTYHMRNYFWLDFHQLNNIYRYKTEEYSHTAVNKFNVIPDSIPDWVFDFMPCRGATFLATSALL

SEQ ID NO: 19427 - DNA, 1332 bp, Zea mays subsp. mays
  misc_feature (1)..(1332): Ceres Seq. ID no. 12375832
  misc_feature: MA Experiment ID: 108527 Result: Down-regulated in Transcription
  misc_feature: MA Experiment 108527 PARAMETER Experiment Name: Zm_5mM_NO_P Parameter: Age (day) Value: 8
  misc_feature: MA Experiment 108527 PARAMETER Experiment Name: Zm_5mM_NO_P Parameter: Organism Value: Zea mays
  misc_feature: MA Experiment 108527 PARAMETER Experiment Name: Zm_5mM_NO_P Parameter: Plant Line Value: 35A19
  misc_feature: MA Experiment 108527 PARAMETER Experiment Name: Zm_5mM_NO_P Parameter: Timepoint (hr) Value: 6
  misc_feature: MA Experiment 108527 PARAMETER Experiment Name: Zm_5mM_NO_P Parameter: Tissue Value: Aerial
  misc_feature: MA Experiment 108527 PARAMETER Experiment Name: Zm_5mM_NO_P Parameter: Treatment Value: 5mM NO vs. No Treatment
  misc_feature: MA Experiment ID: 108528 Result: Up-regulated in Transcription
  misc_feature: MA Experiment 108528 PARAMETER Experiment Name: Zm_Imbibed_Seeds_P Parameter: Age (day) Value: 5 vs. 2
  misc_feature: MA Experiment 108528 PARAMETER Experiment Name: Zm_Imbibed_Seeds_P Parameter: Organism Value: Zea mays
  misc_feature: MA Experiment 108528 PARAMETER Experiment Name: Zm_Imbibed_Seeds_P Parameter: Plant Line Value: 35A19
  misc_feature: MA Experiment 108528 PARAMETER Experiment Name: Zm_Imbibed_Seeds_P Parameter: Tissue Value: Aerial vs. Embryo
  misc_feature: MA Experiment ID: 108530 Result: Up-regulated in Transcription
  misc_feature: MA Experiment 108530 PARAMETER Experiment Name: Zm_Imbibed_Seeds_P Parameter: Age (day) Value: 6 vs. 2
  misc_feature: MA Experiment 108530 PARAMETER Experiment Name: Zm_Imbibed_Seeds_P Parameter: Organism Value: Zea mays
  misc_feature: MA Experiment 108530 PARAMETER Experiment Name: Zm_Imbibed_Seeds_P Parameter: Plant Line Value: 35A19
  misc_feature: MA Experiment 108530 PARAMETER Experiment Name: Zm_Imbibed_Seeds_P Parameter: Tissue Value: Aerial vs. Embryo
  misc_feature: MA Experiment ID: 108543 Result: Up-regulated in Transcription
  misc_feature: MA Experiment ID: 108545 Result: Up-regulated in Transcription
  misc_feature: MA Experiment 108545 PARAMETER Experiment Name: Zm_Imbibed_Seeds_P Parameter: Age (day) Value: 3 vs. 2
  misc_feature: MA Experiment 108545 PARAMETER Experiment Name: Zm_Imbibed_Seeds_P Parameter: Organism Value: Zea mays
  misc_feature: MA Experiment 108545 PARAMETER Experiment Name: Zm_Imbibed_Seeds_P Parameter: Plant Line Value: 35A19
  misc_feature: MA Experiment 108545 PARAMETER Experiment Name: Zm_Imbibed_Seeds_P Parameter: Tissue Value: Aerial vs. Embryo
  misc_feature: MA Experiment ID: 108546 Result: Down-regulated in Transcription
  misc_feature: MA Experiment 108546 PARAMETER Experiment Name: Zm_Imbibed_Seeds_P Parameter: Age (day) Value: 3 vs. 2
  misc_feature: MA Experiment 108546 PARAMETER Experiment Name: Zm_Imbibed_Seeds_P Parameter: Organism Value: Zea mays
  misc_feature: MA Experiment 108546 PARAMETER Experiment Name: Zm_Imbibed_Seeds_P Parameter: Plant Line Value: 35A19
  misc_feature: MA Experiment 108546 PARAMETER Experiment Name: Zm_Imbibed_Seeds_P Parameter: Tissue Value: Roots vs. Embryo
  misc_feature: MA Experiment ID: 108547 Result: Up-regulated in Transcription
  misc_feature: MA Experiment 108547 PARAMETER Experiment Name: Zm_Imbibed_Seeds_P Parameter: Age (day) Value: 4 vs. 2
  misc_feature: MA Experiment 108547 PARAMETER Experiment Name: Zm_Imbibed_Seeds_P Parameter: Organism Value: Zea mays
  misc_feature: MA Experiment 108547 PARAMETER Experiment Name: Zm_Imbibed_Seeds_P Parameter: Plant Line Value: 35A19
  misc_feature: MA Experiment 108547 PARAMETER Experiment Name: Zm_Imbibed_Seeds_P Parameter: Tissue Value: Aerial vs. Embryo
  misc_feature: MA Experiment ID: 108559 Result: Down-regulated in Transcription
  misc_feature: MA Experiment 108559 PARAMETER Experiment Name: Zm_5mM_NO_P Parameter: Age (day) Value: 8
  misc_feature: MA Experiment 108559 PARAMETER Experiment Name: Zm_5mM_NO_P Parameter: Organism Value: Zea mays
  misc_feature: MA Experiment 108559 PARAMETER Experiment Name: Zm_5mM_NO_P Parameter: Plant Line Value: 35A19
  misc_feature: MA Experiment 108559 PARAMETER Experiment Name: Zm_5mM_NO_P Parameter: Timepoint (hr) Value: 12
  misc_feature: MA Experiment 108559 PARAMETER Experiment Name: Zm_5mM_NO_P Parameter: Tissue Value: Aerial
  misc_feature: MA Experiment 108559 PARAMETER Experiment Name: Zm_5mM_NO_P Parameter: Treatment Value: 5mM NO vs. No Treatment
ggttctgggcctattcacggcattcagggggaaatgggtgagttccaagctcttcctctcatcaacttcttcccgttccacgcagaccaaccagacattaagaattgagatcctgcaaccgcaacaatggcggccatggcgaacacctctcgtctccccaccccctgcagcctcccaaccatcagcatcggcgctaagagcaggaggctagctgtggcggccgtcagatgcggtcccggcggcagcaggagccaccggaggagccttggggtcttgctgtgtcgatcctcgtccacggccggagcccaagggagcacgaggatggaggactataacaccgccatgaagcggatgatgcgtaacccctacgagtaccatcacgatctcggcatgaactatgctgtcataagtgagagcttgattgttggctcacagcctcagaagcctgaagatatcaatcacttgaaaaatgaagagcgagtagcatatattctttgcttacagcaggacaaggacattgaatattggggcattgacttccaatccattgtcaataggtgcaaagaacttggcattcagcacatcaggagaccggccgtggattttgatccagactcactgaggtcgcaactgccgaaagcagtttcggcgctagaatgggctacgtcgcagcgcaaagggcgggtttatgtccactgcaccgctgggcttgggagagcacctgcggttgcaatcgcttacatgttttggtttgagaacatggatcttaacacggcttatcagaagctaacctccataaggccctgtggacccagcaagagagccatccgcgccgcaacctatgatctagctaagaacgatccatccaaagagccttttgagaaccttccggagcacgcttttgagggcgttgcagactgggagaggaagttgattcatgaccgggtgcgtgctcttcacgaagcatgagcagaagaaactttctccacgcgtcaagaaggggaactaagcttcctaatgaggcaatggctgtgcttcggcaccagatcattagatgtcgaaacgataaagtttgttctcaataaagcgtatacgacgccatatttgttgctgggtagtttgtaatagtcactaataggaaggaaataaagagggccttgcatgagattccagctggtgtcttcacctttgtggtgactgcaaatgagatgcccatccattaatggcatggcgcattgtaggtatattgtgtaaataaacctgtggatcttcatttgaggaacatcacttctgtaaaagtttatttgaagatacggccagctttgcaaatcc

SEQ ID NO: 19428 - protein, 280 aa, Zea mays subsp. mays
  peptide (1)..(280): Ceres Seq. ID no. 12375833
  misc_feature (143)..(230): Pfam Name: Dual specificity phosphatase, catalytic domain Pfam Description: Dual specificity phosphatase, catalytic domain
  misc_feature (62)..(258): Homolog of NCBI NO: 6016710 NR Description: unknown protein [Arabidopsis thaliana]
  misc_feature (62)..(258): Homolog of NCBI NO: 21592520 NR Description: unknown [Arabidopsis thaliana]
  misc_feature (62)..(258): Homolog of NCBI NO: 18395843 NR Description: expressed protein
  misc_feature (54)..(262): Homolog of NCBI NO: 21536905 NR Description: unknown [Arabidopsis thaliana]
  misc_feature (54)..(262): Homolog of NCBI NO: 16612246 NR Description: AT3g52180/F4F15_290 [Arabidopsis thaliana]
  misc_feature (54)..(241): Homolog of NCBI NO: 11288831 NR Description: hypothetical protein F4F15.290 - Arabidopsis
  misc_feature (54)..(262): Homolog of NCBI NO: 18409505 NR Description: putative protein
  misc_feature (10)..(241): Homolog of NCBI NO: 14970762 NR Description: protein tyrosine phosphatase [Lycopersicon
  misc_feature (45)..(277): Homolog of NCBI NO: 21592631 NR Description: unknown [Arabidopsis thaliana]
  misc_feature (45)..(277): Homolog of NCBI NO: 18399058 NR Description: expressed protein
MAAMANTSRLPTPCSLPTISIGAKSRRLAVAAVRCGPGGSRSHRRSLGVLLCRSSSTAGAQGSTRMEDYNTAMKRMMRNPYEYHHDLGMNYAVISESLIVGSQPQKPEDINHLKNEERVAYILCLQQDKDIEYWGIDFQSIVNRCKELGIQHIRRPAVDFDPDSLRSQLPKAVSALEWATSQRKGRVYVHCTAGLGRAPAVAIAYMFWFENMDLNTAYQKLTSIRPCGPSKRAIRAATYDLAKNDPSKEPFENLPEHAFEGVADWERKLIHDRVRALHEA

SEQ ID NO: 19429 - protein, 277 aa, Zea mays subsp. mays
  peptide (1)..(277): Ceres Seq. ID no. 12375834
  misc_feature (140)..(227): Pfam Name: Dual specificity phosphatase, catalytic domain Pfam Description: Dual specificity phosphatase, catalytic domain
  misc_feature (59)..(255): Homolog of NCBI NO: 6016710 NR Description: unknown protein [Arabidopsis thaliana]
  misc_feature (59)..(255): Homolog of NCBI NO: 21592520 NR Description: unknown [Arabidopsis thaliana]
  misc_feature (59)..(255): Homolog of NCBI NO: 18395843 NR Description: expressed protein
  misc_feature (51)..(259): Homolog of NCBI NO: 21536905 NR Description: unknown [Arabidopsis thaliana]
  misc_feature (51)..(259): Homolog of NCBI NO: 16612246 NR Description: AT3g52180/F4F15_290 [Arabidopsis thaliana]
  misc_feature (51)..(238): Homolog of NCBI NO: 11288831 NR Description: hypothetical protein F4F15.290 - Arabidopsis
  misc_feature (51)..(259): Homolog of NCBI NO: 18409505 NR Description: putative protein
  misc_feature (7)..(238): Homolog of NCBI NO: 14970762 NR Description: protein tyrosine phosphatase [Lycopersicon
  misc_feature (42)..(274): Homolog of NCBI NO: 21592631 NR Description: unknown [Arabidopsis thaliana]
  misc_feature (42)..(274): Homolog of NCBI NO: 18399058 NR Description: expressed protein
MANTSRLPTPCSLPTISIGAKSRRLAVAAVRCGPGGSRSHRRSLGVLLCRSSSTAGAQGSTRMEDYNTAMKRMMRNPYEYHHDLGMNYAVISESLIVGSQPQKPEDINHLKNEERVAYILCLQQDKDIEYWGIDFQSIVNRCKELGIQHIRRPAVDFDPDSLRSQLPKAVSALEWATSQRKGRVYVHCTAGLGRAPAVAIAYMFWFENMDLNTAYQKLTSIRPCGPSKRAIRAATYDLAKNDPSKEPFENLPEHAFEGVADWERKLIHDRVRALHEA

SEQ ID NO: 19430 - protein, 215 aa, Zea mays subsp. mays
  peptide (1)..(215): Ceres Seq. ID no. 12375835
  misc_feature (78)..(165): Pfam Name: Dual specificity phosphatase, catalytic domain Pfam Description: Dual specificity phosphatase, catalytic domain
  misc_feature (1)..(193): Homolog of NCBI NO: 6016710 NR Description: unknown protein [Arabidopsis thaliana]
  misc_feature (1)..(193): Homolog of NCBI NO: 21592520 NR Description: unknown [Arabidopsis thaliana]
  misc_feature (1)..(193): Homolog of NCBI NO: 18395843 NR Description: expressed protein
  misc_feature (1)..(197): Homolog of NCBI NO: 21536905 NR Description: unknown [Arabidopsis thaliana]
  misc_feature (1)..(197): Homolog of NCBI NO: 16612246 NR Description: AT3g52180/F4F15_290 [Arabidopsis thaliana]
  misc_feature (1)..(176): Homolog of NCBI NO: 11288831 NR Description: hypothetical protein F4F15.290 - Arabidopsis
  misc_feature (1)..(197): Homolog of NCBI NO: 18409505 NR Description: putative protein
  misc_feature (1)..(176): Homolog of NCBI NO: 14970762 NR Description: protein tyrosine phosphatase [Lycopersicon
  misc_feature (1)..(212): Homolog of NCBI NO: 21592631 NR Description: unknown [Arabidopsis thaliana]
  misc_feature (1)..(212): Homolog of NCBI NO: 18399058 NR Description: expressed protein
MEDYNTAMKRMMRNPYEYHHDLGMNYAVISESLIVGSQPQKPEDINHLKNEERVAYILCLQQDKDIEYWGIDFQSIVNRCKELGIQHIRRPAVDFDPDSLRSQLPKAVSALEWATSQRKGRVYVHCTAGLGRAPAVAIAYMFWFENMDLNTAYQKLTSIRPCGPSKRAIRAATYDLAKNDPSKEPFENLPEHAFEGVADWERKLIHDRVRALHEA

SEQ ID NO: 19431 - DNA, 732 bp, Zea mays subsp. mays
  misc_feature (1)..(732): Ceres Seq. ID no. 12355130
  misc_feature: MA Experiment ID: 20000534 Result: Down-regulated in Transcription
  misc_feature: MA Experiment 20000534 PARAMETER Experiment Name: Zm_Hybrid_Pollen_P Parameter: Age (day) Value: 8
  misc_feature: MA Experiment 20000534 PARAMETER Experiment Name: Zm_Hybrid_Pollen_P Parameter: Organism Value: Zea mays
  misc_feature: MA Experiment 20000534 PARAMETER Experiment Name: Zm_Hybrid_Pollen_P Parameter: Plant Line Value: 35A19
  misc_feature: MA Experiment 20000534 PARAMETER Experiment Name: Zm_Hybrid_Pollen_P Parameter: Tissue Value: Pollen vs. Aerial
gtctaatcaatcccgcattccccattgcacgccgtctccgctagggttttactccgcagccacaccgcgccgccggagcagcgcgagacccgcgaggcgagccacgcgagagagatgaggctcctgacgcacaacatgctggcgtcgaacgtccggggcgcaaccaccggctacccgctgacgctggaggcgaccaactggtgcaccaaggaggtggagctcaactccgacttcatccgcggtctcctccccaagatcgactggcgcgcgctcgtcgccgccacccgcgcgatcggcctccccgagctcctccccgaggagcagccccccgaggaggagatcttcgccgagggcgccgccgacgtcgagggaagcgccatccgccgcatccaccacgcgctcctcgaggttcatgtccaggagggctccctcgtctgccccgacaccagccgctgcttccccatcaacaagggcatccccaacatgatgctccacgaggacgaggtctgattttgccgtgtcagtttcgccctggcctcttttgctcgcgcacctgctctacatggtctgtcgcgaagggtatcaggccttgtggacttcgtactcagattgtacctgtgaagtatggattgcagtcttgcagattgtgcccttataatatgatagatagccgtgtaatactcggaattgccgtttcgtgttgttaatttggtgcatgtcatgctttgttcc

SEQ ID NO: 19432 - protein, 131 aa, Zea mays subsp. mays
  peptide (1)..(131): Ceres Seq. ID no. 12355131
  misc_feature (1)..(111): Homolog of NCBI NO: 39591375 NR Description: Hypothetical protein CBG20872 [Caenorhabditis
  misc_feature (1)..(130): Homolog of NCBI NO: 12833869 NR Description: unnamed protein product [Mus musculus]
  misc_feature (1)..(129): Homolog of NCBI NO: 16740612 NR Description: RIKEN cDNA 0610038D11 gene [Mus musculus]
  misc_feature (1)..(130): Homolog of NCBI NO: 13385802 NR Description: RIKEN cDNA 0610038D11 [Mus musculus]
  misc_feature (1)..(130): Homolog of NCBI NO: 27661288 NR Description: similar to RIKEN cDNA 0610038D11
  misc_feature (8)..(131): Homolog of NCBI NO: 30725332 NR Description: At1g78190 [Arabidopsis thaliana]
  misc_feature (1)..(131): Homolog of NCBI NO: 15218237 NR Description: unknown protein; protein id: At1g78190.1
  misc_feature (1)..(131): Homolog of NCBI NO: 25518574 NR Description: hypothetical protein T16E15.11 - Arabidopsis
  misc_feature (1)..(131): Homolog of NCBI NO: 18395095 NR Description: Expressed protein
  misc_feature (1)..(131): Homolog of NCBI NO: 22535669 NR Description: contains ESTs
MRLLTHNMLASNVRGATTGYPLTLEATNWCTKEVELNSDFIRGLLPKIDWRALVAATRAIGLPELLPEEQPPEEEIFAEGAADVEGSAIRRIHHALLEVHVQEGSLVCPDTSRCFPINKGIPNMMLHEDEV

SEQ ID NO: 19433 - protein, 124 aa, Zea mays subsp. mays
  peptide (1)..(124): Ceres Seq. ID no. 12355132
  misc_feature (1)..(104): Homolog of NCBI NO: 39591375 NR Description: Hypothetical protein CBG20872 [Caenorhabditis
  misc_feature (1)..(123): Homolog of NCBI NO: 12833869 NR Description: unnamed protein product [Mus musculus]
  misc_feature (1)..(122): Homolog of NCBI NO: 16740612 NR Description: RIKEN cDNA 0610038D11 gene [Mus musculus]
  misc_feature (1)..(123): Homolog of NCBI NO: 13385802 NR Description: RIKEN cDNA 0610038D11 [Mus musculus]
  misc_feature (1)..(123): Homolog of NCBI NO: 27661288 NR Description: similar to RIKEN cDNA 0610038D11
  misc_feature (1)..(124): Homolog of NCBI NO: 30725332 NR Description: At1g78190 [Arabidopsis thaliana]
  misc_feature (1)..(124): Homolog of NCBI NO: 15218237 NR Description: unknown protein; protein id: At1g78190.1
  misc_feature (1)..(124): Homolog of NCBI NO: 25518574 NR Description: hypothetical protein T16E15.11 - Arabidopsis
  misc_feature (1)..(124): Homolog of NCBI NO: 18395095 NR Description: Expressed protein
  misc_feature (1)..(124): Homolog of NCBI NO: 22535669 NR Description: contains ESTs
MLASNVRGATTGYPLTLEATNWCTKEVELNSDFIRGLLPKIDWRALVAATRAIGLPELLPEEQPPEEEIFAEGAADVEGSAIRRIHHALLEVHVQEGSLVCPDTSRCFPINKGIPNMMLHEDEV

SEQ ID NO: 19434 - DNA, 472 bp, Zea mays subsp. mays
  misc_feature (1)..(472): Ceres Seq. ID no. 2076396
  misc_feature: MA Experiment ID: 108547 Result: Up-regulated in Transcription
  misc_feature: MA Experiment 108547 PARAMETER Experiment Name: Zm_Imbibed_Seeds_P Parameter: Age (day) Value: 4 vs. 2
  misc_feature: MA Experiment 108547 PARAMETER Experiment Name: Zm_Imbibed_Seeds_P Parameter: Organism Value: Zea mays
  misc_feature: MA Experiment 108547 PARAMETER Experiment Name: Zm_Imbibed_Seeds_P Parameter: Plant Line Value: 35A19
  misc_feature: MA Experiment 108547 PARAMETER Experiment Name: Zm_Imbibed_Seeds_P Parameter: Tissue Value: Aerial vs. Embryo
gtcccaggagcgtggcctcactctcctcgtcgcatcccctctcctcatcttcaaagcgcgggcggcggcaatggcgatggcctccacctacgcgccgggcggaggcgcgggggcgctcgcgcagggaagatgcaggtccgcggtcccgcggggctgggcttcctcggcccctccaaggccgccggcctcccccgccccctcgccctcgccaggcggacgagcagccccgtcgcggtgggcgccaggccgcgcttcatccagcacaagaaggaggccttctggttctaccgcttcctctccatcgtgtacgaccacgtcatcaacccgggccactggaccgaggacatgcgcgacgacgcgctggaacccgccgacctcttcagccgccacctcacggtcgtcgacgtcggcggcggcacggggttcaccacgctcggcatcgtcaagcacgtcaacccggagaacgtcacgc

SEQ ID NO: 19435 - protein, 157 aa, Zea mays subsp. mays
  peptide (1)..(157): Ceres Seq. ID no. 2076397
  misc_feature (86)..(156): Pfam Name: ubiE/COQ5 methyltransferase family Pfam Description: ubiE/COQ5 methyltransferase family
  misc_feature (74)..(156): Homolog of NCBI NO: 37265798 NR Description: MPBQ/MSBQ methyltransferase [Chlamydomonas
  misc_feature (24)..(156): Homolog of NCBI NO: 124429 NR Description: 37 KD INNER ENVELOPE MEMBRANE PROTEIN,
  misc_feature (64)..(156): Homolog of NCBI NO: 15005009 NR Description: APG1 [Arabidopsis thaliana]
  misc_feature (64)..(156): Homolog of NCBI NO: 21553996 NR Description: putative chloroplast inner envelope protein
  misc_feature (64)..(156): Homolog of NCBI NO: 15229430 NR Description: putative chloroplast inner envelope protein
  misc_feature (63)..(156): Homolog of NCBI NO: 7489166 NR Description: membrane protein, 37K, precursor, chloroplast
  misc_feature (56)..(156): Homolog of NCBI NO: 25458195 NR Description: membrane protein, 37K, chloroplast inner envelope
  misc_feature (47)..(156): Homolog of NCBI NO: 34393472 NR Description: putative 37kDa chloroplast inner envelope
VPGAWPHSPRRIPSPHLQSAGGGNGDGLHLRAGRRRGGARAGKMQVRGPAGLGFLGPSKAAGLPRPLALARRTSSPVAVGARPRFIQHKKEAFWFYRFLSIVYDHVINPGHWTEDMRDDALEPADLFSRHLTVVDVGGGTGFTTLGIVKHVNPENVT

SEQ ID NO: 19436 - protein, 157 aa, Zea mays subsp. mays
  peptide (1)..(157): Ceres Seq. ID no. 2076398
  misc_feature (84)..(156): Pfam Name: Mucin-like glycoprotein Pfam Description: Mucin-like glycoprotein
  misc_feature (7)..(154): Homolog of NCBI NO: 23510008 NR Description: hypothetical protein [Plasmodium falciparum 3D7]
  misc_feature (19)..(152): Homolog of NCBI NO: 13592175 NR Description: ppg3 [Leishmania major]
  misc_feature (19)..(155): Homolog of NCBI NO: 11359723 NR Description: proteophosphoglycan, membrane-associated
  misc_feature (21)..(156): Homolog of NCBI NO: 11359723 NR Description: proteophosphoglycan, membrane-associated
  misc_feature (21)..(156): Homolog of NCBI NO: 13592175 NR Description: ppg3 [Leishmania major]
  misc_feature (21)..(156): Homolog of NCBI NO: 5420387 NR Description: proteophosphoglycan [Leishmania major]
  misc_feature (19)..(156): Homolog of NCBI NO: 13592175 NR Description: ppg3 [Leishmania major]
  misc_feature (21)..(152): Homolog of NCBI NO: 5420387 NR Description: proteophosphoglycan [Leishmania major]
  misc_feature (19)..(156): Homolog of NCBI NO: 11359723 NR Description: proteophosphoglycan, membrane-associated
  misc_feature (3)..(156): Homolog of NCBI NO: 39583515 NR Description: Hypothetical protein CBG21601 [Caenorhabditis
SQERGLTLLVASPLLIFKARAAAMAMASTYAPGGGAGALAQGRCRSAVPRGWASSAPPRPPASPAPSPSPGGRAAPSRWAPGRASSSTRRRPSGSTASSPSCTTTSSTRATGPRTCATTRWNPPTSSAATSRSSTSAAARGSPRSASSSTSTRRTSR

SEQ ID NO: 19437 - protein, 156 aa, Zea mays subsp. mays
  peptide (1)..(156): Ceres Seq. ID no. 2076399
  misc_feature (29)..(155): Homolog of NCBI NO: 23105183 NR Description: hypothetical protein [Azotobacter vinelandii]
PRSVASLSSSHPLSSSSKRGRRQWRWPPPTRRAEARGRSRREDAGPRSRGAGLPRPLQGRRPPPPPRPRQADEQPRRGGRQAALHPAQEGGLLVLPLPLHRVRPRHQPGPLDRGHARRRAGTRRPLQPPPHGRRRRRRHGVHHARHRQARQPGERH

SEQ ID NO: 19438 - protein, 114 aa, Zea mays subsp. mays
  peptide (1)..(114): Ceres Seq. ID no. 2076400
  misc_feature (43)..(113): Pfam Name: ubiE/COQ5 methyltransferase family Pfam Description: ubiE/COQ5 methyltransferase family
  misc_feature (31)..(113): Homolog of NCBI NO: 37265798 NR Description: MPBQ/MSBQ methyltransferase [Chlamydomonas
  misc_feature (1)..(113): Homolog of NCBI NO: 124429 NR Description: 37 KD INNER ENVELOPE MEMBRANE PROTEIN,
  misc_feature (21)..(113): Homolog of NCBI NO: 15005009 NR Description: APG1 [Arabidopsis thaliana]
  misc_feature (21)..(113): Homolog of NCBI NO: 21553996 NR Description: putative chloroplast inner envelope protein
  misc_feature (21)..(113): Homolog of NCBI NO: 15229430 NR Description: putative chloroplast inner envelope protein
  misc_feature (20)..(113): Homolog of NCBI NO: 7489166 NR Description: membrane protein, 37K, precursor, chloroplast
  misc_feature (13)..(113): Homolog of NCBI NO: 25458195 NR Description: membrane protein, 37K, chloroplast inner envelope
  misc_feature (4)..(113): Homolog of NCBI NO: 34393472 NR Description: putative 37kDa chloroplast inner envelope
MQVRGPAGLGFLGPSKAAGLPRPLALARRTSSPVAVGARPRFIQHKKEAFWFYRFLSIVYDHVINPGHWTEDMRDDALEPADLFSRHLTVVDVGGGTGFTTLGIVKHVNPENVT

SEQ ID NO: 19439 - DNA, 893 bp, Zea mays subsp. mays
  misc_feature (1)..(893): Ceres Seq. ID no. 12340397
  misc_feature: MA Experiment ID: 108543 Result: Up-regulated in Transcription
caggctccattacccagattcctattctaacaatgcctaacgatgatatcacacacccaactcctgaccttactggatacattactgagggacagatatacattgataggcagctccataacagacagatttatccacctattaatgtcctgccatctctttcacgattgatgaagagtgctattggtgagggcatgacacgtcgagaccattcggatgtatctaatcagctttatgccaactatgctattggaaaggatgttcaggccatgaaggctgtcgttggagaggaggcactctcgtctgaggatctgctttacttagagttccttgacaagtttgagaggaagtttgtgacacaaggagcatatgacacacggaacatcttccagtcactcgatcttgcatggacattgcttcggatcttccctcgcgaacttctccaccgtattccagcaaagaccttggaccagtactatagcagagatgcttcccactgaatcactgatcgttgatcagtgttccaatattttggcaagtgcagctttgaataaattgaacagattggcctcgtggccattttcccgtatttatcngtagtcaggtccaattcttttctgttggtgagcgcaagttattcatagatgactcggtcatgggaatatttgtaatattatgtcatgtatcgttaaatttcagttgttttgtttcagctgccagaactgttagcaagagtattctggagctggaagctcgaacgcaactggttgtatctatatccgtgaatgccgaataaaggaggggcaataaactgcagcgaaatatgtgctgtcagacattgttgaacattttctcgattttgctgttttgagatgtgagaaatcttttcactg

SEQ ID NO: 19440 - protein, 165 aa, Zea mays subsp. mays
  peptide (1)..(165): Ceres Seq. ID no. 12340398
  misc_feature (1)..(60): Pfam Name: ATP synthase alpha/beta family, Pfam Description: ATP synthase alpha/beta family,
  misc_feature (1)..(164): Homolog of NCBI NO: 81637 NR Description: H+-exporting ATPase (EC 3.6.3.6) 57K chain -
  misc_feature (1)..(165): Homolog of NCBI NO: 15233891 NR Description: probable H+-transporting ATPase
  misc_feature (1)..(165): Homolog of NCBI NO: 26986106 NR Description: vacuolar ATPase subunit B [Mesembryanthemum
  misc_feature (1)..(165): Homolog of NCBI NO: 15010616 NR Description: AT4g38510/F20M13_70 [Arabidopsis thaliana]
  misc_feature (1)..(165): Homolog of NCBI NO: 29424043 NR Description: vacuolar H(+)-ATPase subunit B [Suaeda maritima
  misc_feature (1)..(165): Homolog of NCBI NO: 2493131 NR Description: Vacuolar ATP synthase subunit B isoform 1
  misc_feature (1)..(165): Homolog of NCBI NO: 2493130 NR Description: Vacuolar ATP synthase subunit B isoform 2
  misc_feature (1)..(165): Homolog of NCBI NO: 2493132 NR Description: Vacuolar ATP synthase subunit B isoform 2
  misc_feature (1)..(165): Homolog of NCBI NO: 34910488 NR Description: putative H+-transporting ATP synthase
  misc_feature (1)..(165): Homolog of NCBI NO: 14150751 NR Description: vacuolar ATPase B subunit [Oryza sativa]
GSITQIPILTMPNDDITHPTPDLTGYITEGQIYIDRQLHNRQIYPPINVLPSLSRLMKSAIGEGMTRRDHSDVSNQLYANYAIGKDVQAMKAVVGEEALSSEDLLYLEFLDKFERKFVTQGAYDTRNIFQSLDLAWTLLRIFPRELLHRIPAKTLDQYYSRDASH

SEQ ID NO: 19441 - protein, 155 aa, Zea mays subsp. mays
  peptide (1)..(155): Ceres Seq. ID no. 12340399
  misc_feature (1)..(154): Homolog of NCBI NO: 81637 NR Description: H+-exporting ATPase (EC 3.6.3.6) 57K chain -
  misc_feature (1)..(155): Homolog of NCBI NO: 26986106 NR Description: vacuolar ATPase subunit B [Mesembryanthemum
  misc_feature (1)..(155): Homolog of NCBI NO: 15233891 NR Description: probable H+-transporting ATPase
  misc_feature (1)..(155): Homolog of NCBI NO: 15010616 NR Description: AT4g38510/F20M13_70 [Arabidopsis thaliana]
  misc_feature (1)..(155): Homolog of NCBI NO: 29424043 NR Description: vacuolar H(+)-ATPase subunit B [Suaeda maritima
  misc_feature (1)..(155): Homolog of NCBI NO: 2493131 NR Description: Vacuolar ATP synthase subunit B isoform 1
  misc_feature (1)..(155): Homolog of NCBI NO: 2493130 NR Description: Vacuolar ATP synthase subunit B isoform 2
  misc_feature (1)..(155): Homolog of NCBI NO: 2493132 NR Description: Vacuolar ATP synthase subunit B isoform 2
  misc_feature (1)..(155): Homolog of NCBI NO: 34910488 NR Description: putative H+-transporting ATP synthase
  misc_feature (1)..(155): Homolog of NCBI NO: 14150751 NR Description: vacuolar ATPase B subunit [Oryza sativa]
MPNDDITHPTPDLTGYITEGQIYIDRQLHNRQIYPPINVLPSLSRLMKSAIGEGMTRRDHSDVSNQLYANYAIGKDVQAMKAVVGEEALSSEDLLYLEFLDKFERKFVTQGAYDTRNIFQSLDLAWTLLRIFPRELLHRIPAKTLDQYYSRDASH

SEQ ID NO: 19442 - protein, 109 aa, Zea mays subsp. mays
  peptide (1)..(109): Ceres Seq. ID no. 12340400
  misc_feature (1)..(108): Homolog of NCBI NO: 81637 NR Description: H+-exporting ATPase (EC 3.6.3.6) 57K chain -
  misc_feature (1)..(109): Homolog of NCBI NO: 26986106 NR Description: vacuolar ATPase subunit B [Mesembryanthemum
  misc_feature (1)..(109): Homolog of NCBI NO: 15233891 NR Description: probable H+-transporting ATPase
  misc_feature (1)..(109): Homolog of NCBI NO: 15010616 NR Description: AT4g38510/F20M13_70 [Arabidopsis thaliana]
  misc_feature (1)..(109): Homolog of NCBI NO: 29424043 NR Description: vacuolar H(+)-ATPase subunit B [Suaeda maritima
  misc_feature (1)..(109): Homolog of NCBI NO: 2493131 NR Description: Vacuolar ATP synthase subunit B isoform 1
  misc_feature (1)..(109): Homolog of NCBI NO: 2493130 NR Description: Vacuolar ATP synthase subunit B isoform 2
  misc_feature (1)..(109): Homolog of NCBI NO: 2493132 NR Description: Vacuolar ATP synthase subunit B isoform 2
  misc_feature (1)..(109): Homolog of NCBI NO: 34910488 NR Description: putative H+-transporting ATP synthase
  misc_feature (1)..(109): Homolog of NCBI NO: 14150751 NR Description: vacuolar ATPase B subunit [Oryza sativa]
MKSAIGEGMTRRDHSDVSNQLYANYAIGKDVQAMKAVVGEEALSSEDLLYLEFLDKFERKFVTQGAYDTRNIFQSLDLAWTLLRIFPRELLHRIPAKTLDQYYSRDASH

SEQ ID NO: 19443 - DNA, 478 bp, Zea mays subsp. mays
  misc_feature (1)..(478): Ceres Seq. ID no. 5761763
  misc_feature: MA Experiment ID: 108529 Result: Up-regulated in Transcription
  misc_feature: MA Experiment 108529 PARAMETER Experiment Name: Zm_Imbibed_Seeds_P Parameter: Age (day) Value: 5 vs. 2
  misc_feature: MA Experiment 108529 PARAMETER Experiment Name: Zm_Imbibed_Seeds_P Parameter: Organism Value: Zea mays
  misc_feature: MA Experiment 108529 PARAMETER Experiment Name: Zm_Imbibed_Seeds_P Parameter: Plant Line Value: 35A19
  misc_feature: MA Experiment 108529 PARAMETER Experiment Name: Zm_Imbibed_Seeds_P Parameter: Tissue Value: Roots vs. Embryo
  misc_feature: MA Experiment ID: 108535 Result: Down-regulated in Transcription
  misc_feature: MA Experiment 108535 PARAMETER Experiment Name: Zm_Meristem_P Parameter: Age (day) Value: 8
  misc_feature: MA Experiment 108535 PARAMETER Experiment Name: Zm_Meristem_P Parameter: Organism Value: Zea mays
  misc_feature: MA Experiment 108535 PARAMETER Experiment Name: Zm_Meristem_P Parameter: Plant Line Value: 35A19
  misc_feature: MA Experiment 108535 PARAMETER Experiment Name: Zm_Meristem_P Parameter: Tissue Value: Root Meristem vs. Above Root Meristem
  misc_feature: MA Experiment ID: 20000492 Result: Down-regulated in Transcription
  misc_feature: MA Experiment 20000492 PARAMETER Experiment Name: Zm_Hybrid_Seed_Dev_P Parameter: DAP Value: 12
  misc_feature: MA Experiment 20000492 PARAMETER Experiment Name: Zm_Hybrid_Seed_Dev_P Parameter: Organism Value: Zea mays
  misc_feature: MA Experiment 20000492 PARAMETER Experiment Name: Zm_Hybrid_Seed_Dev_P Parameter: Plant Line Value: 35A19
  misc_feature: MA Experiment 20000492 PARAMETER Experiment Name: Zm_Hybrid_Seed_Dev_P Parameter: Tissue Value: Fert Kernel vs. Unfert Floret
  misc_feature: MA Experiment ID: 20000535 Result: Down-regulated in Transcription
  misc_feature: MA Experiment 20000535 PARAMETER Experiment Name: Zm_Hybrid_Seed_Dev_P Parameter: DAP Value: 30 vs. 12
  misc_feature: MA Experiment 20000535 PARAMETER Experiment Name: Zm_Hybrid_Seed_Dev_P Parameter: Organism Value: Zea mays
  misc_feature: MA Experiment 20000535 PARAMETER Experiment Name: Zm_Hybrid_Seed_Dev_P Parameter: Plant Line Value: 35A19
  misc_feature: MA Experiment 20000535 PARAMETER Experiment Name: Zm_Hybrid_Seed_Dev_P Parameter: Tissue Value: Embryo vs. Unfert Floret
  misc_feature: MA Experiment ID: 20000626 Result: Up-regulated in Transcription
  misc_feature: MA Experiment 20000626 PARAMETER Experiment Name: Zm_Herbicide-Treatments_P Parameter: Timepoint (hr) Value: 12
  misc_feature: MA Experiment 20000626 PARAMETER Experiment Name: Zm_Herbicide-Treatments_P Parameter: Tissue Value: Aerial
  misc_feature: MA Experiment 20000626 PARAMETER Experiment Name: Zm_Herbicide-Treatments_P Parameter: Treatment Value: Roundup vs. No Treatment
gccgattagcaccagtctgatgataaacctgcttcgcgcttctgtatgtcatgtgcagggggtactaccgctgcagcagctccaaggggtgcccagcgaggaagcaggtggagcgcagccacgcggaccccaccgcgctgctcgtcacctacaccttcgagcacaatcacgaggcgccgcagcccaagagcagcggcggcagctgctgccaccagcaaggcaagccgtccgcgcggccgccggaggagtgggagcgggagctgcagggggaggacgccctgttcgcggggctcggcgagctgcccgagtgcgccgtcgtcttcggccgccgccgcgagctcagcctggccgccaccgcgccgtgctcctgatggtccttcgactctttttacgtntgtnttyatntttttttcttttccttttgggccctctttaagttttacacggaacgatttggaggcactggtacatagctctg

SEQ ID NO: 19444 - protein, 144 aa, Zea mays subsp. mays
  peptide (1)..(144): Ceres Seq. ID no. 5761764
  misc_feature (132)..(132): Xaa is any aa, unknown or other
  misc_feature (133)..(133): Xaa is any aa, unknown or other
  misc_feature (134)..(134): Xaa is any aa, unknown or other
  misc_feature (135)..(135): Xaa is any aa, unknown or other
PISTSLMINLLRASVCHVQGVLPLQQLQGVPSEEAGGAQPRGPHRAARHLHLRAQSRGAAAQEQRRQLLPPARQAVRAAAGGVGAGAAGGGRPVRGARRAARVRRRLRPPPRAQPGRHRAVLLMVLRLFLRXXXXFFLFLLGPL

SEQ ID NO: 19445 - protein, 144 aa, Zea mays subsp. mays
  peptide (1)..(144): Ceres Seq. ID no. 5761765
  misc_feature (117)..(117): Xaa is any aa, unknown or other
  misc_feature (118)..(118): Xaa is any aa, unknown or other
  misc_feature (119)..(119): Xaa is any aa, unknown or other
  misc_feature (120)..(120): Xaa is any aa, unknown or other
MSCAGGTTAAAAPRGAQRGSRWSAATRTPPRCSSPTPSSTITRRRSPRAAAAAAATSKASRPRGRRRSGSGSCRGRTPCSRGSASCPSAPSSSAAAASSAWPPPRRAPDGPSTLFTXXXXFFSFPFGPSLSFTRNDLEALVHSS

SEQ ID NO: 19446 - protein, 138 aa, Zea mays subsp. mays
  peptide (1)..(138): Ceres Seq. ID no. 5761766
  misc_feature (126)..(126): Xaa is any aa, unknown or other
  misc_feature (127)..(127): Xaa is any aa, unknown or other
  misc_feature (128)..(128): Xaa is any aa, unknown or other
  misc_feature (129)..(129): Xaa is any aa, unknown or other
MINLLRASVCHVQGVLPLQQLQGVPSEEAGGAQPRGPHRAARHLHLRAQSRGAAAQEQRRQLLPPARQAVRAAAGGVGAGAAGGGRPVRGARRAARVRRRLRPPPRAQPGRHRAVLLMVLRLFLRXXXXFFLFLLGPL

SEQ ID NO: 19447 - protein, 106 aa, Zea mays subsp. mays
  peptide (1)..(106): Ceres Seq. ID no. 5761767
  misc_feature (3)..(51): Homolog of NCBI NO: 37537178 NR Description: putative DNA-binding protein
  misc_feature (3)..(63): Homolog of NCBI NO: 27817201 NR Description: WRKY transcription factor 22 [Capsella rubella]
  misc_feature (3)..(85): Homolog of NCBI NO: 30694863 NR Description: WRKY family transcription factor [Arabidopsis
  misc_feature (3)..(85): Homolog of NCBI NO: 22331854 NR Description: WRKY family transcription factor
  misc_feature (1)..(85): Homolog of NCBI NO: 11357269 NR Description: DNA-binding WRKY-like protein - Arabidopsis
  misc_feature (3)..(102): Homolog of NCBI NO: 22329838 NR Description: WRKY family transcription factor
  misc_feature (74)..(94): Homolog of NCBI NO: 34910854 NR Description: P0435H01.23 [Oryza sativa (japonica
  misc_feature (3)..(75): Homolog of NCBI NO: 34910854 NR Description: P0435H01.23 [Oryza sativa (japonica
  misc_feature (63)..(106): Homolog of NCBI NO: 34909540 NR Description: P0481E12.40 [Oryza sativa (japonica
  misc_feature (3)..(65): Homolog of NCBI NO: 34909540 NR Description: P0481E12.40 [Oryza sativa (japonica
MCRGYYRCSSSKGCPARKQVERSHADPTALLVTYTFEHNHEAPQPKSSGGSCCHQQGKPSARPPEEWERELQGEDALFAGLGELPECAVVFGRRRELSLAATAPCS

SEQ ID NO: 19448 - DNA, 708 bp, Zea mays subsp. mays
  misc_feature (1)..(708): Ceres Seq. ID no. 12462432
  misc_feature: MA Experiment ID: 108530 Result: Down-regulated in Transcription
  misc_feature: MA Experiment 108530 PARAMETER Experiment Name: Zm_Imbibed_Seeds_P Parameter: Age (day) Value: 6 vs. 2
  misc_feature: MA Experiment 108530 PARAMETER Experiment Name: Zm_Imbibed_Seeds_P Parameter: Organism Value: Zea mays
  misc_feature: MA Experiment 108530 PARAMETER Experiment Name: Zm_Imbibed_Seeds_P Parameter: Plant Line Value: 35A19
  misc_feature: MA Experiment 108530 PARAMETER Experiment Name: Zm_Imbibed_Seeds_P Parameter: Tissue Value: Aerial vs. Embryo
  misc_feature: MA Experiment ID: 108535 Result: Up-regulated in Transcription
  misc_feature: MA Experiment 108535 PARAMETER Experiment Name: Zm_Meristem_P Parameter: Age (day) Value: 8
  misc_feature: MA Experiment 108535 PARAMETER Experiment Name: Zm_Meristem_P Parameter: Organism Value: Zea mays
  misc_feature: MA Experiment 108535 PARAMETER Experiment Name: Zm_Meristem_P Parameter: Plant Line Value: 35A19
  misc_feature: MA Experiment 108535 PARAMETER Experiment Name: Zm_Meristem_P Parameter: Tissue Value: Root Meristem vs. Above Root Meristem
  misc_feature: MA Experiment ID: 20000108 Result: Up-regulated in Transcription
  misc_feature: MA Experiment 20000108 PARAMETER Experiment Name: Zm_Root-Tips_P Parameter: Age (day) Value: 12
  misc_feature: MA Experiment 20000108 PARAMETER Experiment Name: Zm_Root-Tips_P Parameter: Organism Value: Zea mays
  misc_feature: MA Experiment 20000108 PARAMETER Experiment Name: Zm_Root-Tips_P Parameter: Tissue Value: Root tips vs. Root mid region    35
  misc_feature: MA Experiment 20000108 PARAMETER Experiment Name: Zm_Root-Tips_P Parameter: Tissue Value: Root tips vs. Root mid region   Sequence Listing-Misc Features (4)
  misc_feature: MA Experiment ID: 20000488 Result: Up-regulated in Transcription
  misc_feature: MA Experiment 20000488 PARAMETER Experiment Name: Zm_50mM_NH4NO3_L_to_H_P Parameter: Organism Value: Zea mays
  misc_feature: MA Experiment 20000488 PARAMETER Experiment Name: Zm_50mM_NH4NO3_L_to_H_P Parameter: Timepoint (hr) Value: 8
  misc_feature: MA Experiment 20000488 PARAMETER Experiment Name: Zm_50mM_NH4NO3_L_to_H_P Parameter: Tissue Value: Leaves
  misc_feature: MA Experiment 20000488 PARAMETER Experiment Name: Zm_50mM_NH4NO3_L_to_H_P Parameter: Treatment Value: 50mM NH4NO3 vs. 100mM Mannitol
  misc_feature: MA Experiment ID: 20000534 Result: Down-regulated in Transcription
  misc_feature: MA Experiment 20000534 PARAMETER Experiment Name: Zm_Hybrid_Pollen_P Parameter: Age (day) Value: 8
  misc_feature: MA Experiment 20000534 PARAMETER Experiment Name: Zm_Hybrid_Pollen_P Parameter: Organism Value: Zea mays
  misc_feature: MA Experiment 20000534 PARAMETER Experiment Name: Zm_Hybrid_Pollen_P Parameter: Plant Line Value: 35A19
  misc_feature: MA Experiment 20000534 PARAMETER Experiment Name: Zm_Hybrid_Pollen_P Parameter: Tissue Value: Pollen vs. Aerial
  misc_feature: MA Experiment ID: 20000535 Result: Up-regulated in Transcription
  misc_feature: MA Experiment 20000535 PARAMETER Experiment Name: Zm_Hybrid_Seed_Dev_P Parameter: DAP Value: 30 vs. 12
  misc_feature: MA Experiment 20000535 PARAMETER Experiment Name: Zm_Hybrid_Seed_Dev_P Parameter: Organism Value: Zea mays
  misc_feature: MA Experiment 20000535 PARAMETER Experiment Name: Zm_Hybrid_Seed_Dev_P Parameter: Plant Line Value: 35A19
  misc_feature: MA Experiment 20000535 PARAMETER Experiment Name: Zm_Hybrid_Seed_Dev_P Parameter: Tissue Value: Embryo vs. Unfert Floret
agcccagtactccttgctccacgccgccgctcaaaaccggcagaagtaagaacggggagggaagcacgccccaaacgttccgaggtttcgcctctcggagcgcaccaacgccacccggagcgactcgccaccggcgcggagaaggagggcggaggctaggcgatggcggacgagaattaggctgggaagaaagaggaagaggaatttagcacaggccctctgtcagtactaatgatgagtgttaagaacaacacccaggttctcatcaattgccgcaacaacaagaagctgcttggccgggttcgtgcttttgatcgccactgtaacatggtgctcgagaacgtgcgggagatgtggacagaggtccccaagactggcaagggcaaaaagaaggctctgcctgtgaacaaggatagattcatcagcaagatgttcctcaggggcgactcggtcatcatcgtgctgaggaaccccaagtgatcgcccaaccggaagccaggtctctgttgaaaactgtagcttatgatgtatgttggggatgattaactggttatcttgaactgacgttcatgtggcatcgcaatggcacatgaacatacggcgttccatgagtttgttaaccggagtatgaacctaccacctgcggtatttgatccctgaatgttgagtttgcacttctgcttattattgccttgccccaccgtgttc

SEQ ID NO: 19449 - protein, 82 aa, Zea mays subsp. mays; identical to SEQ ID NO: 12477
  peptide (1)..(82): Ceres Seq. ID no. 12462433
  misc_feature (1)..(79): Pfam Name: LSM domain Pfam Description: LSM domain
  misc_feature (1)..(81): Homolog of NCBI NO: 34881247 NR Description: similar to SNF2/RAD54 family protein [Rattus
  misc_feature (1)..(81): Homolog of NCBI NO: 39592141 NR Description: Hypothetical protein CBG23345 [Caenorhabditis
  misc_feature (1)..(81): Homolog of NCBI NO: 27677236 NR Description: similar to Small nuclear ribonucleoprotein Sm D2
  misc_feature (1)..(81): Homolog of NCBI NO: 22203734 NR Description: small nuclear ribonucleoprotein D2-like protein
  misc_feature (1)..(81): Homolog of NCBI NO: 21357623 NR Description: CG1249-PA [Drosophila melanogaster]
  misc_feature (1)..(81): Homolog of NCBI NO: 26337731 NR Description: unnamed protein product [Mus musculus]
  misc_feature (1)..(81): Homolog of NCBI NO: 4759158 NR Description: small nuclear ribonucleoprotein polypeptide D2
  misc_feature (1)..(82): Homolog of NCBI NO: 30690747 NR Description: small nuclear ribonucleo protein D2 -related
  misc_feature (1)..(82): Homolog of NCBI NO: 21554692 NR Description: small nuclear ribonucleoprotein-like protein
  misc_feature (1)..(82): Homolog of NCBI NO: 18407411 NR Description: putative small nuclear ribonucleoprotein D2

SEQ ID NO: 19450 - protein, 81 aa, Zea mays subsp. mays; identical to SEQ ID NO: 12478
  peptide (1)..(81): Ceres Seq. ID no. 12462434
  misc_feature (1)..(78): Pfam Name: LSM domain Pfam Description: LSM domain
  misc_feature (1)..(80): Homolog of NCBI NO: 34881247 NR Description: similar to SNF2/RAD54 family protein [Rattus
  misc_feature (1)..(80): Homolog of NCBI NO: 39592141 NR Description: Hypothetical protein CBG23345 [Caenorhabditis
  misc_feature (1)..(80): Homolog of NCBI NO: 27677236 NR Description: similar to Small nuclear ribonucleoprotein Sm D2
  misc_feature (1)..(80): Homolog of NCBI NO: 22203734 NR Description: small nuclear ribonucleoprotein D2-like protein
  misc_feature (1)..(80): Homolog of NCBI NO: 21357623 NR Description: CG1249-PA [Drosophila melanogaster]
  misc_feature (1)..(80): Homolog of NCBI NO: 26337731 NR Description: unnamed protein product [Mus musculus]
  misc_feature (1)..(80): Homolog of NCBI NO: 4759158 NR Description: small nuclear ribonucleoprotein polypeptide D2
  misc_feature (1)..(81): Homolog of NCBI NO: 30690747 NR Description: small nuclear ribonucleo protein D2 -related
  misc_feature (1)..(81): Homolog of NCBI NO: 21554692 NR Description: small nuclear ribonucleoprotein-like protein
  misc_feature (1)..(81): Homolog of NCBI NO: 18407411 NR Description: putative small nuclear ribonucleoprotein D2

SEQ ID NO: 19451 - protein, 68 aa, Zea mays subsp. mays
  peptide (1)..(68): Ceres Seq. ID no. 12462435
PSTPCSTPPLKTGRSKNGEGSTPQTFRGFASRSAPTPPGATRHRRGEGGRRLGDGGRELGWEERGRGI

SEQ ID NO: 19452 - DNA, 947 bp, Zea mays subsp. mays
  misc_feature (1)..(947): Ceres Seq. ID no. 14305114
  misc_feature: MA Experiment ID: 108523 Result: Down-regulated in Transcription
  misc_feature: MA Experiment 108523 PARAMETER Experiment Name: Zm_42deg_Heat_P Parameter: Age (day) Value: 8
  misc_feature: MA Experiment 108523 PARAMETER Experiment Name: Zm_42deg_Heat_P Parameter: Organism Value: Zea mays
  misc_feature: MA Experiment 108523 PARAMETER Experiment Name: Zm_42deg_Heat_P Parameter: Plant Line Value: 35A19
  misc_feature: MA Experiment 108523 PARAMETER Experiment Name: Zm_42deg_Heat_P Parameter: Temperature (deg C) Value: 42 vs. 22
  misc_feature: MA Experiment 108523 PARAMETER Experiment Name: Zm_42deg_Heat_P Parameter: Timepoint (hr) Value: 6
  misc_feature: MA Experiment 108523 PARAMETER Experiment Name: Zm_42deg_Heat_P Parameter: Tissue Value: Aerial
  misc_feature: MA Experiment ID: 108535 Result: Down-regulated in Transcription
  misc_feature: MA Experiment 108535 PARAMETER Experiment Name: Zm_Meristem_P Parameter: Age (day) Value: 8
  misc_feature: MA Experiment 108535 PARAMETER Experiment Name: Zm_Meristem_P Parameter: Organism Value: Zea mays
  misc_feature: MA Experiment 108535 PARAMETER Experiment Name: Zm_Meristem_P Parameter: Plant Line Value: 35A19
  misc_feature: MA Experiment 108535 PARAMETER Experiment Name: Zm_Meristem_P Parameter: Tissue Value: Root Meristem vs. Above Root Meristem
  misc_feature: MA Experiment ID: 108543 Result: Up-regulated in Transcription
  misc_feature: MA Experiment ID: 108544 Result: Down-regulated in Transcription
  misc_feature: MA Experiment ID: 108556 Result: Down-regulated in Transcription
  misc_feature: MA Experiment 108556 PARAMETER Experiment Name: Zm_Drought_P Parameter: Age (day) Value: 9
  misc_feature: MA Experiment 108556 PARAMETER Experiment Name: Zm_Drought_P Parameter: Organism Value: Zea mays
  misc_feature: MA Experiment 108556 PARAMETER Experiment Name: Zm_Drought_P Parameter: Plant Line Value: 35A19
  misc_feature: MA Experiment 108556 PARAMETER Experiment Name: Zm_Drought_P Parameter: Timepoint (hr) Value: 24
  misc_feature: MA Experiment 108556 PARAMETER Experiment Name: Zm_Drought_P Parameter: Tissue Value: Aerial
  misc_feature: MA Experiment 108556 PARAMETER Experiment Name: Zm_Drought_P Parameter: Treatment Value: Drought vs. No Drought
  misc_feature: MA Experiment ID: 108597 Result: Down-regulated in Transcription
  misc_feature: MA Experiment 108597 PARAMETER Experiment Name: Zm_100uM_ABA_P Parameter: Age (day) Value: 9
  misc_feature: MA Experiment 108597 PARAMETER Experiment Name: Zm_100uM_ABA_P Parameter: Organism Value: Zea mays
  misc_feature: MA Experiment 108597 PARAMETER Experiment Name: Zm_100uM_ABA_P Parameter: Plant Line Value: 35A19
  misc_feature: MA Experiment 108597 PARAMETER Experiment Name: Zm_100uM_ABA_P Parameter: Timepoint (hr) Value: 24
  misc_feature: MA Experiment 108597 PARAMETER Experiment Name: Zm_100uM_ABA_P Parameter: Tissue Value: Aerial
  misc_feature: MA Experiment 108597 PARAMETER Experiment Name: Zm_100uM_ABA_P Parameter: Treatment Value: 100uM ABA vs. No Treatment
  misc_feature: MA Experiment ID: 108688 Result: Down-regulated in Transcription
  misc_feature: MA Experiment 108688 PARAMETER Experiment Name: Zm_Embryos-Flowers__P Parameter: Tissue Value: Immature Flowers vs. Aerial+
  misc_feature: MA Experiment ID: 20000477 Result: Down-regulated in Transcription
  misc_feature: MA Experiment 20000477 PARAMETER Experiment Name: Zm_5mM_SA_P Parameter: Age (day) Value: 10
  misc_feature: MA Experiment 20000477 PARAMETER Experiment Name: Zm_5mM_SA_P Parameter: Organism Value: Zea mays
  misc_feature: MA Experiment 20000477 PARAMETER Experiment Name: Zm_5mM_SA_P Parameter: Plant Line Value: 35A19
  misc_feature: MA Experiment 20000477 PARAMETER Experiment Name: Zm_5mM_SA_P Parameter: Timepoint (hr) Value: 48
  misc_feature: MA Experiment 20000477 PARAMETER Experiment Name: Zm_5mM_SA_P Parameter: Tissue Value: Aerial
  misc_feature: MA Experiment 20000477 PARAMETER Experiment Name: Zm_5mM_SA_P Parameter: Treatment Value: 5mM SA vs. No Treatment
  misc_feature: MA Experiment ID: 20000478 Result: Down-regulated in Transcription
  misc_feature: MA Experiment 20000478 PARAMETER Experiment Name: Zm_5mM_SA_P Parameter: Age (day) Value: 11
  misc_feature: MA Experiment 20000478 PARAMETER Experiment Name: Zm_5mM_SA_P Parameter: Organism Value: Zea mays
  misc_feature: MA Experiment 20000478 PARAMETER Experiment Name: Zm_5mM_SA_P Parameter: Plant Line Value: 35A19
  misc_feature: MA Experiment 20000478 PARAMETER Experiment Name: Zm_5mM_SA_P Parameter: Timepoint (hr) Value: 72
  misc_feature: MA Experiment 20000478 PARAMETER Experiment Name: Zm_5mM_SA_P Parameter: Tissue Value: Aerial
  misc_feature: MA Experiment 20000478 PARAMETER Experiment Name: Zm_5mM_SA_P Parameter: Treatment Value: 5mM SA vs. No Treatment
  misc_feature: MA Experiment ID: 20000479 Result: Down-regulated in Transcription
  misc_feature: MA Experiment 20000479 PARAMETER Experiment Name: Zm_Drought_P Parameter: Age (day) Value: 10
  misc_feature: MA Experiment 20000479 PARAMETER Experiment Name: Zm_Drought_P Parameter: Organism Value: Zea mays
  misc_feature: MA Experiment 20000479 PARAMETER Experiment Name: Zm_Drought_P Parameter: Plant Line Value: 35A19
  misc_feature: MA Experiment 20000479 PARAMETER Experiment Name: Zm_Drought_P Parameter: Timepoint (hr) Value: 48
  misc_feature: MA Experiment 20000479 PARAMETER Experiment Name: Zm_Drought_P Parameter: Tissue Value: Aerial
  misc_feature: MA Experiment 20000479 PARAMETER Experiment Name: Zm_Drought_P Parameter: Treatment Value: Drought vs. No Drought
  misc_feature: MA Experiment ID: 20000480 Result: Down-regulated in Transcription
  misc_feature: MA Experiment 20000480 PARAMETER Experiment Name: Zm_Drought_P Parameter: Age (day) Value: 11
  misc_feature: MA Experiment 20000480 PARAMETER Experiment Name: Zm_Drought_P Parameter: Organism Value: Zea mays
  misc_feature: MA Experiment 20000480 PARAMETER Experiment Name: Zm_Drought_P Parameter: Plant Line Value: 35A19
  misc_feature: MA Experiment 20000480 PARAMETER Experiment Name: Zm_Drought_P Parameter: Timepoint (hr) Value: 72
  misc_feature: MA Experiment 20000480 PARAMETER Experiment Name: Zm_Drought_P Parameter: Tissue Value: Aerial
  misc_feature: MA Experiment 20000480 PARAMETER Experiment Name: Zm_Drought_P Parameter: Treatment Value: Drought vs. No Drought
  misc_feature: MA Experiment ID: 20000488 Result: Down-regulated in Transcription
  misc_feature: MA Experiment 20000488 PARAMETER Experiment Name: Zm_50mM_NH4NO3_L_to_H_P Parameter: Organism Value: Zea mays
  misc_feature: MA Experiment 20000488 PARAMETER Experiment Name: Zm_50mM_NH4NO3_L_to_H_P Parameter: Timepoint (hr) Value: 8
  misc_feature: MA Experiment 20000488 PARAMETER Experiment Name: Zm_50mM_NH4NO3_L_to_H_P Parameter: Tissue Value: Leaves
  misc_feature: MA Experiment 20000488 PARAMETER Experiment Name: Zm_50mM_NH4NO3_L_to_H_P Parameter: Treatment Value: 50mM NH4NO3 vs. 100mM Mannitol
  misc_feature: MA Experiment ID: 20000533 Result: Down-regulated in Transcription
  misc_feature: MA Experiment 20000533 PARAMETER Experiment Name: Zm_0.001percent_MeJA_P Parameter: Age (day) Value: 11
  misc_feature: MA Experiment 20000533 PARAMETER Experiment Name: Zm_0.001percent_MeJA_P Parameter: Organism Value: Zea mays
  misc_feature: MA Experiment 20000533 PARAMETER Experiment Name: Zm_0.001percent_MeJA_P Parameter: Plant Line Value: 35A19
  misc_feature: MA Experiment 20000533 PARAMETER Experiment Name: Zm_0.001percent_MeJA_P Parameter: Timepoint (hr) Value: 72
  misc_feature: MA Experiment 20000533 PARAMETER Experiment Name: Zm_0.001percent_MeJA_P Parameter: Tissue Value: Aerial
  misc_feature: MA Experiment 20000533 PARAMETER Experiment Name: Zm_0.001percent_MeJA_P Parameter: Treatment Value: 0.001percent MeJA vs. No Treatment
  misc_feature: MA Experiment ID: 20000626 Result: Down-regulated in Transcription
  misc_feature: MA Experiment 20000626 PARAMETER Experiment Name: Zm_Herbicide-Treatments_P Parameter: Timepoint (hr) Value: 12
  misc_feature: MA Experiment 20000626 PARAMETER Experiment Name: Zm_Herbicide-Treatments_P Parameter: Tissue Value: Aerial
  misc_feature: MA Experiment 20000626 PARAMETER Experiment Name: Zm_Herbicide-Treatments_P Parameter: Treatment Value: Roundup vs. No Treatment
atcacccctcgttgtcatctcatatcctgagccagagatcaaagaaaccagagggagcgaggcatggcagcaggcttgcaggtgtttggccagccggcgtctactgatgtctccagggttctgacatgcctgtttgagaagaaactggagttcgatcttgtccgcatcgatacgttcaagacgcatcacaagcttcccgagttcatcaggcttcgggatcctaatgggcaagtgaccttgaagcacggcgacaaaactctcgttgattcgagggacatctgccggtacgtctgcacccagtttccaaacgatggaaacaagagcctttacggatccggcgctctagaacgggcgtcgatagaacagtggcttcaggcggaggctcagaacttcgggccccccagctccgcgctcgtcttccagctggcgttcgtccctcacctcactcacctgggcgttcgtcaggaccctgccgtgatcgccgagaacgaggataagctgaagcaggtccttgatgtctacgacgagatactctcgaggaacgagtacctggctggcgacgagttcaccctggccgacctctcccacctcccgaactcgcactacatcgtgaacaccgagagaggaaggaagctcttcactaacaagaagaacgtggccaagtggtacgagaagctctcgaagcgcgagacgtggaagcaggtcgctaagatgcagaaggaacatcctggtgcgttcgagtgattgcttgtcttggggggagctgcgagtgcaccatcatgaatggcttcatcgtctgtgtcggtctggctctacagttcattttgttttgagtgatccattgtttaattcctcctatcagtgttgtcgtgtgcaccaaaaataatgtgaagcccagctgtgatgtatatgatccttttgctctaatctatcatgacgtataagct

SEQ ID NO: 19453 - protein, 226 aa, Zea mays subsp. mays; identical to SEQ ID NO: 12318
  peptide (1)..(226): Ceres Seq. ID no. 14305115
  misc_feature (97)..(209): Pfam Name: Glutathione S-transferase, C-terminal domain Pfam Description: Glutathione S-transferase, C-terminal domain
  misc_feature (1)..(218): Homolog of NCBI NO: 22758267 NR Description: Putative glutathione S-transferase
  misc_feature (1)..(218): Homolog of NCBI NO: 11177845 NR Description: putative glutathione S-transferase OsGSTF3
  misc_feature (132)..(224): Homolog of NCBI NO: 37536564 NR Description: putative glutathione S-transferase
  misc_feature (1)..(128): Homolog of NCBI NO: 37536564 NR Description: putative glutathione S-transferase
  misc_feature (1)..(75): Homolog of NCBI NO: 22758268 NR Description: Putative glutathione S-transferase
  misc_feature (131)..(226): Homolog of NCBI NO: 22758268 NR Description: Putative glutathione S-transferase
  misc_feature (1)..(226): Homolog of NCBI NO: 22758269 NR Description: Putative glutathione S-transferase
  misc_feature (1)..(226): Homolog of NCBI NO: 11385477 NR Description: glutathione S-transferase GST 13 [Zea mays]
  misc_feature (1)..(226): Homolog of NCBI NO: 11385475 NR Description: glutathione S-transferase GST 12 [Zea mays]
  misc_feature (1)..(226): Homolog of NCBI NO: 11385469 NR Description: glutathione S-transferase GST 9 [Zea mays]

SEQ ID NO: 19454 - DNA, 1175 bp, Zea mays subsp. mays
  misc_feature (1)..(1175): Ceres Seq. ID no. 12359182
  misc_feature: MA Experiment ID: 108530 Result: Down-regulated in Transcription
  misc_feature: MA Experiment 108530 PARAMETER Experiment Name: Zm_Imbibed_Seeds_P Parameter: Age (day) Value: 6 vs. 2
  misc_feature: MA Experiment 108530 PARAMETER Experiment Name: Zm_Imbibed_Seeds_P Parameter: Organism Value: Zea mays
  misc_feature: MA Experiment 108530 PARAMETER Experiment Name: Zm_Imbibed_Seeds_P Parameter: Plant Line Value: 35A19
  misc_feature: MA Experiment 108530 PARAMETER Experiment Name: Zm_Imbibed_Seeds_P Parameter: Tissue Value: Aerial vs. Embryo
  misc_feature: MA Experiment ID: 108535 Result: Up-regulated in Transcription
  misc_feature: MA Experiment 108535 PARAMETER Experiment Name: Zm_Meristem_P Parameter: Age (day) Value: 8
  misc_feature: MA Experiment 108535 PARAMETER Experiment Name: Zm_Meristem_P Parameter: Organism Value: Zea mays
  misc_feature: MA Experiment 108535 PARAMETER Experiment Name: Zm_Meristem_P Parameter: Plant Line Value: 35A19
  misc_feature: MA Experiment 108535 PARAMETER Experiment Name: Zm_Meristem_P Parameter: Tissue Value: Root Meristem vs. Above Root Meristem
  misc_feature: MA Experiment ID: 108547 Result: Down-regulated in Transcription
  misc_feature: MA Experiment 108547 PARAMETER Experiment Name: Zm_Imbibed_Seeds_P Parameter: Age (day) Value: 4 vs. 2
  misc_feature: MA Experiment 108547 PARAMETER Experiment Name: Zm_Imbibed_Seeds_P Parameter: Organism Value: Zea mays
  misc_feature: MA Experiment 108547 PARAMETER Experiment Name: Zm_Imbibed_Seeds_P Parameter: Plant Line Value: 35A19
  misc_feature: MA Experiment 108547 PARAMETER Experiment Name: Zm_Imbibed_Seeds_P Parameter: Tissue Value: Aerial vs. Embryo
ctattgatttgtgctttactccatttatcatcatttagttttgcatacatgttgagactgtgcacttgtcaaactacatgattgatattaataaagcttgggcggctaaactatgcctggatgttgggtgggggcagggatgcattttctgggggttgttattatttgtttgaaatctgattcaggtcccacattcaaccgggccttatgtgattagttgtaagctgacatgaagatgatgcttttgtaggttcatcctcccagcttcgttaattgctatcaatgatgttgctgcatatttctttgggttcttctttgggaaaacaccactgatcaagctctctccaaagaaaacatgggaaggctttataggtgcatcagtgacaacattgctttctgcatttgtggttgctaatttcatgggccatttccagtggttaacatgcccaagaaaggatctatcaactggatggctttattgtgacccaggtcccatgtttacaccagaaggttatgatctaccgggatggataccacaatggtttccatggcgagaaattgcaattatgcccgttcaatggcatgcattagctcttggcttgtttgcttcaataatagcaccatttggtggcttttttgcaagtggattcaagagggcattcaaatttaaggattttggggacagcatacctggtcatggtggatttacagataggatggactgccaaatggtcatggctgtttttgcgtacatctattaccaatcatttgtaatggtacaggacttatctgttgagacaatcctggagcagatactacgtaatctcacctttgaggagcagcgtgagctatatggacagctaggcaagttacttgtgagagcgaactgaagctaacagtggccgtggaagcacctaatccaaaaggataatgcgcaatgctttttcaggccttgcttttttgttaatcttcttgtacagccctagcacccctaaggatgaaacgaagaaccacaacgctgacagggatcgcatcgctgtatgacgttttggagcatacagctcctcccgtctttttcagagatttgtgtcacctttttgatttgcttctggtgctacgcttgttgccgcatcaaaaccagctaacgctgttttgtcgtgtcaatggtttatttg

SEQ ID NO: 19455 - protein, 156 aa, Zea mays subsp. mays
  peptide (1)..(156): Ceres Seq. ID no. 12359183
  misc_feature (1)..(156): Homolog of NCBI NO: 20303635 NR Description: putative CDP-diacylglycerol synthetase
  misc_feature (1)..(148): Homolog of NCBI NO: 7676150 NR Description: PHOSPHATIDATE CYTIDYLYLTRANSFERASE 1 SYNTHETASE 1) (CDP-DIGLYCERIDE PYROPHOSPHORYLASE 1) SYNTHASE 1) (CDS 1) (CTP:PHOSPHATIDATE CYTIDYLYLTRANSFERASE 1)
  misc_feature (1)..(152): Homolog of NCBI NO: 40743157 NR Description: hypothetical protein AN5166.2 [Aspergillus
  misc_feature (121)..(156): Homolog of NCBI NO: 37532798 NR Description: putative phosphatidate cytidylyltransferase
  misc_feature (13)..(103): Homolog of NCBI NO: 37532798 NR Description: putative phosphatidate cytidylyltransferase
  misc_feature (1)..(152): Homolog of NCBI NO: 15235611 NR Description: CDP-diacylglycerol synthetase-like protein
  misc_feature (1)..(152): Homolog of NCBI NO: 15236874 NR Description: putative CDP-diacylglycerol synthetase; protein
  misc_feature (1)..(152): Homolog of NCBI NO: 7484839 NR Description: CDP-diacylglycerol synthetase homolog F24O1.17 -
  misc_feature (1)..(152): Homolog of NCBI NO: 30696710 NR Description: phosphatidate cytidylyltransferase (CDS)
  misc_feature (1)..(152): Homolog of NCBI NO: 3121837 NR Description: Phosphatidate cytidylyltransferase synthetase) (CDP-diglyceride pyrophosphorylase) synthase) (CDS) (CTP:phosphatidate cytidylyltransferase) (CDP-DAG
MGHFQWLTCPRKDLSTGWLYCDPGPMFTPEGYDLPGWIPQWFPWREIAIMPVQWHALALGLFASIIAPFGGFFASGFKRAFKFKDFGDSIPGHGGFTDRMDCQMVMAVFAYIYYQSFVMVQDLSVETILEQILRNLTFEEQRELYGQLGKLLVRAN

SEQ ID NO: 19456 - protein, 131 aa, Zea mays subsp. mays
  peptide (1)..(131): Ceres Seq. ID no. 12359184
  misc_feature (1)..(123): Homolog of NCBI NO: 7676150 NR Description: PHOSPHATIDATE CYTIDYLYLTRANSFERASE 1 SYNTHETASE 1) (CDP-DIGLYCERIDE PYROPHOSPHORYLASE 1) SYNTHASE 1) (CDS 1) (CTP:PHOSPHATIDATE CYTIDYLYLTRANSFERASE 1)
  misc_feature (1)..(127): Homolog of NCBI NO: 40743157 NR Description: hypothetical protein AN5166.2 [Aspergillus
  misc_feature (96)..(131): Homolog of NCBI NO: 37532798 NR Description: putative phosphatidate cytidylyltransferase
  misc_feature (1)..(78): Homolog of NCBI NO: 37532798 NR Description: putative phosphatidate cytidylyltransferase
  misc_feature (1)..(127): Homolog of NCBI NO: 15235611 NR Description: CDP-diacylglycerol synthetase-like protein
  misc_feature (1)..(127): Homolog of NCBI NO: 15236874 NR Description: putative CDP-diacylglycerol synthetase; protein
  misc_feature (1)..(127): Homolog of NCBI NO: 7484839 NR Description: CDP-diacylglycerol synthetase homolog F24O1.17 -
  misc_feature (1)..(127): Homolog of NCBI NO: 30696710 NR Description: phosphatidate cytidylyltransferase (CDS)
  misc_feature (1)..(127): Homolog of NCBI NO: 3121837 NR Description: Phosphatidate cytidylyltransferase synthetase) (CDP-diglyceride pyrophosphorylase) synthase) (CDS) (CTP:phosphatidate cytidylyltransferase) (CDP-DAG
  misc_feature (1)..(131): Homolog of NCBI NO: 20303635 NR Description: putative CDP-diacylglycerol synthetase
MFTPEGYDLPGWIPQWFPWREIAIMPVQWHALALGLFASIIAPFGGFFASGFKRAFKFKDFGDSIPGHGGFTDRMDCQMVMAVFAYIYYQSFVMVQDLSVETILEQILRNLTFEEQRELYGQLGKLLVRAN

SEQ ID NO: 19457 - protein, 107 aa, Zea mays subsp. mays
  peptide (1)..(107): Ceres Seq. ID no. 12359185
  misc_feature (1)..(99): Homolog of NCBI NO: 7676150 NR Description: PHOSPHATIDATE CYTIDYLYLTRANSFERASE 1 SYNTHETASE 1) (CDP-DIGLYCERIDE PYROPHOSPHORYLASE 1) SYNTHASE 1) (CDS 1) (CTP:PHOSPHATIDATE CYTIDYLYLTRANSFERASE 1)
  misc_feature (1)..(103): Homolog of NCBI NO: 40743157 NR Description: hypothetical protein AN5166.2 [Aspergillus
  misc_feature (72)..(107): Homolog of NCBI NO: 37532798 NR Description: putative phosphatidate cytidylyltransferase
  misc_feature (1)..(54): Homolog of NCBI NO: 37532798 NR Description: putative phosphatidate cytidylyltransferase
  misc_feature (1)..(103): Homolog of NCBI NO: 15235611 NR Description: CDP-diacylglycerol synthetase-like protein
  misc_feature (1)..(103): Homolog of NCBI NO: 15236874 NR Description: putative CDP-diacylglycerol synthetase; protein
  misc_feature (1)..(103): Homolog of NCBI NO: 7484839 NR Description: CDP-diacylglycerol synthetase homolog F24O1.17 -
  misc_feature (1)..(103): Homolog of NCBI NO: 30696710 NR Description: phosphatidate cytidylyltransferase (CDS)
  misc_feature (1)..(103): Homolog of NCBI NO: 3121837 NR Description: Phosphatidate cytidylyltransferase synthetase) (CDP-diglyceride pyrophosphorylase) synthase) (CDS) (CTP:phosphatidate cytidylyltransferase) (CDP-DAG
  misc_feature (1)..(107): Homolog of NCBI NO: 20303635 NR Description: putative CDP-diacylglycerol synthetase
MPVQWHALALGLFASIIAPFGGFFASGFKRAFKFKDFGDSIPGHGGFTDRMDCQMVMAVFAYIYYQSFVMVQDLSVETILEQILRNLTFEEQRELYGQLGKLLVRAN

SEQ ID NO: 19458 - DNA, 1205 bp, Zea mays subsp. mays
  misc_feature (1)..(1205): Ceres Seq. ID no. 12364538
  misc_feature: MA Experiment ID: 108528 Result: Up-regulated in Transcription
  misc_feature: MA Experiment 108528 PARAMETER Experiment Name: Zm_Imbibed_Seeds_P Parameter: Age (day) Value: 5 vs. 2
  misc_feature: MA Experiment 108528 PARAMETER Experiment Name: Zm_Imbibed_Seeds_P Parameter: Organism Value: Zea mays
  misc_feature: MA Experiment 108528 PARAMETER Experiment Name: Zm_Imbibed_Seeds_P Parameter: Plant Line Value: 35A19
  misc_feature: MA Experiment 108528 PARAMETER Experiment Name: Zm_Imbibed_Seeds_P Parameter: Tissue Value: Aerial vs. Embryo
  misc_feature: MA Experiment ID: 108530 Result: Up-regulated in Transcription
  misc_feature: MA Experiment 108530 PARAMETER Experiment Name: Zm_Imbibed_Seeds_P Parameter: Age (day) Value: 6 vs. 2
  misc_feature: MA Experiment 108530 PARAMETER Experiment Name: Zm_Imbibed_Seeds_P Parameter: Organism Value: Zea mays
  misc_feature: MA Experiment 108530 PARAMETER Experiment Name: Zm_Imbibed_Seeds_P Parameter: Plant Line Value: 35A19
  misc_feature: MA Experiment 108530 PARAMETER Experiment Name: Zm_Imbibed_Seeds_P Parameter: Tissue Value: Aerial vs. Embryo
  misc_feature: MA Experiment ID: 108536 Result: Down-regulated in Transcription
  misc_feature: MA Experiment 108536 PARAMETER Experiment Name: Zm_Meristem_P Parameter: Age (day) Value: 8
  misc_feature: MA Experiment 108536 PARAMETER Experiment Name: Zm_Meristem_P Parameter: Organism Value: Zea mays
  misc_feature: MA Experiment 108536 PARAMETER Experiment Name: Zm_Meristem_P Parameter: Plant Line Value: 35A19
  misc_feature: MA Experiment 108536 PARAMETER Experiment Name: Zm_Meristem_P Parameter: Tissue Value: Shoot Meristem vs. Above Shoot Meristem
  misc_feature: MA Experiment ID: 108545 Result: Up-regulated in Transcription
  misc_feature: MA Experiment 108545 PARAMETER Experiment Name: Zm_Imbibed_Seeds_P Parameter: Age (day) Value: 3 vs. 2
  misc_feature: MA Experiment 108545 PARAMETER Experiment Name: Zm_Imbibed_Seeds_P Parameter: Organism Value: Zea mays
  misc_feature: MA Experiment 108545 PARAMETER Experiment Name: Zm_Imbibed_Seeds_P Parameter: Plant Line Value: 35A19
  misc_feature: MA Experiment 108545 PARAMETER Experiment Name: Zm_Imbibed_Seeds_P Parameter: Tissue Value: Aerial vs. Embryo
  misc_feature: MA Experiment ID: 108546 Result: Down-regulated in Transcription
  misc_feature: MA Experiment 108546 PARAMETER Experiment Name: Zm_Imbibed_Seeds_P Parameter: Age (day) Value: 3 vs. 2
  misc_feature: MA Experiment 108546 PARAMETER Experiment Name: Zm_Imbibed_Seeds_P Parameter: Organism Value: Zea mays
  misc_feature: MA Experiment 108546 PARAMETER Experiment Name: Zm_Imbibed_Seeds_P Parameter: Plant Line Value: 35A19
  misc_feature: MA Experiment 108546 PARAMETER Experiment Name: Zm_Imbibed_Seeds_P Parameter: Tissue Value: Roots vs. Embryo
  misc_feature: MA Experiment ID: 108547 Result: Up-regulated in Transcription
  misc_feature: MA Experiment 108547 PARAMETER Experiment Name: Zm_Imbibed_Seeds_P Parameter: Age (day) Value: 4 vs. 2
  misc_feature: MA Experiment 108547 PARAMETER Experiment Name: Zm_Imbibed_Seeds_P Parameter: Organism Value: Zea mays
  misc_feature: MA Experiment 108547 PARAMETER Experiment Name: Zm_Imbibed_Seeds_P Parameter: Plant Line Value: 35A19
  misc_feature: MA Experiment 108547 PARAMETER Experiment Name: Zm_Imbibed_Seeds_P Parameter: Tissue Value: Aerial vs. Embryo
  misc_feature: MA Experiment ID: 108559 Result: Down-regulated in Transcription
  misc_feature: MA Experiment 108559 PARAMETER Experiment Name: Zm_5mM_NO_P Parameter: Age (day) Value: 8
  misc_feature: MA Experiment 108559 PARAMETER Experiment Name: Zm_5mM_NO_P Parameter: Organism Value: Zea mays
  misc_feature: MA Experiment 108559 PARAMETER Experiment Name: Zm_5mM_NO_P Parameter: Plant Line Value: 35A19
  misc_feature: MA Experiment 108559 PARAMETER Experiment Name: Zm_5mM_NO_P Parameter: Timepoint (hr) Value: 12
  misc_feature: MA Experiment 108559 PARAMETER Experiment Name: Zm_5mM_NO_P Parameter: Tissue Value: Aerial
  misc_feature: MA Experiment 108559 PARAMETER Experiment Name: Zm_5mM_NO_P Parameter: Treatment Value: 5mM NO vs. No Treatment
  misc_feature: MA Experiment ID: 108688 Result: Down-regulated in Transcription
  misc_feature: MA Experiment 108688 PARAMETER Experiment Name: Zm_Embryos-Flowers__P Parameter: Tissue Value: Immature Flowers vs. Aerial+
  misc_feature: MA Experiment ID: 20000626 Result: Down-regulated in Transcription
  misc_feature: MA Experiment 20000626 PARAMETER Experiment Name: Zm_Herbicide-Treatments_P Parameter: Timepoint (hr) Value: 12
  misc_feature: MA Experiment 20000626 PARAMETER Experiment Name: Zm_Herbicide-Treatments_P Parameter: Tissue Value: Aerial
  misc_feature: MA Experiment 20000626 PARAMETER Experiment Name: Zm_Herbicide-Treatments_P Parameter: Treatment Value: Roundup vs. No Treatment
gcacgagaccattacctagaacatcctaatcgaaaaataagccgcgcccgcctccgcacgccccgctccgatggcagccgcggctgtgaccctgccctcctcgggcacgcccttcgccgtcgccacaaccgcctcttcctcatccgcccgccgctgcctgctcctgccctccgcggctccccgccgagctctccgcgtcgtggcctccgccgctaccgaggcgccgcccaagcccacgcagccgccgacatcgccctccggcatcgtgctcgtcgacccatccgaagcccagaaggtgcaccggctcaaggccgtctacgaccagaaggtcgtcccgctcatcaccgaggagttcggctacaccaatgtccaccaggttcccaagctcgagaagattgtggtgaactgcggtctgggcgcggaggcagggaactcgaaggggctggatgccgccatgaaggacctggccatgatcaccgggcagtggcccgtcaagaccaaggccaggaagtccgtggccagcttcaagatccgtgagggaaacaccatcggtatcgcagtcaccctccgcggcaggataatgtacaacttcctggataggctcatcaaccttgggctccctaggaccatggacttcctgggtgtcaaccccaacagcttcgacgggcacggcaactacagccttggcctccgtgaccagggcgtgttcccggagatcccgtacgaggtgggcgggaagaagaacggcatggacgtgtccatcgtcaccagcgccaagacggacaacgaggcgttcaggctgctggtcctcctcggcatgccattctcggagaacatcaagaccgacgtggtgatccggaagaagaggttgaaccgccaccacttcctgagcaagggcaaggggaagggaggacgacggtgaggagaggaaccagccagccagccagcccatggttgcacacgctctgttcagcttgttttaattccgatctttttgcagaatttggcttacaaattcgatgctgttgttgtctgtcaattatgtaacttgtgcacctatgaaaaaggtttgcaatgatcatgtccgttttgctgatttcttcttgatgcataatttgtagtcacaagttataccactgccagacattgtaatcggaggaagcagtaatgtgagacggacactgtaatgcaaacgtatttcagct

SEQ ID NO: 19459 - protein, 283 aa, Zea mays subsp. mays
  peptide (1)..(283): Ceres Seq. ID no. 12364539
  misc_feature (159)..(253): Pfam Name: ribosomal L5P family C-terminus Pfam Description: ribosomal L5P family C-terminus
  misc_feature (79)..(255): Homolog of NCBI NO: 23042780 NR Description: hypothetical protein [Trichodesmium erythraeum
  misc_feature (78)..(254): Homolog of NCBI NO: 17231695 NR Description: 50S ribosomal protein L5 [Nostoc sp. PCC 7120]
  misc_feature (78)..(255): Homolog of NCBI NO: 22297637 NR Description: 50S ribosomal protein L5 [Thermosynechococcus
  misc_feature (76)..(254): Homolog of NCBI NO: 11466362 NR Description: ribosomal protein L5 [Mesostigma viride]
  misc_feature (78)..(254): Homolog of NCBI NO: 20808648 NR Description: Ribosomal protein L5 [Thermoanaerobacter
  misc_feature (78)..(252): Homolog of NCBI NO: 3123273 NR Description: 50S RIBOSOMAL PROTEIN L5
  misc_feature (69)..(252): Homolog of NCBI NO: 16329929 NR Description: 50S ribosomal protein L5 [Synechocystis sp. PCC
  misc_feature (74)..(279): Homolog of NCBI NO: 7582405 NR Description: plastid ribosomal protein PRPL5 [Spinacia
  misc_feature (13)..(279): Homolog of NCBI NO: 15234136 NR Description: putative L5 ribosomal protein
  misc_feature (2)..(279): Homolog of NCBI NO: 3777600 NR Description: 50S ribosomal protein L5 [Oryza sativa]
MAAAAVTLPSSGTPFAVATTASSSSARRCLLLPSAAPRRALRVVASAATEAPPKPTQPPTSPSGIVLVDPSEAQKVHRLKAVYDQKVVPLITEEFGYTNVHQVPKLEKIVVNCGLGAEAGNSKGLDAAMKDLAMITGQWPVKTKARKSVASFKIREGNTIGIAVTLRGRIMYNFLDRLINLGLPRTMDFLGVNPNSFDGHGNYSLGLRDQGVFPEIPYEVGGKKNGMDVSIVTSAKTDNEAFRLLVLLGMPFSENIKTDVVIRKKRLNRHHFLSKGKGKGGRR

SEQ ID NO: 19460 - protein, 178 aa, Zea mays subsp. mays
  peptide (1)..(178): Ceres Seq. ID no. 12364540
  misc_feature (50)..(178): Pfam Name: High molecular weight glutenin subunit Pfam Description: High molecular weight glutenin subunit
ARDHYLEHPNRKISRARLRTPRSDGSRGCDPALLGHALRRRHNRLFLIRPPLPAPALRGSPPSSPRRGLRRYRGAAQAHAAADIALRHRARRPIRSPEGAPAQGRLRPEGRPAHHRGVRLHQCPPGSQAREDCGELRSGRGGRELEGAGCRHEGPGHDHRAVARQDQGQEVRGQLQDP

SEQ ID NO: 19461 - protein, 155 aa, Zea mays subsp. mays
  peptide (1)..(155): Ceres Seq. ID no. 12364541
  misc_feature (31)..(125): Pfam Name: ribosomal L5P family C-terminus Pfam Description: ribosomal L5P family C-terminus
  misc_feature (1)..(127): Homolog of NCBI NO: 23042780 NR Description: hypothetical protein [Trichodesmium erythraeum
  misc_feature (1)..(126): Homolog of NCBI NO: 17231695 NR Description: 50S ribosomal protein L5 [Nostoc sp. PCC 7120]
  misc_feature (1)..(127): Homolog of NCBI NO: 22297637 NR Description: 50S ribosomal protein L5 [Thermosynechococcus
  misc_feature (1)..(126): Homolog of NCBI NO: 11466362 NR Description: ribosomal protein L5 [Mesostigma viride]
  misc_feature (1)..(126): Homolog of NCBI NO: 20808648 NR Description: Ribosomal protein L5 [Thermoanaerobacter
  misc_feature (1)..(124): Homolog of NCBI NO: 3123273 NR Description: 50S RIBOSOMAL PROTEIN L5
  misc_feature (1)..(124): Homolog of NCBI NO: 16329929 NR Description: 50S ribosomal protein L5 [Synechocystis sp. PCC
  misc_feature (1)..(151): Homolog of NCBI NO: 7582405 NR Description: plastid ribosomal protein PRPL5 [Spinacia
  misc_feature (1)..(151): Homolog of NCBI NO: 15234136 NR Description: putative L5 ribosomal protein
  misc_feature (1)..(151): Homolog of NCBI NO: 3777600 NR Description: 50S ribosomal protein L5 [Oryza sativa]
MKDLAMITGQWPVKTKARKSVASFKIREGNTIGIAVTLRGRIMYNFLDRLINLGLPRTMDFLGVNPNSFDGHGNYSLGLRDQGVFPEIPYEVGGKKNGMDVSIVTSAKTDNEAFRLLVLLGMPFSENIKTDVVIRKKRLNRHHFLSKGKGKGGRR

SEQ ID NO: 19462 - DNA, 1098 bp, Zea mays subsp. mays
  misc_feature (1)..(1098): Ceres Seq. ID no. 13494528
  misc_feature: MA Experiment ID: 108504 Result: Down-regulated in Transcription
  misc_feature: MA Experiment 108504 PARAMETER Experiment Name: Zm_Drought_P Parameter: Age (day) Value: 8
  misc_feature: MA Experiment 108504 PARAMETER Experiment Name: Zm_Drought_P Parameter: Organism Value: Zea mays
  misc_feature: MA Experiment 108504 PARAMETER Experiment Name: Zm_Drought_P Parameter: Plant Line Value: 35A19
  misc_feature: MA Experiment 108504 PARAMETER Experiment Name: Zm_Drought_P Parameter: Timepoint (hr) Value: 12
  misc_feature: MA Experiment 108504 PARAMETER Experiment Name: Zm_Drought_P Parameter: Tissue Value: Aerial
  misc_feature: MA Experiment 108504 PARAMETER Experiment Name: Zm_Drought_P Parameter: Treatment Value: Drought vs. No Drought
  misc_feature: MA Experiment ID: 108527 Result: Down-regulated in Transcription
  misc_feature: MA Experiment 108527 PARAMETER Experiment Name: Zm_5mM_NO_P Parameter: Age (day) Value: 8
  misc_feature: MA Experiment 108527 PARAMETER Experiment Name: Zm_5mM_NO_P Parameter: Organism Value: Zea mays
  misc_feature: MA Experiment 108527 PARAMETER Experiment Name: Zm_5mM_NO_P Parameter: Plant Line Value: 35A19
  misc_feature: MA Experiment 108527 PARAMETER Experiment Name: Zm_5mM_NO_P Parameter: Timepoint (hr) Value: 6
  misc_feature: MA Experiment 108527 PARAMETER Experiment Name: Zm_5mM_NO_P Parameter: Tissue Value: Aerial
  misc_feature: MA Experiment 108527 PARAMETER Experiment Name: Zm_5mM_NO_P Parameter: Treatment Value: 5mM NO vs. No Treatment
  misc_feature: MA Experiment ID: 108528 Result: Up-regulated in Transcription
  misc_feature: MA Experiment 108528 PARAMETER Experiment Name: Zm_Imbibed_Seeds_P Parameter: Age (day) Value: 5 vs. 2
  misc_feature: MA Experiment 108528 PARAMETER Experiment Name: Zm_Imbibed_Seeds_P Parameter: Organism Value: Zea mays
  misc_feature: MA Experiment 108528 PARAMETER Experiment Name: Zm_Imbibed_Seeds_P Parameter: Plant Line Value: 35A19
  misc_feature: MA Experiment 108528 PARAMETER Experiment Name: Zm_Imbibed_Seeds_P Parameter: Tissue Value: Aerial vs. Embryo
  misc_feature: MA Experiment ID: 108530 Result: Up-regulated in Transcription
  misc_feature: MA Experiment 108530 PARAMETER Experiment Name: Zm_Imbibed_Seeds_P Parameter: Age (day) Value: 6 vs. 2
  misc_feature: MA Experiment 108530 PARAMETER Experiment Name: Zm_Imbibed_Seeds_P Parameter: Organism Value: Zea mays
  misc_feature: MA Experiment 108530 PARAMETER Experiment Name: Zm_Imbibed_Seeds_P Parameter: Plant Line Value: 35A19
  misc_feature: MA Experiment 108530 PARAMETER Experiment Name: Zm_Imbibed_Seeds_P Parameter: Tissue Value: Aerial vs. Embryo
  misc_feature: MA Experiment ID: 108534 Result: Up-regulated in Transcription
  misc_feature: MA Experiment 108534 PARAMETER Experiment Name: Zm_4deg_Cold_P Parameter: Age (hr) Value: 8
  misc_feature: MA Experiment 108534 PARAMETER Experiment Name: Zm_4deg_Cold_P Parameter: Organism Value: Zea mays
  misc_feature: MA Experiment 108534 PARAMETER Experiment Name: Zm_4deg_Cold_P Parameter: Plant Line Value: 35A19
  misc_feature: MA Experiment 108534 PARAMETER Experiment Name: Zm_4deg_Cold_P Parameter: Temperature (deg C) Value: 4 vs. 22
  misc_feature: MA Experiment 108534 PARAMETER Experiment Name: Zm_4deg_Cold_P Parameter: Timepoint (hr) Value: 6
  misc_feature: MA Experiment 108534 PARAMETER Experiment Name: Zm_4deg_Cold_P Parameter: Tissue Value: Aerial
  misc_feature: MA Experiment ID: 108545 Result: Up-regulated in Transcription
  misc_feature: MA Experiment 108545 PARAMETER Experiment Name: Zm_Imbibed_Seeds_P Parameter: Age (day) Value: 3 vs. 2
  misc_feature: MA Experiment 108545 PARAMETER Experiment Name: Zm_Imbibed_Seeds_P Parameter: Organism Value: Zea mays
  misc_feature: MA Experiment 108545 PARAMETER Experiment Name: Zm_Imbibed_Seeds_P Parameter: Plant Line Value: 35A19
  misc_feature: MA Experiment 108545 PARAMETER Experiment Name: Zm_Imbibed_Seeds_P Parameter: Tissue Value: Aerial vs. Embryo
  misc_feature: MA Experiment ID: 108547 Result: Up-regulated in Transcription
  misc_feature: MA Experiment 108547 PARAMETER Experiment Name: Zm_Imbibed_Seeds_P Parameter: Age (day) Value: 4 vs. 2
  misc_feature: MA Experiment 108547 PARAMETER Experiment Name: Zm_Imbibed_Seeds_P Parameter: Organism Value: Zea mays
  misc_feature: MA Experiment 108547 PARAMETER Experiment Name: Zm_Imbibed_Seeds_P Parameter: Plant Line Value: 35A19
  misc_feature: MA Experiment 108547 PARAMETER Experiment Name: Zm_Imbibed_Seeds_P Parameter: Tissue Value: Aerial vs. Embryo
  misc_feature: MA Experiment ID: 108556 Result: Down-regulated in Transcription
  misc_feature: MA Experiment 108556 PARAMETER Experiment Name: Zm_Drought_P Parameter: Age (day) Value: 9
  misc_feature: MA Experiment 108556 PARAMETER Experiment Name: Zm_Drought_P Parameter: Organism Value: Zea mays
  misc_feature: MA Experiment 108556 PARAMETER Experiment Name: Zm_Drought_P Parameter: Plant Line Value: 35A19
  misc_feature: MA Experiment 108556 PARAMETER Experiment Name: Zm_Drought_P Parameter: Timepoint (hr) Value: 24
  misc_feature: MA Experiment 108556 PARAMETER Experiment Name: Zm_Drought_P Parameter: Tissue Value: Aerial
  misc_feature: MA Experiment 108556 PARAMETER Experiment Name: Zm_Drought_P Parameter: Treatment Value: Drought vs. No Drought
  misc_feature: MA Experiment ID: 108559 Result: Down-regulated in Transcription
  misc_feature: MA Experiment 108559 PARAMETER Experiment Name: Zm_5mM_NO_P Parameter: Age (day) Value: 8
  misc_feature: MA Experiment 108559 PARAMETER Experiment Name: Zm_5mM_NO_P Parameter: Organism Value: Zea mays
  misc_feature: MA Experiment 108559 PARAMETER Experiment Name: Zm_5mM_NO_P Parameter: Plant Line Value: 35A19
  misc_feature: MA Experiment 108559 PARAMETER Experiment Name: Zm_5mM_NO_P Parameter: Timepoint (hr) Value: 12
  misc_feature: MA Experiment 108559 PARAMETER Experiment Name: Zm_5mM_NO_P Parameter: Tissue Value: Aerial
  misc_feature: MA Experiment 108559 PARAMETER Experiment Name: Zm_5mM_NO_P Parameter: Treatment Value: 5mM NO vs. No Treatment
  misc_feature: MA Experiment ID: 108597 Result: Down-regulated in Transcription
  misc_feature: MA Experiment 108597 PARAMETER Experiment Name: Zm_100uM_ABA_P Parameter: Age (day) Value: 9
  misc_feature: MA Experiment 108597 PARAMETER Experiment Name: Zm_100uM_ABA_P Parameter: Organism Value: Zea mays
  misc_feature: MA Experiment 108597 PARAMETER Experiment Name: Zm_100uM_ABA_P Parameter: Plant Line Value: 35A19
  misc_feature: MA Experiment 108597 PARAMETER Experiment Name: Zm_100uM_ABA_P Parameter: Timepoint (hr) Value: 24
  misc_feature: MA Experiment 108597 PARAMETER Experiment Name: Zm_100uM_ABA_P Parameter: Tissue Value: Aerial
  misc_feature: MA Experiment 108597 PARAMETER Experiment Name: Zm_100uM_ABA_P Parameter: Treatment Value: 100uM ABA vs. No Treatment
  misc_feature: MA Experiment ID: 108687 Result: Up-regulated in Transcription
  misc_feature: MA Experiment 108687 PARAMETER Experiment Name: Zm_Embryos-Flowers__P Parameter: Tissue Value: Embryo vs. Aerial+
  misc_feature: MA Experiment ID: 108688 Result: Down-regulated in Transcription
  misc_feature: MA Experiment 108688 PARAMETER Experiment Name: Zm_Embryos-Flowers__P Parameter: Tissue Value: Immature Flowers vs. Aerial+
  misc_feature: MA Experiment ID: 20000478 Result: Down-regulated in Transcription
  misc_feature: MA Experiment 20000478 PARAMETER Experiment Name: Zm_5mM_SA_P Parameter: Age (day) Value: 11
  misc_feature: MA Experiment 20000478 PARAMETER Experiment Name: Zm_5mM_SA_P Parameter: Organism Value: Zea mays
  misc_feature: MA Experiment 20000478 PARAMETER Experiment Name: Zm_5mM_SA_P Parameter: Plant Line Value: 35A19
  misc_feature: MA Experiment 20000478 PARAMETER Experiment Name: Zm_5mM_SA_P Parameter: Timepoint (hr) Value: 72
  misc_feature: MA Experiment 20000478 PARAMETER Experiment Name: Zm_5mM_SA_P Parameter: Tissue Value: Aerial
  misc_feature: MA Experiment 20000478 PARAMETER Experiment Name: Zm_5mM_SA_P Parameter: Treatment Value: 5mM SA vs. No Treatment
  misc_feature: MA Experiment ID: 20000535 Result: Up-regulated in Transcription
  misc_feature: MA Experiment 20000535 PARAMETER Experiment Name: Zm_Hybrid_Seed_Dev_P Parameter: DAP Value: 30 vs. 12
  misc_feature: MA Experiment 20000535 PARAMETER Experiment Name: Zm_Hybrid_Seed_Dev_P Parameter: Organism Value: Zea mays
  misc_feature: MA Experiment 20000535 PARAMETER Experiment Name: Zm_Hybrid_Seed_Dev_P Parameter: Plant Line Value: 35A19
  misc_feature: MA Experiment 20000535 PARAMETER Experiment Name: Zm_Hybrid_Seed_Dev_P Parameter: Tissue Value: Embryo vs. Unfert Floret
  misc_feature: MA Experiment ID: 20000626 Result: Down-regulated in Transcription
  misc_feature: MA Experiment 20000626 PARAMETER Experiment Name: Zm_Herbicide-Treatments_P Parameter: Timepoint (hr) Value: 12
  misc_feature: MA Experiment 20000626 PARAMETER Experiment Name: Zm_Herbicide-Treatments_P Parameter: Tissue Value: Aerial
  misc_feature: MA Experiment 20000626 PARAMETER Experiment Name: Zm_Herbicide-Treatments_P Parameter: Treatment Value: Roundup vs. No Treatment
gcacgtttctctgcgactcgcacggcccgcgcccaccaccgaccaccccacctggttcggtcggcactcggcaccccgccccgcatacatgccgccgcccagcctcaccgtggcgcgcgacccggccgccgccgccaccacgcggcaccgcaaggtccacccgacgccgggcggaggcgcagggacgacgaaggagatgggcgcggcggaggggtgggcgcggcccgagtggtgctcggcggcgggcgccgcggccgtgctgcggcggcacccggcgcccgcgctcttcgggtgcggcctcctgctcttcatggccgtcgagtacaccatccccatggtcaggccggacgcgccgccgctcgacctgggcttcgtcgccaccaggggcttgcacgccgccgtcgccgcgaggccctggctcaactcgctcctcgccgcgctcaacacggtcttcgtcgcgatgcaggcggcgtacatcctgtgggccatcctcggcgagcagcggccgcgcgccgccgtcgccacgctcatgatgttcacctgccggggcgcgctgggctgcgccacccagctcccgctgccggaggagttcctggggtccgggatggacttccccgtgggcaacgtctccttcttcctcttcttctcgggccacgtcgcgggcgcggtcatcgcggccgccgacatgcgccgcgagggccggctggcgctggcgcgcctntacgacgcgctcaacgcgctccagggggtcaggctgctggcgtgcaggggacactacaccatcgacctggccgtcggtgtcggagcggggatcctcttcgatacgctctccggatggtacttccacgccaagaacgcaccggagaagcactgccgcagctgccagtgccacaaggctctcctttcacgctagctcataggtgtggtgtgtttggtaagttactgtagcggtgctgttttgtaagaaatggttttgattgccagtcgttgtgatagttttcatcgcgggtttataatacgaatcgactgagaactattttcgccaacgattcgatatactaaccgttgtgaaaaatatgttataggtgtatttatcct

SEQ ID NO: 19463 - protein, 315 aa, Zea mays subsp. mays
  peptide (1)..(315): Ceres Seq. ID no. 13494529
  misc_feature (6)..(266): Homolog of NCBI NO: 23105035 NR Description: hypothetical protein [Azotobacter vinelandii]
  misc_feature (42)..(273): Homolog of NCBI NO: 22959756 NR Description: hypothetical protein [Rhodobacter sphaeroides]
  misc_feature (241)..(241): Xaa is any aa, unknown or other
ARFSATRTARAHHRPPHLVRSALGTPPRIHAAAQPHRGARPGRRRHHAAPQGPPDAGRRRRDDEGDGRGGGVGAARVVLGGGRRGRAAAAPGARALRVRPPALHGRRVHHPHGQAGRAAARPGLRRHQGLARRRRREALAQLAPRRAQHGLRRDAGGVHPVGHPRRAAAARRRRHAHDVHLPGRAGLRHPAPAAGGVPGVRDGLPRGQRLLLPLLLGPRRGRGHRGRRHAPRGPAGAGAPXRRAQRAPGGQAAGVQGTLHHRPGRRCRSGDPLRYALRMVLPRQERTGEALPQLPVPQGSPFTLAHRCGVFGKLL

SEQ ID NO: 19464 - protein, 303 aa, Zea mays subsp. mays
  peptide (1)..(303): Ceres Seq. ID no. 13494530
  misc_feature (86)..(303): Homolog of NCBI NO: 15232701 NR Description: phosphatidic acid phosphatase (PAP2)-related
  misc_feature (77)..(280): Homolog of NCBI NO: 18400910 NR Description: phosphatidic acid phosphatase (PAP2)-related
  misc_feature (77)..(280): Homolog of NCBI NO: 13926235 NR Description: AT3g15820/MSJ11_22 [Arabidopsis thaliana]
  misc_feature (240)..(240): Xaa is any aa, unknown or other
HVSLRLARPAPTTDHPTWFGRHSAPRPAYMPPPSLTVARDPAAAATTRHRKVHPTPGGGAGTTKEMGAAEGWARPEWCSAAGAAAVLRRHPAPALFGCGLLLFMAVEYTIPMVRPDAPPLDLGFVATRGLHAAVAARPWLNSLLAALNTVFVAMQAAYILWAILGEQRPRAAVATLMMFTCRGALGCATQLPLPEEFLGSGMDFPVGNVSFFLFFSGHVAGAVIAAADMRREGRLALARXYDALNALQGVRLLACRGHYTIDLAVGVGAGILFDTLSGWYFHAKNAPEKHCRSCQCHKALLSR

SEQ ID NO: 19465 - protein, 274 aa, Zea mays subsp. mays
  peptide (1)..(274): Ceres Seq. ID no. 13494531
  misc_feature (57)..(274): Homolog of NCBI NO: 15232701 NR Description: phosphatidic acid phosphatase (PAP2)-related
  misc_feature (48)..(251): Homolog of NCBI NO: 18400910 NR Description: phosphatidic acid phosphatase (PAP2)-related
  misc_feature (48)..(251): Homolog of NCBI NO: 13926235 NR Description: AT3g15820/MSJ11_22 [Arabidopsis thaliana]
  misc_feature (211)..(211): Xaa is any aa, unknown or other
MPPPSLTVARDPAAAATTRHRKVHPTPGGGAGTTKEMGAAEGWARPEWCSAAGAAAVLRRHPAPALFGCGLLLFMAVEYTIPMVRPDAPPLDLGFVATRGLHAAVAARPWLNSLLAALNTVFVAMQAAYILWAILGEQRPRAAVATLMMFTCRGALGCATQLPLPEEFLGSGMDFPVGNVSFFLFFSGHVAGAVIAAADMRREGRLALARXYDALNALQGVRLLACRGHYTIDLAVGVGAGILFDTLSGWYFHAKNAPEKHCRSCQCHKALLSR

SEQ ID NO: 19466 - DNA, 1158 bp, Zea mays subsp. mays
  misc_feature (1)..(1158): Ceres Seq. ID no. 12359329
  misc_feature: MA Experiment ID: 108543 Result: Up-regulated in Transcription
cctccaaaccaaggcggccaagccccttccatttgccaggcggccacaccatctgatccccaattcgtttccacctatcgagctaaggtgcgacgacggcggtcgcagcgtcccctccctccctccgtaccgctgccgccggtctaccaaacggtgaaatatttacgtaagcgaatcagggtcttgaagatagcttccagatatgtggggttttgcatcaaatgcttgggcatccgggctggggaagaggagtcccccaaattgcacctcttcgagtgctgcttgttccgatgacgaagcatcctcgtgcacgagcagggaagaaggcctggaatgcccaatatgttgggagtctttcaatatagtggagaatgtgccttacgtgctatggtgcggccacaccctttgcaagaactgcgtcctaggacttcaatgggccgtcatcaaagttccaactgtgccgatgcagctacccttcttcgtttgctgtccctggtgcaacctcctgtcgcttcgcatactttacaaagggaacctcacgttcccacggaagaattatttcctcctctggatggttgaggggatgaatggtgagcgggccagatcacgcccagctactcacagcgagcaacatactccatggctctcaagcagcagcagagcaaatggaaatgcaggctgttcaaatcccacaagacgccaccttccgctgccaccgccggttgacactacttcgcccaccaatgcaaatcatgccaaccatggggtccctgtccctctgctgaacgcagagagagtacaagcttcgctgcgcaagtccttgtcgttcctggttcacctgaccgccaagtttcccctggtgttcatcttcctcctcatagtgctctatgcgatccctgccagcgcagcagtcttgctactgtacatccttatcacggtgctgttcgcgctcccctcgttcctgatactgtatttcgcgtatccgagcctggactggcttgttagggaaatctttgcctgagatttccttgttcggtaaaatctcaatactgttgttgagtccttgtataactgaaccttccctagatcttgttgcaagcgtggatgctattgcaaagttttggtttttacaccatgagatgtgtttacctcaagtcc

SEQ ID NO: 19467 - protein, 272 aa, Zea mays subsp. mays
  peptide (1)..(272): Ceres Seq. ID no. 12359330
  misc_feature (1)..(270): Homolog of NCBI NO: 21592563 NR Description: putative RING zinc finger protein [Arabidopsis
  misc_feature (1)..(270): Homolog of NCBI NO: 15221223 NR Description: putative RING zinc finger protein
  misc_feature (1)..(270): Homolog of NCBI NO: 18409246 NR Description: expressed protein
  misc_feature (1)..(270): Homolog of NCBI NO: 21594048 NR Description: unknown [Arabidopsis thaliana]
  misc_feature (175)..(270): Homolog of NCBI NO: 11994767 NR Description: RING zinc finger protein-like [Arabidopsis
  misc_feature (1)..(135): Homolog of NCBI NO: 11994767 NR Description: RING zinc finger protein-like [Arabidopsis
  misc_feature (175)..(270): Homolog of NCBI NO: 15228658 NR Description: unknown protein; protein id: At3g29270.1
  misc_feature (1)..(135): Homolog of NCBI NO: 15228658 NR Description: unknown protein; protein id: At3g29270.1
MWGFASNAWASGLGKRSPPNCTSSSAACSDDEASSCTSREEGLECPICWESFNIVENVPYVLWCGHTLCKNCVLGLQWAVIKVPTVPMQLPFFVCCPWCNLLSLRILYKGNLTFPRKNYFLLWMVEGMNGERARSRPATHSEQHTPWLSSSSRANGNAGCSNPTRRHLPLPPPVDTTSPTNANHANHGVPVPLLNAERVQASLRKSLSFLVHLTAKFPLVFIFLLIVLYAIPASAAVLLLYILITVLFALPSFLILYFAYPSLDWLVREIFA

SEQ ID NO: 19468 - protein, 185 aa, Zea mays subsp. mays
  peptide (1)..(185): Ceres Seq. ID no. 12359331
  misc_feature (1)..(183): Homolog of NCBI NO: 21592563 NR Description: putative RING zinc finger protein [Arabidopsis
  misc_feature (1)..(183): Homolog of NCBI NO: 15221223 NR Description: putative RING zinc finger protein
  misc_feature (1)..(183): Homolog of NCBI NO: 18409246 NR Description: expressed protein
  misc_feature (1)..(183): Homolog of NCBI NO: 21594048 NR Description: unknown [Arabidopsis thaliana]
  misc_feature (88)..(183): Homolog of NCBI NO: 11994767 NR Description: RING zinc finger protein-like [Arabidopsis
  misc_feature (1)..(48): Homolog of NCBI NO: 11994767 NR Description: RING zinc finger protein-like [Arabidopsis
  misc_feature (88)..(183): Homolog of NCBI NO: 15228658 NR Description: unknown protein; protein id: At3g29270.1
  misc_feature (1)..(48): Homolog of NCBI NO: 15228658 NR Description: unknown protein; protein id: At3g29270.1
MQLPFFVCCPWCNLLSLRILYKGNLTFPRKNYFLLWMVEGMNGERARSRPATHSEQHTPWLSSSSRANGNAGCSNPTRRHLPLPPPVDTTSPTNANHANHGVPVPLLNAERVQASLRKSLSFLVHLTAKFPLVFIFLLIVLYAIPASAAVLLLYILITVLFALPSFLILYFAYPSLDWLVREIFA

SEQ ID NO: 19469 - protein, 149 aa, Zea mays subsp. mays
  peptide (1)..(149): Ceres Seq. ID no. 12359332
  misc_feature (1)..(12): Homolog of NCBI NO: 15228658 NR Description: unknown protein; protein id: At3g29270.1
  misc_feature (1)..(147): Homolog of NCBI NO: 21592563 NR Description: putative RING zinc finger protein [Arabidopsis
  misc_feature (1)..(147): Homolog of NCBI NO: 15221223 NR Description: putative RING zinc finger protein
  misc_feature (1)..(147): Homolog of NCBI NO: 18409246 NR Description: expressed protein
  misc_feature (1)..(147): Homolog of NCBI NO: 21594048 NR Description: unknown [Arabidopsis thaliana]
  misc_feature (52)..(147): Homolog of NCBI NO: 11994767 NR Description: RING zinc finger protein-like [Arabidopsis
  misc_feature (1)..(12): Homolog of NCBI NO: 11994767 NR Description: RING zinc finger protein-like [Arabidopsis
  misc_feature (52)..(147): Homolog of NCBI NO: 15228658 NR Description: unknown protein; protein id: At3g29270.1
MVEGMNGERARSRPATHSEQHTPWLSSSSRANGNAGCSNPTRRHLPLPPPVDTTSPTNANHANHGVPVPLLNAERVQASLRKSLSFLVHLTAKFPLVFIFLLIVLYAIPASAAVLLLYILITVLFALPSFLILYFAYPSLDWLVREIFA

SEQ ID NO: 19470 - DNA, 3065 bp, Zea mays subsp. mays
  misc_feature (1)..(3065): Ceres Seq. ID no. 12375814
  misc_feature: MA Experiment ID: 108543 Result: Up-regulated in Transcription
gcacgagaccattacctagaacatcctaaatcgaaaatcccaacatcgcccgctctctcctcgctgttctccgctgtcatctcccccggagaagcgtggctcctgtagccggcctcctacctgcccctcctccgcgcgccgagcaccagacgacgcgacacggccgagcacggtcgctgcttccgcggcggcgccgctccactctcgtgctgcagctagcggaacagagatccgtggggacatgaacagggtttctcctctctgttggtatgaactaaattgatcgatggtcctattgaatatagagctactattatatggcatattctgtcatgcaaatgatggtggttgtaagttgtgattgaggaactccattgtttgagaaatggatgaaacaccaactagttctgggcaatctgaagatagttcatgtgaacctaattggtggccaccagacttattagagaagatagagtctgcttccatatcaaggaaacatgatgttttgggtaatctaaggtcctcatcctggaaggcatcacaattactgtggtcaacaggatcttattcagggttaatccctaatggtttctattcaatcatcccggataaaaagttgaaggagactttcccaacaattccatcggtagatgacctgcaaactcttgaagcagatgggcttaaggctgacataattattgtagacactgagagggataagaaggttttcatgttgaagcagcttagtgctgcacttgtgaaagggttaagctctagcccagcattagtgataaagaaaatagcaggtttggtttttgactgcttcaagcgacaaaatcctgacgccagtccagcaaaaggctcgattgaagatactcatttctttggatataaaggaccacaacttctagggcagataagacatggatcatgccgacctcgagctattctatttaaagttcttgcagatgctgttggccttgagagtaaacttgtagttggtctacctgatgacggtgccgttggatttgtggactcctacaaacatatgtctgtggtagtttcgctaaactctatggaactgctagtggatcttatgcgatttccaggccagttgattccattttcagctaaggctatctttatatcgcatatatctgctgcgggtgaaagtgactcagctgaaaatgactcctgtgattctccccttgagcccaacagccctctgtatggattgtctgataaagttgaaactgaaggaattgaatcttcatcaaatctatctggacgatcactgcgtaatatgatgttgagatcaaggacattttctgaggggaaattaagcacgtcatgtagtgaaccgaatatagcgaatgccttttggaggcacagtcaaaggagaggagttgccgaggaaccccgtggtgctagttccagtcctgagcatccattaatgagagcaaggggaagatctatacttggtggtgagaagcaatcatttcaagaatacacagaatctggagctgcttcaagatcagatggtcttgggggcacttcaacctctaatgctcgaagaataaggcgtagaagcattagcatcacccctgagattggagatgacattgtgagggcagttcgggctatgaacgaaacactaaagcaaaatcgctttcaaagggatcatgtcgaaggttcatgctcatatgttacggaagaccaaagcaacgccaatgactgcccaaataaagatgatgcatctcggataattggtgctactgacagtgactcaagaaaccgaactggtcctactcaaaaggccatgtcattgccttcttcgcctcatgaatataggggtcaagatacccaaaaaggtgatgattttataagtaaagagaagatggcattggcatggaacaaagttttccagagctccccatttcttaacaagcccttgctgccgtttgaggaatggaacatagatttctctgagataacaattggcacgcgggttggaataggattcttcggagaagttttccgtggtatatggaatggaaccgatgttgccatcaaagtatttctagaacaggacttgacaactgaaaacatggaagatttttgcaacgagatatacatcctgagccggttgcgacatccaaacgttatattgtttcttggtgcatgcattacacctccacacttgtcaatggttactgaatatatggaaatgggatcactgtattatctcatccatatgagtggtcagaaaaagaaacttagttggcgtaggaggttgaaaattattcgtgatatatgcagggggttgatgtgcatacaccgcatgaagatagttcacagggatctcaaaagtgcaaactgcctggtgaacaaacattggactgttaagatatgtgactttggtctatctcgagtgatgattgatagtcctatgactgataattcctctgctggcaccccggaatggatggcccctgagcttatacggaatgaaccttttacagagaaatgtgatatattcagccttggtgttatcatgtgggagctgtgcacattgagtcgcccatgggaaggcatctccccagttcaagtggtgtacgcagttgctaatgaaggttcgcggcttgagattcctgaaggacctctcggcaggttgattgcagattgctgggcagagcctgagaatcggccgagctgccaggagatcctaacccgtttgctggactgcgaatacactgtcagctgaaatggaagctgctcgctcgtccactcaattcctgcacaggtggaaacatttcttgtataaaacctgtaaaaaaggctgccgattctgcggacttgaggtcacatatcgaagcgctgtgtttttttttaaacaatggcgaccctttctcaaaaaaaatgtaaaaatgattccctggttatagaagaacatgtctgattcgatagacgtgccttgcatcgcagggcaagctggttgttgtaccttattctagataagtagcacgcccgcgaatgctgttcggctttcaaatagctgcagctcc

SEQ ID NO: 19471 - protein, 792 aa, Zea mays subsp. mays
  peptide (1)..(792): Ceres Seq. ID no. 12375815
  misc_feature (479)..(765): Homolog of NCBI NO: 25408119 NR Description: probable protein kinase [imported] - Arabidopsis
  misc_feature (479)..(791): Homolog of NCBI NO: 30684784 NR Description: protein kinase family [Arabidopsis thaliana]
  misc_feature (1)..(590): Homolog of NCBI NO: 11346387 NR Description: hypothetical protein F14P22.230 - Arabidopsis
  misc_feature (293)..(791): Homolog of NCBI NO: 11346387 NR Description: hypothetical protein F14P22.230 - Arabidopsis
  misc_feature (519)..(593): Homolog of NCBI NO: 34911062 NR Description: P0485G01.18 [Oryza sativa (japonica
  misc_feature (30)..(791): Homolog of NCBI NO: 22655056 NR Description: unknown protein [Arabidopsis thaliana]
  misc_feature (30)..(791): Homolog of NCBI NO: 18411001 NR Description: putative protein
  misc_feature (383)..(500): Homolog of NCBI NO: 34911062 NR Description: P0485G01.18 [Oryza sativa (japonica
  misc_feature (646)..(792): Homolog of NCBI NO: 34911062 NR Description: P0485G01.18 [Oryza sativa (japonica
  misc_feature (1)..(299): Homolog of NCBI NO: 34911062 NR Description: P0485G01.18 [Oryza sativa (japonica
MDETPTSSGQSEDSSCEPNWWPPDLLEKIESASISRKHDVLGNLRSSSWKASQLLWSTGSYSGLIPNGFYSIIPDKKLKETFPTIPSVDDLQTLEADGLKADIIIVDTERDKKVFMLKQLSAALVKGLSSSPALVIKKIAGLVFDCFKRQNPDASPAKGSIEDTHFFGYKGPQLLGQIRHGSCRPRAILFKVLADAVGLESKLVVGLPDDGAVGFVDSYKHMSVVVSLNSMELLVDLMRFPGQLIPFSAKAIFISHISAAGESDSAENDSCDSPLEPNSPLYGLSDKVETEGIESSSNLSGRSLRNMMLRSRTFSEGKLSTSCSEPNIANAFWRHSQRRGVAEEPRGASSSPEHPLMRARGRSILGGEKQSFQEYTESGAASRSDGLGGTSTSNARRIRRRSISITPEIGDDIVRAVRAMNETLKQNRFQRDHVEGSCSYVTEDQSNANDCPNKDDASRIIGATDSDSRNRTGPTQKAMSLPSSPHEYRGQDTQKGDDFISKEKMALAWNKVFQSSPFLNKPLLPFEEWNIDFSEITIGTRVGIGFFGEVFRGIWNGTDVAIKVFLEQDLTTENMEDFCNEIYILSRLRHPNVILFLGACITPPHLSMVTEYMEMGSLYYLIHMSGQKKKLSWRRRLKIIRDICRGLMCIHRMKIVHRDLKSANCLVNKHWTVKICDFGLSRVMIDSPMTDNSSAGTPEWMAPELIRNEPFTEKCDIFSLGVIMWELCTLSRPWEGISPVQVVYAVANEGSRLEIPEGPLGRLIADCWAEPENRPSCQEILTRLLDCEYTVS

SEQ ID NO: 19472 - protein, 677 aa, Zea mays subsp. mays
  peptide (1)..(677): Ceres Seq. ID no. 12375816
  misc_feature (364)..(650): Homolog of NCBI NO: 25408119 NR Description: probable protein kinase [imported] - Arabidopsis
  misc_feature (364)..(676): Homolog of NCBI NO: 30684784 NR Description: protein kinase family [Arabidopsis thaliana]
  misc_feature (1)..(475): Homolog of NCBI NO: 11346387 NR Description: hypothetical protein F14P22.230 - Arabidopsis
  misc_feature (178)..(676): Homolog of NCBI NO: 11346387 NR Description: hypothetical protein F14P22.230 - Arabidopsis
  misc_feature (404)..(478): Homolog of NCBI NO: 34911062 NR Description: P0485G01.18 [Oryza sativa (japonica
  misc_feature (1)..(676): Homolog of NCBI NO: 22655056 NR Description: unknown protein [Arabidopsis thaliana]
  misc_feature (1)..(676): Homolog of NCBI NO: 18411001 NR Description: putative protein
  misc_feature (268)..(385): Homolog of NCBI NO: 34911062 NR Description: P0485G01.18 [Oryza sativa (japonica
  misc_feature (531)..(677): Homolog of NCBI NO: 34911062 NR Description: P0485G01.18 [Oryza sativa (japonica
  misc_feature (1)..(184): Homolog of NCBI NO: 34911062 NR Description: P0485G01.18 [Oryza sativa (japonica
MLKQLSAALVKGLSSSPALVIKKIAGLVFDCFKRQNPDASPAKGSIEDTHFFGYKGPQLLGQIRHGSCRPRAILFKVLADAVGLESKLVVGLPDDGAVGFVDSYKHMSVVVSLNSMELLVDLMRFPGQLIPFSAKAIFISHISAAGESDSAENDSCDSPLEPNSPLYGLSDKVETEGIESSSNLSGRSLRNMMLRSRTFSEGKLSTSCSEPNIANAFWRHSQRRGVAEEPRGASSSPEHPLMRARGRSILGGEKQSFQEYTESGAASRSDGLGGTSTSNARRIRRRSISITPEIGDDIVRAVRAMNETLKQNRFQRDHVEGSCSYVTEDQSNANDCPNKDDASRIIGATDSDSRNRTGPTQKAMSLPSSPHEYRGQDTQKGDDFISKEKMALAWNKVFQSSPFLNKPLLPFEEWNIDFSEITIGTRVGIGFFGEVFRGIWNGTDVAIKVFLEQDLTTENMEDFCNEIYILSRLRHPNVILFLGACITPPHLSMVTEYMEMGSLYYLIHMSGQKKKLSWRRRLKIIRDICRGLMCIHRMKIVHRDLKSANCLVNKHWTVKICDFGLSRVMIDSPMTDNSSAGTPEWMAPELIRNEPFTEKCDIFSLGVIMWELCTLSRPWEGISPVQVVYAVANEGSRLEIPEGPLGRLIADCWAEPENRPSCQEILTRLLDCEYTVS

SEQ ID NO: 19473 - protein, 571 aa, Zea mays subsp. mays
  peptide (1)..(571): Ceres Seq. ID no. 12375817
  misc_feature (258)..(544): Homolog of NCBI NO: 25408119 NR Description: probable protein kinase [imported] - Arabidopsis
  misc_feature (258)..(570): Homolog of NCBI NO: 30684784 NR Description: protein kinase family [Arabidopsis thaliana]
  misc_feature (1)..(369): Homolog of NCBI NO: 11346387 NR Description: hypothetical protein F14P22.230 - Arabidopsis
  misc_feature (72)..(570): Homolog of NCBI NO: 11346387 NR Description: hypothetical protein F14P22.230 - Arabidopsis
  misc_feature (298)..(372): Homolog of NCBI NO: 34911062 NR Description: P0485G01.18 [Oryza sativa (japonica
  misc_feature (1)..(570): Homolog of NCBI NO: 22655056 NR Description: unknown protein [Arabidopsis thaliana]
  misc_feature (1)..(570): Homolog of NCBI NO: 18411001 NR Description: putative protein
  misc_feature (162)..(279): Homolog of NCBI NO: 34911062 NR Description: P0485G01.18 [Oryza sativa (japonica
  misc_feature (425)..(571): Homolog of NCBI NO: 34911062 NR Description: P0485G01.18 [Oryza sativa (japonica
  misc_feature (1)..(78): Homolog of NCBI NO: 34911062 NR Description: P0485G01.18 [Oryza sativa (japonica
MSVVVSLNSMELLVDLMRFPGQLIPFSAKAIFISHISAAGESDSAENDSCDSPLEPNSPLYGLSDKVETEGIESSSNLSGRSLRNMMLRSRTFSEGKLSTSCSEPNIANAFWRHSQRRGVAEEPRGASSSPEHPLMRARGRSILGGEKQSFQEYTESGAASRSDGLGGTSTSNARRIRRRSISITPEIGDDIVRAVRAMNETLKQNRFQRDHVEGSCSYVTEDQSNANDCPNKDDASRIIGATDSDSRNRTGPTQKAMSLPSSPHEYRGQDTQKGDDFISKEKMALAWNKVFQSSPFLNKPLLPFEEWNIDFSEITIGTRVGIGFFGEVFRGIWNGTDVAIKVFLEQDLTTENMEDFCNEIYILSRLRHPNVILFLGACITPPHLSMVTEYMEMGSLYYLIHMSGQKKKLSWRRRLKIIRDICRGLMCIHRMKIVHRDLKSANCLVNKHWTVKICDFGLSRVMIDSPMTDNSSAGTPEWMAPELIRNEPFTEKCDIFSLGVIMWELCTLSRPWEGISPVQVVYAVANEGSRLEIPEGPLGRLIADCWAEPENRPSCQEILTRLLDCEYTVS

SEQ ID NO: 19474 - DNA, 842 bp, Zea mays subsp. mays
  misc_feature (1)..(842): Ceres Seq. ID no. 12358082
  misc_feature: MA Experiment ID: 108535 Result: Down-regulated in Transcription
  misc_feature: MA Experiment 108535 PARAMETER Experiment Name: Zm_Meristem_P Parameter: Age (day) Value: 8
  misc_feature: MA Experiment 108535 PARAMETER Experiment Name: Zm_Meristem_P Parameter: Organism Value: Zea mays
  misc_feature: MA Experiment 108535 PARAMETER Experiment Name: Zm_Meristem_P Parameter: Plant Line Value: 35A19
  misc_feature: MA Experiment 108535 PARAMETER Experiment Name: Zm_Meristem_P Parameter: Tissue Value: Root Meristem vs. Above Root Meristem
  misc_feature: MA Experiment ID: 108543 Result: Down-regulated in Transcription
  misc_feature: MA Experiment ID: 20000108 Result: Down-regulated in Transcription
  misc_feature: MA Experiment 20000108 PARAMETER Experiment Name: Zm_Root-Tips_P Parameter: Age (day) Value: 12
  misc_feature: MA Experiment 20000108 PARAMETER Experiment Name: Zm_Root-Tips_P Parameter: Organism Value: Zea mays
  misc_feature: MA Experiment 20000108 PARAMETER Experiment Name: Zm_Root-Tips_P Parameter: Tissue Value: Root tips vs. Root mid region    35
  misc_feature: MA Experiment 20000108 PARAMETER Experiment Name: Zm_Root-Tips_P Parameter: Tissue Value: Root tips vs. Root mid region   Sequence Listing-Misc Features (4)
  misc_feature: MA Experiment ID: 20000534 Result: Down-regulated in Transcription
  misc_feature: MA Experiment 20000534 PARAMETER Experiment Name: Zm_Hybrid_Pollen_P Parameter: Age (day) Value: 8
  misc_feature: MA Experiment 20000534 PARAMETER Experiment Name: Zm_Hybrid_Pollen_P Parameter: Organism Value: Zea mays
  misc_feature: MA Experiment 20000534 PARAMETER Experiment Name: Zm_Hybrid_Pollen_P Parameter: Plant Line Value: 35A19
  misc_feature: MA Experiment 20000534 PARAMETER Experiment Name: Zm_Hybrid_Pollen_P Parameter: Tissue Value: Pollen vs. Aerial
  misc_feature: MA Experiment ID: 20000535 Result: Down-regulated in Transcription
  misc_feature: MA Experiment 20000535 PARAMETER Experiment Name: Zm_Hybrid_Seed_Dev_P Parameter: DAP Value: 30 vs. 12
  misc_feature: MA Experiment 20000535 PARAMETER Experiment Name: Zm_Hybrid_Seed_Dev_P Parameter: Organism Value: Zea mays
  misc_feature: MA Experiment 20000535 PARAMETER Experiment Name: Zm_Hybrid_Seed_Dev_P Parameter: Plant Line Value: 35A19
  misc_feature: MA Experiment 20000535 PARAMETER Experiment Name: Zm_Hybrid_Seed_Dev_P Parameter: Tissue Value: Embryo vs. Unfert Floret
  misc_feature: MA Experiment ID: 20001608 Result: Down-regulated in Transcription
  misc_feature: MA Experiment 20001608 PARAMETER Experiment Name: Zm_50ppm_KNO3_L-to-H_P Parameter: Age (day) Value: 21
  misc_feature: MA Experiment 20001608 PARAMETER Experiment Name: Zm_50ppm_KNO3_L-to-H_P Parameter: Organism Value: Zea mays
  misc_feature: MA Experiment 20001608 PARAMETER Experiment Name: Zm_50ppm_KNO3_L-to-H_P Parameter: Plant Line Value: 35A19
  misc_feature: MA Experiment 20001608 PARAMETER Experiment Name: Zm_50ppm_KNO3_L-to-H_P Parameter: Timepoint (hr) Value: 48
  misc_feature: MA Experiment 20001608 PARAMETER Experiment Name: Zm_50ppm_KNO3_L-to-H_P Parameter: Tissue Value: Shoots
  misc_feature: MA Experiment 20001608 PARAMETER Experiment Name: Zm_50ppm_KNO3_L-to-H_P Parameter: Treatment Value: 50ppm KNO3 vs. 50ppm KCl
aacatcatcagctcgcgttgcgtgctcggcccgcctaatcctctttctttagctcaagaccggcgactaaatttggcgccagccggcagcagggggtataagtagtcgccgccgccgtcttcctcgcacctccccgctccgctctcccttgtcgagttctcagcaccggccgatccatcctcctccgcctccctcggttcggcctctggcctgcacaccatgaactctcgcttccggagcctctggagagccatggctggggcggcgagcagcggcaaggacacggtgcgcctgcggctgcacctgctcccggaccgccacgacgactgcgtgctcgtgtcggaggcgcccctgagcagcgacaagggcggggagttcttcatcgacatggacaggcaggcgccctccgccacggcggcggagcactgcgcggcgagcctgggcgccgcgtgcgccggcggcggcttcgtcatgagctgcagggtggagggggaggcgaggagcagcaggccgttcgtgcagcttgccatgcggcatgtcacgtgcatggaggacgccgccatgttcgtcgcgctcgccgcggccgtcgacctcagcgtcaaggcgtgccgcccgttccgcaggaaaccgaacaagaaggccgcctngccgtcgcccgaccacctcgagctcgacacctaggaacgcagaacaggaaggccccgccgactagcacccatggccgcccatggatccatctaactcgacctgtaaattcacttaatttcaagagctggactgaatcgtttgccacaatcaaaactctgttgtttgactggcctcagcagttagtacatgtttgg

SEQ ID NO: 19475 - protein, 153 aa, Zea mays subsp. mays
  peptide (1)..(153): Ceres Seq. ID no. 12358083
  misc_feature (9)..(140): Pfam Name: Protein of unknown function (DUF1005) Pfam Description: Protein of unknown function (DUF1005)
  misc_feature (76)..(140): Homolog of NCBI NO: 15230917 NR Description: unknown protein
  misc_feature (73)..(145): Homolog of NCBI NO: 15222861 NR Description: hypothetical protein
  misc_feature (82)..(145): Homolog of NCBI NO: 15218372 NR Description: unknown protein; protein id: At1g10020.1
  misc_feature (76)..(140): Homolog of NCBI NO: 21553542 NR Description: unknown [Arabidopsis thaliana]
  misc_feature (21)..(140): Homolog of NCBI NO: 15233530 NR Description: putative protein
  misc_feature (9)..(147): Homolog of NCBI NO: 34909364 NR Description: P0638D12.14 [Oryza sativa (japonica
  misc_feature (9)..(149): Homolog of NCBI NO: 36104436 NR Description: unknown protein [Oryza sativa (japonica
  misc_feature (9)..(149): Homolog of NCBI NO: 34896878 NR Description: unknown protein [Oryza sativa (japonica
  misc_feature (9)..(140): Homolog of NCBI NO: 15238004 NR Description: putative protein; protein id: At5g17640.1
  misc_feature (1)..(153): Homolog of NCBI NO: 34905328 NR Description: OJ9990_A01.12 [Oryza sativa (japonica
  misc_feature (143)..(143): Xaa is any aa, unknown or other
MNSRFRSLWRAMAGAASSGKDTVRLRLHLLPDRHDDCVLVSEAPLSSDKGGEFFIDMDRQAPSATAAEHCAASLGAACAGGGFVMSCRVEGEARSSRPFVQLAMRHVTCMEDAAMFVALAAAVDLSVKACRPFRRKPNKKAAXPSPDHLELDT

SEQ ID NO: 19476 - protein, 142 aa, Zea mays subsp. mays
  peptide (1)..(142): Ceres Seq. ID no. 12358084
  misc_feature (1)..(129): Pfam Name: Protein of unknown function (DUF1005) Pfam Description: Protein of unknown function (DUF1005)
  misc_feature (65)..(129): Homolog of NCBI NO: 15230917 NR Description: unknown protein
  misc_feature (62)..(134): Homolog of NCBI NO: 15222861 NR Description: hypothetical protein
  misc_feature (71)..(134): Homolog of NCBI NO: 15218372 NR Description: unknown protein; protein id: At1g10020.1
  misc_feature (65)..(129): Homolog of NCBI NO: 21553542 NR Description: unknown [Arabidopsis thaliana]
  misc_feature (10)..(129): Homolog of NCBI NO: 15233530 NR Description: putative protein
  misc_feature (1)..(136): Homolog of NCBI NO: 34909364 NR Description: P0638D12.14 [Oryza sativa (japonica
  misc_feature (1)..(138): Homolog of NCBI NO: 36104436 NR Description: unknown protein [Oryza sativa (japonica
  misc_feature (1)..(138): Homolog of NCBI NO: 34896878 NR Description: unknown protein [Oryza sativa (japonica
  misc_feature (1)..(129): Homolog of NCBI NO: 15238004 NR Description: putative protein; protein id: At5g17640.1
  misc_feature (1)..(142): Homolog of NCBI NO: 34905328 NR Description: OJ9990_A01.12 [Oryza sativa (japonica
  misc_feature (132)..(132): Xaa is any aa, unknown or other
MAGAASSGKDTVRLRLHLLPDRHDDCVLVSEAPLSSDKGGEFFIDMDRQAPSATAAEHCAASLGAACAGGGFVMSCRVEGEARSSRPFVQLAMRHVTCMEDAAMFVALAAAVDLSVKACRPFRRKPNKKAAXPSPDHLELDT

SEQ ID NO: 19477 - protein, 97 aa, Zea mays subsp. mays
  peptide (1)..(97): Ceres Seq. ID no. 12358085
  misc_feature (1)..(84): Pfam Name: Protein of unknown function (DUF1005) Pfam Description: Protein of unknown function (DUF1005)
  misc_feature (20)..(84): Homolog of NCBI NO: 15230917 NR Description: unknown protein
  misc_feature (17)..(89): Homolog of NCBI NO: 15222861 NR Description: hypothetical protein
  misc_feature (26)..(89): Homolog of NCBI NO: 15218372 NR Description: unknown protein; protein id: At1g10020.1
  misc_feature (20)..(84): Homolog of NCBI NO: 21553542 NR Description: unknown [Arabidopsis thaliana]
  misc_feature (1)..(84): Homolog of NCBI NO: 15233530 NR Description: putative protein
  misc_feature (1)..(91): Homolog of NCBI NO: 34909364 NR Description: P0638D12.14 [Oryza sativa (japonica
  misc_feature (1)..(93): Homolog of NCBI NO: 36104436 NR Description: unknown protein [Oryza sativa (japonica
  misc_feature (1)..(93): Homolog of NCBI NO: 34896878 NR Description: unknown protein [Oryza sativa (japonica
  misc_feature (1)..(84): Homolog of NCBI NO: 15238004 NR Description: putative protein; protein id: At5g17640.1
  misc_feature (1)..(97): Homolog of NCBI NO: 34905328 NR Description: OJ9990_A01.12 [Oryza sativa (japonica
  misc_feature (87)..(87): Xaa is any aa, unknown or other
MDRQAPSATAAEHCAASLGAACAGGGFVMSCRVEGEARSSRPFVQLAMRHVTCMEDAAMFVALAAAVDLSVKACRPFRRKPNKKAAXPSPDHLELDT

SEQ ID NO: 19478 - DNA, 679 bp, Zea mays subsp. mays
  misc_feature (1)..(679): Ceres Seq. ID no. 12418045
  misc_feature: MA Experiment ID: 108522 Result: Down-regulated in Transcription
  misc_feature: MA Experiment 108522 PARAMETER Experiment Name: Zm_42deg_Heat_P Parameter: Age (day) Value: 8
  misc_feature: MA Experiment 108522 PARAMETER Experiment Name: Zm_42deg_Heat_P Parameter: Organism Value: Zea mays
  misc_feature: MA Experiment 108522 PARAMETER Experiment Name: Zm_42deg_Heat_P Parameter: Plant Line Value: 35A19
  misc_feature: MA Experiment 108522 PARAMETER Experiment Name: Zm_42deg_Heat_P Parameter: Temperature (deg C) Value: 42 vs. 22
  misc_feature: MA Experiment 108522 PARAMETER Experiment Name: Zm_42deg_Heat_P Parameter: Timepoint (hr) Value: 1
  misc_feature: MA Experiment 108522 PARAMETER Experiment Name: Zm_42deg_Heat_P Parameter: Tissue Value: Aerial
aattgcgacacttgaaaaacgtgaagaaagatacaaggcggtgtttgcagagaggatctcggtcttccggaaagcctgctgctcccttttcggttacaagatagtgatgaatgatcagcagcagtcaaatgggattcccgtaacacgctttattctgcagtcagtgtatgcccaaagcgatgatgaaaagcttgagtttgactatgaatcaggaagcactaatatcgtggtcaacgattacacatcccaacaagaaattgctcggcaggtcgacatctacataaggaggacgaactccataccagccttcactgccaacctgacaatggagtctttcaacaaaagaagtatatgctgaagacatgaaactagtgtcagggcacattgcttgatttctgtatgttatcattgacgaagagtatgtatatgagcactcacattggtgggtgaaaactgctcctgctaattaaagttgaggctggagctttgattctattcccaacggattctttttttccctttaactagcaaggngtacatgagtattactgggcatggcgacgtaatgttgaagcttccggcttgtntagagttgagtgtagctaccaggtaactaggaatacttgattcgccaatcatgnctgacgttattcctntgagagaacgagagntttgctgc

SEQ ID NO: 19479 - protein, 118 aa, Zea mays subsp. mays
  peptide (1)..(118): Ceres Seq. ID no. 12418046
  misc_feature (1)..(116): Pfam Name: Mitotic checkpoint protein Pfam Description: Mitotic checkpoint protein
  misc_feature (2)..(117): Homolog of NCBI NO: 15240571 NR Description: mitotic checkpoint protein-like; protein id:
  misc_feature (1)..(118): Homolog of NCBI NO: 34907340 NR Description: P0471B04.4 [Oryza sativa (japonica
IATLEKREERYKAVFAERISVFRKACCSLFGYKIVMNDQQQSNGIPVTRFILQSVYAQSDDEKLEFDYESGSTNIVVNDYTSQQEIARQVDIYIRRTNSIPAFTANLTMESFNKRSIC

SEQ ID NO: 19480 - protein, 83 aa, Zea mays subsp. mays
  peptide (1)..(83): Ceres Seq. ID no. 12418047
  misc_feature (1)..(81): Pfam Name: Mitotic checkpoint protein Pfam Description: Mitotic checkpoint protein
  misc_feature (1)..(82): Homolog of NCBI NO: 15240571 NR Description: mitotic checkpoint protein-like; protein id:
  misc_feature (1)..(83): Homolog of NCBI NO: 34907340 NR Description: P0471B04.4 [Oryza sativa (japonica
MNDQQQSNGIPVTRFILQSVYAQSDDEKLEFDYESGSTNIVVNDYTSQQEIARQVDIYIRRTNSIPAFTANLTMESFNKRSIC

SEQ ID NO: 19481 - DNA, 1123 bp, Zea mays subsp. mays
  misc_feature (1)..(1123): Ceres Seq. ID no. 12425309
  misc_feature: MA Experiment ID: 108543 Result: Down-regulated in Transcription
aacgcccgcgcatgcgcatgcccgtgtcgttgaggattccgagaggcctcgcggcggcgtggcctgggtggagaaggagcacatgttcgagaaggtggtcaccccgagcgacgtggggaagctcaatcgcctggtcatcccaaagcagcacgcggagcgctacttccccgcgctggacgcctcgtccgccgcggcggcggcggcggcagcagccgcgggaggcgggaaggggctggtgctcagcttcgaggaccgggcggggaaggcgtggcgcttccgctactcgtactggaacagcagccagagctacgtgatgaccaaaggttggagccgcttcgtgaaggagaagccctcggtgccggggacacagtcttgttcgcgcgcggcgcgggcggcgcgcgcggccgcttcttcatcgatttccgccgccgtcgccaggatctcgcgttcctgcagccgacgctggcgtctgcgcagcgactcctgccgctgccgtcggtgcccatctgcccgtggcaggactacggcgcctcggctccggcgcccaaccggcacgtgctgttcctgcggccgcaggtgccggccgccgtagtgctcaagtcggtccccgtgcacgttgctgcatccgcggtggaggcgaccatgtcgaagcgcgtccgcctgttcggggtgaacctcgactgcccgccggacgccgaagacagcgccacagtcccccggggccgggcggcgtcgacgacgcttctgcaactgccctcgccatcgtcgtcaacatcctcctcgacggcagggaaggacgtgtgctgtttggatcttggactgtgaagacaatcaacatcctctagcaaaaagaaggagaaattgggtcgaggaactgatggggcactgacacacgaactgatatggctccagtactgcatctgcatgtgtaattgttgatgaattggtatttcttgatgatatcctgctcatataatcatattagctcatttgtgctttccgtaactaatgtgtgtttcttctcttttcttgatttgatctttgttccgaggatatgatatcgatcttctcattataaatgtacatattctgaatcatctctgactaaattcagtaattattt

SEQ ID NO: 19482 - protein, 196 aa, Zea mays subsp. mays
  peptide (1)..(196): Ceres Seq. ID no. 12425310
  misc_feature (28)..(133): Pfam Name: B3 DNA binding domain Pfam Description: B3 DNA binding domain
  misc_feature (11)..(116): Homolog of NCBI NO: 15228649 NR Description: RAV-like protein
  misc_feature (18)..(133): Homolog of NCBI NO: 32492293 NR Description: OSJNBa0088A01.1 [Oryza sativa (japonica
  misc_feature (6)..(121): Homolog of NCBI NO: 15239984 NR Description: putative protein; protein id: At5g06250.1
  misc_feature (24)..(116): Homolog of NCBI NO: 18407193 NR Description: putative RAV-like B3 domain DNA binding protein
  misc_feature (21)..(129): Homolog of NCBI NO: 34895690 NR Description: putative DNA binding protein RAV2
  misc_feature (23)..(116): Homolog of NCBI NO: 21618252 NR Description: RAV-like protein [Arabidopsis thaliana]
  misc_feature (24)..(116): Homolog of NCBI NO: 15223284 NR Description: DNA-binding protein, putative; protein id:
  misc_feature (11)..(116): Homolog of NCBI NO: 26450371 NR Description: putative RAV [Arabidopsis thaliana]
  misc_feature (2)..(133): Homolog of NCBI NO: 34902226 NR Description: Putative RAV-like B3 domain DNA binding protein
  misc_feature (1)..(133): Homolog of NCBI NO: 37536454 NR Description: putative DNA-binding protein
TPAHAHARVVEDSERPRGGVAWVEKEHMFEKVVTPSDVGKLNRLVIPKQHAERYFPALDASSAAAAAAAAAAGGGKGLVLSFEDRAGKAWRFRYSYWNSSQSYVMTKGWSRFVKEKPSVPGTQSCSRAARAARAAASSSISAAVARISRSCSRRWRLRSDSCRCRRCPSARGRTTAPRLRRPTGTCCSCGRRCRPP

SEQ ID NO: 19483 - protein, 169 aa, Zea mays subsp. mays
  peptide (1)..(169): Ceres Seq. ID no. 12425311
  misc_feature (1)..(106): Pfam Name: B3 DNA binding domain Pfam Description: B3 DNA binding domain
  misc_feature (1)..(89): Homolog of NCBI NO: 18407193 NR Description: putative RAV-like B3 domain DNA binding protein
  misc_feature (1)..(89): Homolog of NCBI NO: 15223284 NR Description: DNA-binding protein, putative; protein id:
  misc_feature (1)..(102): Homolog of NCBI NO: 34895690 NR Description: putative DNA binding protein RAV2
  misc_feature (1)..(89): Homolog of NCBI NO: 21618252 NR Description: RAV-like protein [Arabidopsis thaliana]
  misc_feature (1)..(94): Homolog of NCBI NO: 15239984 NR Description: putative protein; protein id: At5g06250.1
  misc_feature (1)..(89): Homolog of NCBI NO: 26450371 NR Description: putative RAV [Arabidopsis thaliana]
  misc_feature (1)..(89): Homolog of NCBI NO: 15228649 NR Description: RAV-like protein
  misc_feature (1)..(106): Homolog of NCBI NO: 32492293 NR Description: OSJNBa0088A01.1 [Oryza sativa (japonica
  misc_feature (1)..(106): Homolog of NCBI NO: 34902226 NR Description: Putative RAV-like B3 domain DNA binding protein
  misc_feature (1)..(106): Homolog of NCBI NO: 37536454 NR Description: putative DNA-binding protein
MFEKVVTPSDVGKLNRLVIPKQHAERYFPALDASSAAAAAAAAAAGGGKGLVLSFEDRAGKAWRFRYSYWNSSQSYVMTKGWSRFVKEKPSVPGTQSCSRAARAARAAASSSISAAVARISRSCSRRWRLRSDSCRCRRCPSARGRTTAPRLRRPTGTCCSCGRRCRPP

SEQ ID NO: 19484 - protein, 103 aa, Zea mays subsp. mays
  peptide (1)..(103): Ceres Seq. ID no. 12425312
RPRMRMPVSLRIPRGLAAAWPGWRRSTCSRRWSPRATWGSSIAWSSQSSTRSATSPRWTPRPPRRRRRQQPREAGRGWCSASRTGRGRRGASATRTGTAARAT

SEQ ID NO: 19485 - DNA, 439 bp, Zea mays subsp. mays
  misc_feature (1)..(439): Ceres Seq. ID no. 1923620
  misc_feature: MA Experiment ID: 20000477 Result: Down-regulated in Transcription
  misc_feature: MA Experiment 20000477 PARAMETER Experiment Name: Zm_5mM_SA_P Parameter: Age (day) Value: 10
  misc_feature: MA Experiment 20000477 PARAMETER Experiment Name: Zm_5mM_SA_P Parameter: Organism Value: Zea mays
  misc_feature: MA Experiment 20000477 PARAMETER Experiment Name: Zm_5mM_SA_P Parameter: Plant Line Value: 35A19
  misc_feature: MA Experiment 20000477 PARAMETER Experiment Name: Zm_5mM_SA_P Parameter: Timepoint (hr) Value: 48
  misc_feature: MA Experiment 20000477 PARAMETER Experiment Name: Zm_5mM_SA_P Parameter: Tissue Value: Aerial
  misc_feature: MA Experiment 20000477 PARAMETER Experiment Name: Zm_5mM_SA_P Parameter: Treatment Value: 5mM SA vs. No Treatment
  misc_feature: MA Experiment ID: 20000478 Result: Down-regulated in Transcription
  misc_feature: MA Experiment 20000478 PARAMETER Experiment Name: Zm_5mM_SA_P Parameter: Age (day) Value: 11
  misc_feature: MA Experiment 20000478 PARAMETER Experiment Name: Zm_5mM_SA_P Parameter: Organism Value: Zea mays
  misc_feature: MA Experiment 20000478 PARAMETER Experiment Name: Zm_5mM_SA_P Parameter: Plant Line Value: 35A19
  misc_feature: MA Experiment 20000478 PARAMETER Experiment Name: Zm_5mM_SA_P Parameter: Timepoint (hr) Value: 72
  misc_feature: MA Experiment 20000478 PARAMETER Experiment Name: Zm_5mM_SA_P Parameter: Tissue Value: Aerial
  misc_feature: MA Experiment 20000478 PARAMETER Experiment Name: Zm_5mM_SA_P Parameter: Treatment Value: 5mM SA vs. No Treatment
  misc_feature: MA Experiment ID: 20000479 Result: Down-regulated in Transcription
  misc_feature: MA Experiment 20000479 PARAMETER Experiment Name: Zm_Drought_P Parameter: Age (day) Value: 10
  misc_feature: MA Experiment 20000479 PARAMETER Experiment Name: Zm_Drought_P Parameter: Organism Value: Zea mays
  misc_feature: MA Experiment 20000479 PARAMETER Experiment Name: Zm_Drought_P Parameter: Plant Line Value: 35A19
  misc_feature: MA Experiment 20000479 PARAMETER Experiment Name: Zm_Drought_P Parameter: Timepoint (hr) Value: 48
  misc_feature: MA Experiment 20000479 PARAMETER Experiment Name: Zm_Drought_P Parameter: Tissue Value: Aerial
  misc_feature: MA Experiment 20000479 PARAMETER Experiment Name: Zm_Drought_P Parameter: Treatment Value: Drought vs. No Drought
  misc_feature: MA Experiment ID: 20000480 Result: Down-regulated in Transcription
  misc_feature: MA Experiment 20000480 PARAMETER Experiment Name: Zm_Drought_P Parameter: Age (day) Value: 11
  misc_feature: MA Experiment 20000480 PARAMETER Experiment Name: Zm_Drought_P Parameter: Organism Value: Zea mays
  misc_feature: MA Experiment 20000480 PARAMETER Experiment Name: Zm_Drought_P Parameter: Plant Line Value: 35A19
  misc_feature: MA Experiment 20000480 PARAMETER Experiment Name: Zm_Drought_P Parameter: Timepoint (hr) Value: 72
  misc_feature: MA Experiment 20000480 PARAMETER Experiment Name: Zm_Drought_P Parameter: Tissue Value: Aerial
  misc_feature: MA Experiment 20000480 PARAMETER Experiment Name: Zm_Drought_P Parameter: Treatment Value: Drought vs. No Drought
agtccaagatctctccctcccacggcccgctcggactccccggcgcaatggcgaccgacgcgatcctggagacgatcaagccgcggcggagcgaggagcagctcccggtgaccacggcggccgccgccggcaccaggctgcggcggcgcgtgtcctcgttctcggcgcacgtgaggccgccgccggggctgtcgtcctcggcggcagcggcgttccggcgcgcgaggtcgatgccgaccgccaaggcgctggcggcggcgggcgcgctgcggcggtggtgggagtgggtgacggcgccgttcgcgccccgcggcgacgacgacgacgaggcaaggccgctgggcggttgccgctgcgcctgcgccggcggaccgggcgggtggcgccacgtcctggtcaggctccgcgccggcgcgcgccgactgctgggccgcgacgg

SEQ ID NO: 19486 - protein, 146 aa, Zea mays subsp. mays
  peptide (1)..(146): Ceres Seq. ID no. 1923621
VQDLSLPRPARTPRRNGDRRDPGDDQAAAERGAAPGDHGGRRRHQAAAARVLVLGAREAAAGAVVLGGSGVPAREVDADRQGAGGGGRAAAVVGVGDGAVRAPRRRRRRGKAAGRLPLRLRRRTGRVAPRPGQAPRRRAPTAGPRR

SEQ ID NO: 19487 - protein, 145 aa, Zea mays subsp. mays
  peptide (1)..(145): Ceres Seq. ID no. 1923622
  misc_feature (16)..(144): Homolog of NCBI NO: 28411879 NR Description: OSJNBa0016N23.32 [Oryza sativa (japonica
SKISPSHGPLGLPGAMATDAILETIKPRRSEEQLPVTTAAAAGTRLRRRVSSFSAHVRPPPGLSSSAAAAFRRARSMPTAKALAAAGALRRWWEWVTAPFAPRGDDDDEARPLGGCRCACAGGPGGWRHVLVRLRAGARRLLGRD

SEQ ID NO: 19488 - protein, 130 aa, Zea mays subsp. mays
  peptide (1)..(130): Ceres Seq. ID no. 1923623
  misc_feature (1)..(129): Homolog of NCBI NO: 28411879 NR Description: OSJNBa0016N23.32 [Oryza sativa (japonica
MATDAILETIKPRRSEEQLPVTTAAAAGTRLRRRVSSFSAHVRPPPGLSSSAAAAFRRARSMPTAKALAAAGALRRWWEWVTAPFAPRGDDDDEARPLGGCRCACAGGPGGWRHVLVRLRAGARRLLGRD
